United States Patent Application Publication US 2014/0057251 A1 - sequence listing, part 13

SEQ ID NO: 16660 - DNA, 6495 bp, Cannabis sativa
aaattaatatttattgtaaaatttatttaataaccattaataaataatatctattaaaaaatattacatgtatataccacaatgaacaattccaaacaatatattaaatgaatatggtaggtccaaatccttacaatttgttgtttgtgttccatgtacatacaaacaaatataaatcaaaataatatgtatggttctcgatcatcaaattaaaatattataaatatagaatttataggagcttgcaatttacccatatatatcgataggtagaagactctctgattttagtatttagtatgtaaaataattagggataattacataagatactattttttgtaaaaaaattatattttacatttaaagaatttttttttacattttacaatttttcataaaaataatacgaaaacaacaagaaaactacataaaatcatatctaaataacatcaaaacaacaataaaaaatagcatacatataataaaaaatcagcaataataaattaacaagagtacaacataaaaagatcgtataagggcgccaccctttgcataaaaattttagtatttcacatgcgcatgaaacattatttaaaataatttatttttaataatttatagtgccaaaatcttaaaataagttgtttgaagcatgctatatatacacgtgaaataagttattttaagtttaattaaagtaccttaaattattaaaaaaattaaaaacttgtgagaattcttgaataactattgtagtagccgaaattcgtgtcagtaacaagaagatcgtaggcatccatggctcgtatgggctgagcccgaactatgcatctcgagtcgtaatccatgtccaatcacctagtccgagcctcaagtagctcactagagtagcggtcttctctaaagtaacagaagcataagactagtacctctccaagtgacacgttgggagaaagcgtctaaccttcagatgacctagaagatagtgctcttccctttgaaaagtggaggatgatcgcttttctaggaatgaaccacgtttgggaaatgaatcgctatcccaagacgtacaagtcctcactcggattgagcaagaggacggctctttggactatcaaaactatagacaaatactatcgttctctatgatctgacttttactttctcactctggtgaacaagattcgacagttatctatattaacagagagagtactcatttagttttaatattttcgctttactttgtaattacaagctcgtttactgactaaactgttagagtgtcttcagtcgacactaccaggtccgaccctgagcttaggcgagctaggcatatacctagagctcacctagcctaggagtctaaaaaaacaaatttttccttctaaaaatacacattttttttttattgaattgaaaatattacatttttttttctaaataagggttcaatattctaaaattttatgattatcatttgtctaatttgttcaatagaatatcaatgcctactaacattcatttcgatcattgtcaattttaccctctacaattataatgtaaccgttatacttctccacatgcaaaagttgagagtgagagacttccacaataaaattcccttagcttttgaatttttcataattttatttaaggtgaaaagactaaaagagcacatgcaataagttaaagagaattacaagtatatgtctctttttagttattgatgaaatcaatataagtcaaattgtttttagtgggagacaacttatcttataccacacatctaaaaaaaactcttgaaaatgacatttctcatgtttgatttgataagtcattaaagcttagtgctatatggacctgtccttataattttttttatttattatctatttatctactttttgtgttcttttcaatttgaactgaaaatacatactctagttatatattatgaaataatattaattaaactctttttcatacatatcatataattattagttaataattgtataatccacatgttgcatgttttttgtcttatcttcattcaaacatagttatatatatttatgaatattatcataatatcatatttataaattcaatattaattacatatcatggtttagtactattataatcaaggtataattaaatctggtgaattactagataattaagtatttagttattaatttgtgattatatgttttttagtagaaaattagaatttattggtcatacgaaaataatttttcaattatagatatatatttaaattctataagtgtattatatatattatatgtaaatttttacgaattttatgttttatgctcaataataaaaatacgataatttgaccactagagtcatttagatatgataaattatcttcgaattagcaaagtaaattagttaaacatttagaatgtgagaattattcagaattattgtgttgtgccattttactcctaagtaattaaattaattcatggctaagtaaagacagaattgtcattttgctctagatttatttaagatgtttttttgtgggattgtgtagattaatccacactttagttgattagtaattagattaatagtttcttttagataaacatttcagtaagataagacaaagaaaaccttctctctttcttttcctagtttgggcaaaatttttccttcaatttttgacccaaaaccagagatttttagctagggatctcataggttaagaaggttttagctcaaggtaactcttgttccttttctctttgatttttaagtgaaaaagttagattttgtcatgcaaattgaatgtttgttttcgtttgggtttaaattgtttggggattgtttaatttcatatgtgattttgagttgtttaagttgttattgagggtttgttgtggctgctgcagagtttgagttaggtttgagttttaaagctcaaacttagctcaataactgtggatttgactttagggccttgatggtatttttactggttgtattatgttgtttatgtcataattaggtgttttggagctttgtacaaagtttgggatacttttgagttagaaattagatttttggaaaatcttcaccaaaaatagctcaaaattggtttatttttcttgatagtgttccaaaaaaaaatggcgtatcgttttttgggaaatttttctaagtctgatttttggtgtttcctcaatatttagggtattattacgctatttattgataggaaaacttttagtttgaagtttaagtctccgaaaagtgatatagcaggtcacttattatttttgcataaattgtaacttagagccgtaaatcgtcaagcaacagtttccacccagggttaccgacatacttgcattcaaaattaaggtaagattagtataaagatatacatatatacatgtttagcgtacatatttttataattgctaaaatagcgagaatatcagccagagttctaagaatatcagttagagtaccgaacacatcaactagagtaccaagaaagattgtgattaggtgtatgggcgcttgattacagtctagttatatgtttatgtttatgctttttttactgagtctgtcgattcatagatattatttgcatgtgtaggtaagagccaggactgaaccagaatgagactcgagctgatgaagattgtacatatcaagacggttagattttaagtatttggatctttaagacaatttaggctcacattttgttagtcgttagtaaacatattttaaaatttgtaaattttaaacgaaattccaaaattatgtatttgtatatatatatatatatatttaagtttgtttaagaaagttttaattgatcacgtttttaaataaattttttgtttagtaaaagagtgcacagtaattaaaaaatatgactttttaaaatagtacaaatatgactttgagattaatttttcgacaatttttttttttaatataaccaacttgaagacaatttctagcacgtacaaatatagaaaacgtaacaaattttttcataatacctctatatcgggttattattaagttttattttgacaaaaaatcagtttaaggtactatatatatattactattttaaaaaaaatacatggttaatttatcattttacaaaataaaggcccaatcaataatttttacaaaacataaggtccacaatagtatttatcttatatttaatttgagcaaaaatatactaactttaattggtgaaagtagtttttgctaaaacaaatattattaaaataatgttatatgttgaaatctatgtaaaaaaaaaagtaattaatcttatatatatgttacaaaataataataaataaaatttctcttaatattttgcaaagaatataaataaacctacaatattgttaatattatattgggagcaatgtacttactattaagctagcgtaagttgcaataattcatatgaaaaaaaatctaatgctaaaaggaaaaattacattctaatcaaggattgcattgaaaaaaactttgtgtataattggttatatatataaatatatagttatatatatgaccaattatcaagctatagttttacatttttatcatcacttgatgtctacaccaaataacctaaactttttctcctccacacttctagatgcctcaacttctttgtatttgaactcatgatgatgagtagtactaatggctatggcttcatgatcaaatttatcctcatgatgatgatgataattcaaatctaaatccaaatcaagatccaaatcaaccttcatcacttcaatattattactattattagtaccactattgttcaaacaactttggctttcaataaccccattattatgagttacatcaattaagcaaaaaatttggccattttcatcccttgttccatgaacattgcacttatgacatgtatagaatgttataacatcattggctttcaaattgttttccttcacgaaacgattccaacctcttgtgaagacgaaactctggctactcctccaataacaataccgaaatctccatgacctcatttgcttgtcgtagaaaactagctcaatatcttcaatcccgctttcggtgatagtttccacaatattgttattatgtgtggtattatggcaactattggtgtcattgttggtcatattcaaattagggttattatttgtgttgttgttgttgttgttatctaactcactaatgtaaggaaaatatttcactgcatattttttagggataacaagtctattgagcttaccaacatcacttggtgtcaactccttttgaaagagttgtctacacaaaaattgtgcatctccatgaaccctaatttgttggttgaaatgatgatgaggatgatgaaaatgatgacgatcatgatgattagtagtacttacactattattctccacaaattcctttttttgagatcgatttctcaaaaattcttcgaatttcaattgataagaaccatccttaatcatgttgagaattgcttccatagtgtattggctttgaaaatcaggctcgtggagagtaacgttagtccatggaaagttcctatgtgtgtccccatttcgaagtctgatggcagcgctatcatacgccatggcagctgccttctcagacttaaacgttccaagccaaatcctctgatggttggcgtagatttgtgcaccccagtgaccattctgttgtggcacaacacctttaaatttcgccgagggtgaactaatattaatcattacatgattactattatcgctaatgtcataaacattagtcgtttgatcaacataatcgcgatgattatgttgatcatgatcatgctttgctctcttatagtaattactattattactttgatgaataccataattggtgtttttggcacttgaaatcatgctagatgattcatcttgatccatttttattccaatgaaacaaaaataaaaaaaaaaaagaatgagatgagattagattagaggaagaagaagaaagatatgaacttttaattaagatcatatcatcatgtaatagatagcatgagacagatataatacttaattttgggagagattaaaggaatgattatatggctaatataaaaaatcaaaagatttttataaataattttgtgttgcatgaaaatttaatgaagctaattttctacatttgaagggctcaaatttgattaacttaaacaaattttagtttaggtaacgtagtaaatctgaaacaaatttcaatttttgtagaaaaacaagagaaatatatgtataaatattttctttctatagtgtttaatagtgaaataaaacaataaaagttagaacaaactttaagtgactttacttattttagacaaatgttatcacattacaaaactaattaacccattttgttttatcataattatatata

SEQ ID NO: 16661 - DNA, 8800 bp, Cannabis sativa
aagctagccttagtggcttaaatttttttttttttggtctattatatttaaatgatttggatctttcttaaataagcatgtatattaattgagataagcaaacctaatccgacccgccaccgccaccaaataattgaaaacattaataaattagaaatgctttgtataatttggtttgtatgtgaaacttattcaattaccacgtcactcttagtactccccttactaattactactatttggagctctgcccattatgcctaccattattgcattattagattcggagtacgttaaactttaatttattgtgcatgatgattcaacaaaatttgtttgcattcattttgttgtcttaacataataagcttttctttgagacttgtcacttgagtcaatgccctgacttcatcatcaccactcatattctcaatcaaaagattcccactactcatcactctactttttcttgcttataccagatcatccacaccaaaaatggtcattaaaatatttgtctttgttgctatttctttgttctcatcaacttcaacgatcgttttcttccattttttctctgtttttttttttcttatattatggagtgtaaactgttcataacaaattcattattttttctttttctctgaaattaattttgaattaaaaaatagcaccactagactatagattacgtgacaacataagcaatataatatttaagattacaacatttcaaatatgctatgatatttttggtatattcgtctcccttcagtctgttaaagattttgtagcctaattttagattattaggttaggaaaaatcgataatacacctcctaaattagttgttttactttttagtacatctcttatctgcttcatcatcccaaagagtttttaattaagttcagttattttacataattgtgtacattgtactagtttatgattgtctatatataactaaagttcaaaattttaaataatttatagtgttaaaataaaattcaaacacttgtaattatgcatacaataaaatattttaggagtttttttatttttacacttcaaaacagtttttatgtatttttacggaattctacataaaaattcttattgcaactagcgctgcaacctaaactgcaataaaaaatcgtatagaaacccttattacaactagcgatgcaacaatatataaggtaatttcccaatattttaaccgtattttttacactataattaactactaacatatacaaatttgaaaataaattggacagcatttgagagttgtactgtaaacatactcattagcaattatatgagagagagaaagctataagtttaattagtgggaacatgaaacatcaaattacaattatatcaaacaaaacttctgtaaaaataatttaattaattactcgagctaatcaatatcaactagttattaaaattatatacatatgatgtgtgtatgatgtggggacataagctgtcgtcaaagattgtcgtttctctctttgtccacagtagcttaatttacttacatatacatttctaaccaccagtacttcaatgtgacaaagcctagctctctttcttgaaaccttttgttttggggcacaagaaagaagctaatcaaatcaatggggaaaaacatagacgaaaagagcatcatgaatcaaaaacttaaggatgtaggagatgaaccagtggaggaatcttctttagcttctttaccaaactcatcatcacctactcaagatggcagagcaagcagcatggttttcaaggttagtggttttaaattatttgattgtgctttctttccataaattgaaattgggtttgagttgttttttctcaaaaaggtttttttaatgaacaacagaaagcacatagtgtaataccagctcacttggtagctgaagcaatctccacactccatggagtgatgtggtctggtccaataacaccaagagaaatggaatatgttcagcattatgtatttgcaaaataccctcaatacagcaatggtctagtagaagtgggagaccaaaaaattgacctttctatcaatgaagaaactacttcccaatcccatgaaaaacataggtcagttaaaggtgtcatgagaaaagaattctcctctttctcattcaataatagtattttctctaatttaaacaaaacccaattggggccatcaagactccttgatatcctcacaaagaaatctacatttgaagggaacttcatttcgataccagaagttcaagccaggaaccgagccttgaaacactgcggtttagctgaagaagactacttagttttcttcacagcaaactacaaggatgccatgaccatgataggagagagttaccctttctttagaggaaacatctacatgtcaataattaatgagcaaatagatttcatcaaagaatttgctattcagaaagagtcaaaggtgattttggcaccagaaacatggttggatctaaggattaaagggtctcagctaagtcaatactttaggaggaagtgtaaacatagtcccaaaggtctcttctcatatccagccagaatgaatggaacaagatattcgatgcattggatctcagaggctcacagaaactcatggcatgttcttcttgatgccactgatttggtctttggagaggacagaattggcctttctcttcaccagcctgattttgtactgtgcagcctcactaataatagtaataatgctcattctcaaccttctataatcacctgcctcttggtcaggaaaaaatcatttgatactttgcctacttctggctaagtatatttctatgcaggatacttttcacacacatttgaccccttcttgaaagtagtcagcaccatgtctagaattaaagtcattttccaaataattatagaaaaatgttttctccagctactctgtagtaatcaatgaaaatatactatttttttgtaagatgatattctagatagtagattgagttttttatggggtaccaagttgttgggcaggtgtgtttcgaatgttatttggtaaatatgaaaaatacactatctggacaaataatgatttaaaaaaatttgctacacccaataatagtgttacagtacttcatgtgacctaatgacatattttatagtttgtacaaacttggtttggctcttgctctgaataatagtgttgagaacttcaaaaagtacttaacttctttcactacgcattgtaagctcaatattactgttttttgtttaaagaaagggtaactcaattagtaaagaagggagtagttcaaaatcttatacaatttatacatgggtagacaatttagtcctttaaaagctatgatgaggggacttctccccaattccacctgccattttgagcaagtgtggtctgtcacttgcattaagttcttgctttgaatttatgtcacaaaattgattttgaaatacaaattggcggggacccttttctctaaatgaaattcgtgttcatgagttattattgtaaaagttgattccttttatggcatatttcaaactattaaagaaacaaattaatagcaattgtgaaacccaaccatgactggcaagtctgtgatctatatcaataccaaaacaaaaattgaattaacgcgttttggatattaattgtcacccaactgtttttttctctaaaccaactattaccaaaggtctttcatttttatttgttggaacatagttttcatgtacagttttattatttcctgttagctaactcgattatcacaacttctcatttccttctgaatccaatagcttgagcctagatttagattgtagtctgaaattgaaaacgttatcttacagggaaattctatcttaaaatagacggctcttatttgatctgccaatgccaaatgtgtacatcttgaaatattaacaactaatatatttacattatatcacgacatcgtcgacatgtaacatttgtcctattgcacagctattcgtcccaaaaaaagttcaattcccaaaaagcaaacaatcccttgaagtttccctccaatacgtttaatttgcaaaaataaaaaaaaaattgaaaggtttaatatttgatatttcttttatttatttttttaagaaattataattgatatttaattgatgccatatttatttgtccggcatttaggctttgttaaatttatttatgtaatgtacgggtcgatgttgtgtctccatgcctttggcttggctgggtcaacgtttgccgacctgataaattcaagactcaattttcaacttgggtaagtgtaatattgttatttgtgtttttaattttaaattaaattttataatttatatattttaattaaactagcataactatcatctatacaccttaaaatataaaatatcaatagcgttttaaaaaatatatgtgaaaagaaaatataacattttgaagtttggcttttcttaactatgtaatatacatttataataataaaaaaaaaaatagaggaaaaaaattagaaggaaaactaaaaaaaaatcttcgtagttgtttgattagtagaaagaaaaaaaaatgttattttataattgttttttataaaattaaactaataattttagactaatattcaatccacacaaattggaggagaaaaagtttggtagatcccatctcaaattttttttcttttacttttcttttctctccgttttttttttttcgataaatgtctctctccatttctcataccaaacaatctatttttttttctttctttcttttctcttctctctcctacattttttttccactaatatttcttctctactaaaaatagtaataaaatagcacattcatagacatgaaatattacacataagtggatcaacaactcaaataagaattgatatgtttgaatggatttcattgtattcacatatcatttaccattgactaataaactcacaaattcgaacttttcttttgtataggagaaaactcgaatttgtttctttgtaattctgtagatctattaaaacactcctataactacttcttatatatctaataatgattgcaaatggggtttaagaataaatatatgacacagaagactagttccgattcattgacttaaaaatactcattcaaattcgtaatagatgcaatgtggtagtggatccatgaattaggctaattcactaaatgttccaatacttttggctattttttctactctaagtcattgtagtcaaatgagtgcggcaagaaattctttcattccaatcagatcatatttcgactaatttttccacatctacagactacagtattctcctccattaataaaagtaactctttcagctacattaattaattaattaatactaattaactaatcaagccaatcccattgtataacactcaaaaacaatcattggatattaaataaatagtcaattactaatcatgaagctaaagctttagcttctatatttctattattctttctttctaccatatacattgtaaaaatttaacttccgcaatttaaatataagtaccgtctttgctctataggcccaaggcgcacattagagtaataaaataaaatcgtgaaaatgagaattataagaaaaaaaaaaactaaaaacaaaataaaataaaataaactcacgcaatttctgtattcgcaatcggtgcactttagcaaaaacgagcaccggtatccgcagcctggctcacgttaacggccggaatctcaaaatgccagagccttccgacggccttgacgaggtattttcggcagagaaactcctcggcgaaagtcttctccaccttccgatcaacatcgtggaggaacacgtgcgtcacaccggatcctttcctgtatctagccataaccgctgccgagaaaatagctgccatacgaccgggagcctcgggaaaatagccacgtggcgcgtcgaccatgatcagatcccattccctctcgtacacctcagccggcaaattctccaaggccaaacgacaccgttcgtttcctttgagcggcgccgccttagccggccaacatcgcggctcggacttatacgtggcgagtagatcgtcggcttcccggagctgagtacggtacttgacgtagtgggcccggagttgaggggctttctggagaacggtctggacccacttagggtcctcttcgagaaatagagtgttgccacgtggattgagggaagcccacattagtgaatcgtggcccagcccaaaaaccaggaagttactaggcccccgtgactggaggacgtcgaatgagacggttatttctccgattgattgctgaggcacaatcttcgacgtggcgtagtggataatagccttaagctgaatatccgtcggaacatactcgttctccgccaccacagacttgattcgagtccccgttagagaacagagccgcgacccctcgtccgctttcaagaacgttgtgattagcagcgctccggcgattaaacaagccagactcaacccgaaaaaccatggcttttccgatagaatattcctgttcttcatcaccataaccatttgaagaagaagaaggaaaatatctttaggaatggggagtatggttttttgtcgttcttattatatatagagatagatagatttgaagatgactagaggggttcagatcaaaggacggcaatgcccttaggttataacatgaaacgcttcgttttgattggtcacaccacgtaaaacaaaacaaatggaactgggagtaataaattgaaaaagaatgttatgttagatatttttttaaaaaaaaagtaaactcccttactcatagttattgaaggacacgtgtcacgtaggttgttttggtgtaaacaatagaaaaaatagttacagatttaaattacagaatttgttgggtaaatgatttcaattcaaataattatgaatgatatggggtaaaatatatttttttaaagaaaactatcccatttattttggggaaatatgtttcaaatttagttcactgatattttcacaatgattttatataaaaatgtttactgttgattagatttagatctagaaatttgaaagtagaagaaaattatatttttaaataataaaaaaaaatgggtggcttgcatacttcaaggcaaaattgtctactttataacctttgacaatatcataacataaataaataaatcgatgaatagtaagacgcggcaatcaaatgaattgccacgtgtcctctctttagcccatttcaatcaatggaaatttatttgctgctccagattttttctattaattataaagaaaacttttttaaaggagagaccttttgatgttttctgatggaacgacaatatttttattttggagatttcactgaagtgtactttgcccttttgtttcttttttccttgaacacgttgaatgtttaggcagctttcatgataaaagttctgtacaatagtcaataaatgagtaaatgacatgtattaatgtctctcctttacatatatatatatccattatttatatttattctgtaatggtgattttcaaggtgaatttttttcaaagaaaattgtcgtttttgggaatgtagatgttgagaactgatataaggatttctcaccactatggaagttgcatggtttagttcaaacgacattatcagtaactttaaaatagatttaagttatctaaacattttactattgtgctgaaatatacattgaaccaaggctctaacctttatttccatatcttttcacatattttttactctttactcaaagagcaaaataggagaagtaactgtttcttcttttttactttttaaatactaaaataaaaaataaaataaaaaagtaaatttaagtttatttttgtttggatgaaattgcaaaattaaaatttggggctatatatagtttaattattatcaaaataatagttctagtgctatcgtgtaatagtaaagccagaggataacgttaattatctcgggcttcctcttttcagatctagacaaaaggatgcagactttaactttattctgaataacctgactacgaaattgcatggtgggaaggccaagactctatctaaagcagggcgagcaactcttatcaagtctgtcgaattatctctacctttgtatgcaatgcaaactactaaactatccaataaacttggcgctaagattgatggtttggtgcgtgatttctggtggggttcggagaaaggtaatcatggtcttcacctaaaagcctgggacaaactttgcctccccaagtttctagggggcttgggcttccgaaaatctaaagaaatgaatcaggctttcctagccaagtgggggtggaaccttcttacaggacaccagtccttatgttgtcgcatacttgaagccaaataccttaaaggaaagtcttttcttgactgcgagtcgaaagcctcggactcgtggttctggaagaatgtgactaaagcaagagcaatcatccgaaaaggtgcctgcaagcgggtggccgatggcacggatactaacatctagttggatccttggattgcgcacttaaagggattttctccccaacctattggatgggatatgaatagggagatgaaggtagctgagcttcttttggataatggtggatggaataaccaaaaacttaacaggttgtttgatcaagaaactatttcagccattctgaaaggggg

SEQ ID NO: 16662 - DNA, 2337 bp, Cannabis sativa
gcccccgagcttgtttttaaagatttattctctaaatatggaatcatgaacgactttacctgtgttgaaacccttaaacaaaatgacattgcagaaagaaaataccaacatttattaaatgttgctcatgctctttgttttcaagcacacacaccaattaaattttggtttgaatgcattatgacagttgcatttcttataaatcgcattccatctcttaatttgaacaacaaaactccctatgaattattatttcaaaaacaacctgattatactcaattgaaaacatttggttgtcttgcttttgcttctattcttactgctaacagaactaagtttgctcctatagcaaaagcttgtgtctttctaggctatcctcaaggagtgaatggatacagatatcaacacttaacaggtctttttgtcaagaaatgtgatttttcatgaaaatatctttcccttcttaaaattaaataaagataccggtaatattgaccctttcactactatagccttaccttctacagatgttgctaataccccagttaatgattaccccactgacaacactgctatccctagtctcaattttcctgtacaagacaccaacacagatacaccaaccttagtgaacacatctactgatacttctaccacactagcagctactcctgaaagattagaagtgattcctcgaagaacaagtagagccataaggcctccgacttatctcagagattttgagtgctattttattctacaagacaaacactctacccctcactctcttgataaatatctgtcttatcacaaactcactgaatcttacaaagccttcattcttgcagtgacctctctcaaggaaccacaaacatatcaacaagccatccaattcaaacactggctagatgctatgaatacataactaacagctttgcgcaacaacacatggattgttgtgccacttcccccacataaaaaagcaattagatgtcgttgggtttacaaaatcaagctcaacattgacagctctgatgaaagattcaaggcttggttggtggctcaaggatacacacaacaacaaggccttaatttctttaatacatccccagtggccaaattaaatggtcacattcaaattattacttgcaatctccaccataaaacattggcatatgctacaaatagacataaataatgcctttttaaatggagacctcaatgaagaggtctactctgtcttcctctactcctacagacgctaatcttgttcgcaaattacaaaaattcatatatgggttacgacaatcatccaggcaatggtacaagaaactcatagatgctctcattcaagaaggattccattaatctcaagctgattacaccctttccactaagggctagaacgataacttcattgccctactactcgtgtatgttgatgacatagtgatcacgggtcccaacctcaccattatacaacaactacaagtatctctgcataactagttcaagctcaaagctttttgcaatctcaaatatttcctaggctttgagattgctcgaacaaaaaaaagtctattcatctctcaaaggaaatataccttgtaggatacattggcagcaaaccagctaaggcccccatggatcctcaacacaaactagatgaccaacaaggagaacctctaacaaatccatcaagctacagacaactcattggcaaactcatgtacttgacattgtccagaccagacattacttatgctgtcaatgtcctaagccaattcatggcatcaccaaggacctctcacatgcaagccttacatcacctaataagatacttagcagaatcctctttacatctcagagaatttttttatttcgattgggaatcatgttcaatcacaagatgatcaacaatgggtctttgcatcgtcttaggtgattgcctcatatcctggaaaataaagaaacaacctactattttgagaagctcaattgaagctgaatacatggcccttgctgcaaccacaagtgaaataacatggctacaatatctactcaaagacctatacatacaacaaactaatccctccttcatttattgtgacaatcaatctgcaattcacattgctaatattcccaccttccatgaacgcaccaaacacattgaattggactatcattttatccgtgacaaaataaaccaatcaaccattagacccatccctatctcaagcaatctacaactcgcagatgccttcaccaaacccttacctgcatcgattctctctgctcacactagcaagatggctgtgcacaacatatacagtccac

SEQ ID NO: 16663 - DNA, 4115 bp, Cannabis sativa
ttgttgttatcatcattttgtataaaaaaactaaaaatgtaataaaattcaaactgaacaatatatatcaatgtattgtaaatgctttcagactttattagctttgaaatgtgcacatggagtggggacataaccatttatttgtcaaaaacacttgagttacagacattgcacacaagacacaactatcttggcaactatttttaagttttcctctttgctataaacttactgcaaacacgaaaaaacttaagtgtctttatgtggtataatgtatgtgcacacccctttccaactttagttgtgatcagcttcaaagcttagatgttattgttcttccatcatccataaccatcatcacctttccaattactttcctgtctctgatagcagaaaaggcaaggctagcctggtaagacaagaagttggataattagataaaatctttcagacaaagtaaaaatctttgcagcaacacacctgtcgcaggttaaattcaaacaatatacctattatgctataaaaataaataaatcaaactagtatttagagacagacatccctaatgttatatcccaaggccatatcaaaatgagagatatccctgcttatctctctatggctttaaacaaaaactaaagcaaccgataaagatagtatgtggagagctacagacctctgataagctgtaagcatgggaaatgtggatttttatcaagcctttcaccacccaggatagtagctccctaatggaatcttcgagaacgcctggtcgatgtattctgtagctaccccagtaaagtccatgcactgtccagttctggtgcacagtaatcaaataaatggcatttagactgacaatcaaagatgcagcaatttaaatggaaacaattacatgtgataactagcctaagctttacaagcttaaagctcatactgcaactaaaaacatgccaaacacgttctcctctcatcatcaaaatcatattatcaaacttttaatgttttaacaggacattaaatcaagaaatacattttgggatttgaaataaaccttaacaagagcgatatttgcagggatgagagggacttctccactggcaaagcctatgatcaaaatgtttgctccccagtttaacaattttaaactctctttggtaagcttgcctccaacaggatcatacaaaacatcaacccctttgagctttctagccttaaggaattccttgacactctgaataacattctccttaccagagtccacaacatgatcaacactcaatgctttcaaatactccaccttttcagctcccctgacaaaccacaggaaactttagcctataattgaaggtaaagcaaccagttaccaaattccaaatgagaaaatattagaacatgagtagtacaacaagtacatacctagccacagctataacaatggcgccacaaacctttccaatctgtacagctgccagaccaacacccccagctgcgccaagaaccagcaacacctagaatacttcatgctatcaatcaccacctcactctaagaaacaaagaaaaacacatccaatataacgcaacggctaaactgtggaagtacctggccagtggtcaaatttgccctgtgaacaagtgcaacatgggaggtcccaaacgcaacaggcaaagctccagcttcaattagatcacatccctccggcaccccaatcctttttcaagagatcaattcaacaaaatgatataaatacgtatatatatttatatgaaaagtgaaactgtggtttgaaagtaagcggaaactcacagatggttctgatcaacaacgatgaactgggagaaggtacccagattggcgaaactacagactgggtcacccactttgaacttggaaacgccatgtccgacggcgtcgacaactccggagtaatcagagcctggaatgaagggaagcggaggcttttcctggtacttacccaatatctggagataattggcatagttcaagctggtggctttgattttgaccctcaccgctgttggcgagtccaattctgggataggaaacttcttttccagcacaattggactattgggatctcctccttgtactgttggatcacccaatttcttgcatacgagagcttccatcggtactgataaagatatcaaatgaggccaaatatcgtattcctttcctttttgtaggagaatccattatttaaatacacagcaagtccttggaaacgatgtcgtttaaccaatggaaacgacggacccgtatgtataataatataaaatataatatcttcggtcaattgattacttatctttttgttgatgcttggttgggttgtaaggggcgccaaaatcagttgggttttagctcaaaaacacataaacccatatgaggaacattgcaatggagatgggagtgttaccccacttggtctcctctgttcctgttgagtcttccaacttcaagattcaaattaagttttcaaacaaaagctttccctcaaatttcattaacccagataagaaaagccaagtgggtcttcttcaatcttctcgggtagtttatgcttctgcttcttcttcttctgttagtggctccagtgctgattattctggtacatatttctaaaaagaactcgcttttctcttgttttaattttgtttagtcttctttatggaaattaggcaaatgggagatttttgtttttttaattgtaaattttgatgctgacattagattccactgggcaattgttgggtgggaagacaaaagagaaggtgaagaagactatagctggaatagatcaagatgaactgcttgacccttctcatttagctgattcagatagttgtttttgtgagtttaaaggggtacagatacaccacaagatatgtgagcctgaatctgtggcagataagtcgttgcagagccaaaatctgtctcaacctattaaaaagattggtcttcctatgattttactacatgggtttggagcctctgtgttctcatggaacagagtaatgaaaactttggcagattttactggctccaaagttcttgcctttgatagaccagccttcggtttgacatcgaggctaaatttcggggagcagtcagcttctggcaatgcggatgcaaaacctttgaatccatactcaatggcgttttcagtgcttgctactttgtatttcattgaatttttaggagctgagaaaacaattattgttgggtttgtatttccttctcttttatacttttcttttcgtcattagatagcttgaaagactagaatttgcatatttttcatcgtaccaatatttgtttctgaaaatatgaagaaaaaaattgacatttcaggcattcagctggttctcttgtagcagtaaattcatattttgaagccccagaacgtgttgcagctctgatccttgttgctccagcaatctttgctcctctaactaagccaaaagttgtcaagggaaaccagatcaatgaagaaaactcaaacagcagtagtcaagggaatctatttatcaaacttcggaatatattgtccaattttacaaagattgttttgcaggcaataatgagagtaatgaagggaatgtcagacatgctcaactctgtttataagaaactcttgtcagctattctgcgctctgttttaggtgtgatgctggtaagtttctatttagatgatcatatatttcaaactagcttttgtcaccacaattcacacaagactaaaactaagctattcttctggtatttccaagctctgtgttggcattgttaatgagcttactctgactaggcttatcacatgtttcttagataagagtgataatagataaatttggtcgggcagctgttaagaattcatggtatgactcaaagaaagtcactgaagaagtccttaatggttatacaaaggtgattacctaatcagctttggattcatttatgatcttgacattgaaaaggatcattcttaaccgggtgttagtatgcagccattaaggactaagggctgggacaaggcactagtggagttcactgcagcaatgcttaccgatactgaacccgaactaaaacc

SEQ ID NO: 16664 - DNA, 5525 bp, Cannabis sativa
gaaaaggctggctgtacaatactattggttataattggttctttcactaaaagcaacaggaacaaatagagttaaatggccagtttttctctgttctacataaatccttatctgggaaatataaggtctagatcacccattctcaaacactttaaaaacatattatagtgtccttgataaaactcaatttcagactttacaactgacctcaaccatcaaaacagcaatatagaactaagctctctagaaaaaggttcattggcaaataactttcatggtttattagcacaatcataagggtgaatctgttcaagtaaagatgtaattttactaattttgcttcttcacattatcattttggcaaacttgtcttgtttttttttttatgcatacattaccaaaatcaagttaaattataatcagcttgaaaaagacaaaagattttcaccttagcacaagctgatcccaatctctaaaccctgcgttgatcaaattttcaacagtaacctctctccggctttcacttcggccagttaacaagaaaactttaaaaccgcgaccctgaacttcttcatagagttttaaactgggctctatgggaagagccatggccttgtccacccatttgtcaaactctactggatcaaagacttccaaactgtaccatccccacatcacaatcagagtacatttcagtaaatggtccatgatttcggttttctatacaataaatgaccatgctcatgactgatatagctatgttgataaacaagttgatatctaaataaatcatgttgatcatagtttgatagaccttgttgtggacaaatcatgttaaaagtgagtgctttcatcaaattcaatactaaactaataagaaagagaattttactaggattgttttgctctccacattaaactccttggctagtatcattcaaattccttttttttttctgttttttgtggaaagtatcattaaaattctctataaataattacttaaaaagtggatgaattctttttgaagaaaagaaaaaaaaaagacaaatctttcataagaatgtataggatagctaacatggttggagatgctctaacaatcgaaaaaataagtacgtttttaaacatgtagtcattttatggaagattccattagtgaaaaccataacattatgcaatgatatcacatttttaattaaaactgatcacattacactttttatgttgatgataaaactgttgaaaaagtacatggcattccacgttttatttgactaatttccagaaagtttgggttgaaaaaaagaaataccaagttacattgaatcccaatccaagtgactgacatatttatttatttattccctttttcttacacaaaatattctgacaaattatgcagatgtattggacaatacaaacttaatgtcgttaatattgttatgttgtcgttttctaagttcacattgtctgtcgttttctacactatcatagcttccttgttccttcctatccaagataatgtcgttgtttcagggtagtgtcgtttttaatatttgatgtcgtagctagtggattacattaatgtcgtttacaggagatattacgaaacgaaatcatttcctaaaaatagtaaaaactacccagaaaataaaaacaaacacccccatgctctaacagatattatttaaccaaaatcaaaagctgaataaatatagagtataagactttgtctacctacccaaaacaattaacataaataatttaataaattaataaagtttaaagagtcgtacccataaccgtggtcggcgtaataaggaagattggaaagtaaagtctcatcaatgtcgaagatccacacgtcttttccatcgccggccaactcaacacttttcgcataatcagctgcctctctagacaccctttggagatcggtactatatccctttccagtaatgtaatttctcacatattctacacattcttctgggattgttttccatggactcagattattagcctccacggaaaatctccaactgctacactctaatctattctcttctttcaaatgggtctccgattgttctttcaaaagggtctctgggtgttcgacgattagcggccgaggtaggaggtgggtatcgaaattttcgtgagaaaaagcgagggaaaacagagaaaaaagcagcaaaagtctcggaaaagtcatctggggttttggggcagagaagaaagttgaattcaatttttctttcggggttgggaattaaaagaatggaatctcaatctttgttagggaaaaattaacaattgggttggcttttcttttgtctcaatcaaaaaggttgatttttgatctttatatatttttggcttcgttttggatagaaagaaatgttctgggtttgagagaagagaaggagttttcgtaagagtaaagtaaacaacacaaggaaggagaagagatgagaaaatgttcagataatatgattcgaatcttatttttgtagtggattttctttttggcgttgaaagagagacaaaagatattcaaagccagaaattggtgaggtgggttggtaaataatactttaaaatctcagaaaataataataaagaaagaaagaaatgagaatggggaatggcttgccaaagctgacgtggcagaattatctgacgttgtttcaaccaatcacgagcctcatacaaagtcatagacaaagacaccagagcttaaaacattattatactatgaataataataataatgataaaatatgacaatgaacactgagagagttttctctcaatcgcaatatgataatgaactattttaaccttgttttcattgtaataagttaagacaaacggttgggatgtgttatatatatatcatcacataaaaaatatgaactacaatttctctcctataccaaaattacaaatgtccttatcataattttgtactatataaatcatatattatgcaaataaaattactatatttggaatacaaagaaatgaagaaatgcaatcatttaaatgagcttctatattcatatgggaatgagagcattgaattttaggtcgaaatctggcgaaatgcaaggataagctattctcaaattctgctaagttttatattttctgctcctcaatttaatcatgcaaattaggttgcttttacattttaaaataaacatcgatttagtttccttcatttataagaccaagaaaaaaaaaggttatattcaaaaataaattataaccctcacactactgtcactactacactataaagaatccaaaattgtgctttatcaaacaacacccaaaagattaaatattgaatctaaaaaaggaaaaaaaaaaaactcagccaccataaacacacaccacaaaataaggcagtgtttattgaatgagtacctcctttaagcggatgcatcaactcgatgagtcaataaattcaagcaagcatttccatgaatccatgaacctctgacgagcctaacataaaaaaatcaccgtaaatattgggatcaaaatgataaagcgaccgaaacgacttgtcgtttaggttgtaacgaatgagttttccagccatatgaaaaaccaagaatgagtcctcggccttttctgctacgacaatggccaatactctaaacacattaaacaattcagatgaggtggggactttcgtcaccgaacaactgattgccactgcattgaaattgaatctatacttgagaatccatcctgacaagtcatgattcatctcgtaaacaaagtactctgtataatcaataccctttttacaactgcagagtacatgaaaatttcttcgagaggccccaataaagtcaatacgaacactaagaaagtctccattttcagggcctgcaaactttcgtactcgctcaatttcgagttcaaagcacaaaagggtattttcagaaccggttttccagaatattacaccattacagaagaccccaccattgaaatcgacacattcgtcttcctcaaagggtgttttaccggtaaagcgcttccaagaggttgtttgggatgagaaaatgtcaattacgaaatggaatttgtgtctcgaacgtcgaaccccaataactttgtagtgaggcgatgttagaggatcataagcaagaaccatgccgaagattcgactgtaaaagcgtccgtcttgatttgggagaaggtcgaagctgttttcaaggttggtgatgatgggattataaacgtagtaattctttgagcgtttctccggggaatagccgcaacacagcaataaaccgcaacaggattgtagaattttaattccttggaaatatagaatcttgttgcatagaaaggaattagttttgtcaagattaaggatttcgtattgtgaagtgtgatgagaatgaggattaataagcaaaagaagagccgagattgtgagtgaaagattacgacggtggcagaaatctgggttggaaatgagagagagacaagttttgctgacgcatttgaatctcagcaatgatttgactgggagacgaataaggatttcagtgacgaggtctgtgttgttctcaattcttgtggctgaatcatttgccttaaggattttagtcgaatgcatgttttgagttttgaaaaactgcttattcctctaccctttatatagagttgggttgcattttgactttgaattcaaattaagctgttttatatattccctcattttagttgtattgccataatttaatcaattaaaagcaattctttctgatgttttacaattaaattggttttataaaatagtttctattgatattttagatttctggctacaaaatagtttgtgaaaatgagtgtttgtaataggtggaaattacatgatttattttatagcttcattcaatggcatgagttttgtgttctagggcttcactttattttatgaactcatcgtgattcgtttctttcaacatcatggtatattaaatttgggcaggatttttttatatgtcacttaacctgaagatgcttacacacgattcgacatgaaaaatataggcttagacatgacacgatactataagcccaaaaacacagtatgtaagcatgaatagattagcttaaaatcctaacacattaaaagaaactcgataaaatgatagttgttaacccgaaaactttttctggtgatgtgaacatcaatgtttgacacgtggcatgaaggatgacgtcacaaagttgagtagacttgagttatagcagccgaccaaggaggggaccctatccctgcgctcaggttgacttccggatcttcgggatggaagttcagacttcgataacttgaatccaactcactatctttcagtattatgtactataaaaacatggagtaacctaatctaagccctgagagcagggtctcaccaaatggactcaatgtcaatatattacttatatttaccccatcagtgggttaggtttacatgcaaccctag

SEQ ID NO: 16665 - DNA, 11192 bp, Cannabis sativa
  modified_base (3897)..(3898): a, c, t, g, unknown or other
gagagggacctggcgagacggagaggcaaagagatttgaaggttttgcacagaggcggaggagaatcgccagaggtcttcaacagctcaatcacacacctagggttcacgaaatgaattgcttgtgtcaaaaaaatttgggtaattgaataataagaggttttgtgtgagtttataatactagcaacatgtttagcgtcggtttaaaattgacagagaacacgttagcgagacttctaaaacgaagctgattgtatatattatctttttcaatttttttcttttaccgtcggttatataattagtgaaggattaagcactgacgcaaaccatcaattatttgtgtcattttcaaaatgatgagtatatttaatatggtactatttacatcggtcaacgcgatgaatagtcgcgttgaccgacgtaaatagtaaattttgtagtagtggatgtttggtttgaatgtaatagtaatggtaatagtaatagcagtataacgaaataagaatagtaatgagaattgattaagatgtttgattttttattgaaatgaatattggaataaatgataaaattgacaaaattatctcttactttaatttttatatttatataaaaaaaaaaggtattagagtcattttaattttactttatttagttttttgcaatgtaatcctcattacatagtttttctaatgtaataagaattcccttatataatgtaattatgattacaatgtaatagatttttaaaaacaaagcaaacattgttaatggataatttaattccattataattcttattacaacaaatcaaacattgtaatagttctatatactatgctcctataaatgttttatcaagaatagatggagaaagataaataaagagtagggaccaaaagaagcttctagagttataaactttattattaattaagagatttgctaagaattcttttacatgtgagtggtagtctctcttaaatataaagtttgttatttcaaatgaatataagaaaagtaaaacacagaatccaaagttgaaggtagaagtaatgaaggagtactagtctagtactacaaatgatttggaattgcatcgaaggaagtgcctctctctcctttgaatgaatatagatataattttattgctaataattaaatttataattagaacataaacccatttgtgatcatgtgatcatatgatatacatgattcaatgtaataaaaatagtctcaattgcatgtaaagtgaaagagagaacaaataagagcattattattgagcatgagcggtgttcaacacctctagacatgtcactttgtgattggttagcgatactctttaaaagttatattacattaaattatatgagacccgatacttataaattggaccaacaacaataataacacatagaaagctgctaaacacacaccaccgatacctttcagcatttctcaacaagtaactatatggatttaattatatatattttccatgcattgtttgtatagtatatcatgattatgagcttttaatgaaagaggaatgagtagatatatattatagatggggtttaattagctttggggacatatatatataaagatagaagcttcctcgatatgtgaaggcgtgggagtgcgttgtattcttccttctctttaggctttattaccttttctttctttcttgccaacttgcagtgactatatatattttctctgcaaccaataaaggtacgtggcaccacaccatcctttttcatccaaaaaaaaaaaaactacattctattccaaaatcagttactttaataaaatatacataatatatatatatatataagcagtcttaatattaattatttgtttactattcttacagttgatcactctctcagtcagtttcagttattataattaaagtggttggtgtaccggcttgtaattttcaaatgtagtctaaaagttcatcactacatatacaaatatatatatataaatatctgagttttggaattgtaacttaattgtatgatatataactgttatatattttatatgtggcagtgtattaataatcaatataattagctatagagaccataagatagatatatagtaatcttcttgtaaagtgatttgctatgtttaatgattggaaggcccttactagaattttcaccttaaaagataaaaccaagagtattgttataaatatatttatatatgtaaatatatatctttgatgaaaaggttaatcctcttctgacactccaagtatacccaaaagggaaaataaaacaaagtaaaactaaaacttgaatagcacacttgttgtcctatatatatatatacctaatttcacactcgagaatattaatatttataccaaagtactaaagaagggagaaccaaaaaaataaaataaaagccatacacagatacttttggtcggcttctccatctcataataatctagtatatatagacaccaaaatctcctacatataatgcaacaaaacttatatataatatgtatacacacacaacctcacatgtatgaagctatatatatagtttcactttaataacttcaaataaacatgatctgattcacaattcattaacaaatattatttgctttctttaattataacctttagatatgtgaatactttggtgcccttcatatatataatcttttgctttattaataatgtgggttgtatataatatgtatgcatatcaaaatatatatatatattttttaattatcccaatacaggttatttcttcaatatcttacttaaggccaactaacttattataaataaaagagaaatgctaaaggggtatcagtagtggtgtctagcaccttcttataagtgtccaattaagaatcgggtcccatacaattaatataataacttttaagaagtattcttaatcaatcgcaagatgaagagagtctaagcaccactagtacctaatagcaatgctctaaataaaagcagcagtttcaatggcaaactacattggtaaaaaattacctccatatataggaagacaactcacattgaccactgaataaatataagagaaagaaatacctagatttcatatggtaaattaaactcaaaaatatatatgcatgttgtgcctcacatcctttctttttctatcttttttctttttctccttttcttttccacccttttttttctctctgagcttactagtattcttttcggtagtagatctaaatggtgttcaaactcttggaaaagtactgaacatgagctaaatgtatacaccaaagtattatatatatacccttatcatgacagaacttttatatcttttttcctttttcttttaattttttcttcttttttttattattattattaataaagaaattattcatgttaaggaaaaattggaacaggccttgggggggacaaattttccaaatcgagctcttaggtaggcttcacactttgacaacataaaagtaaataataataataataataataataataaataatatctccacaggaaattgggatttaaagtttctctcatcattgtttttattttttcactacgtacactatttatttatatgaatatttgaaactctcgtataagataataacaattagctatatattattagtttatatttgcattaataacttttcttcatataatgatgttgcaatcatttcctactcataacaaaaaatatcaaagggttatatagaataacgttaatccaatatttaaacaataggtttaaatatttatatatataagatcagaggacccaaagcttctcattattaaaaactaatatgtatctataaatatatatatatanntatatatatatataaattaaagatcttcaaaatatgagtgtactactaatagtgttccatactcagaggtaactagatttttattgtgatggctaaacatatataccaatatcaatattagaaataaatattgacattaaaattaataaaatgttcatgttttaaacttgaaaatgtaataaatttgatggggtttgccacacatgcatatatggcatttatcatacactcagaaaccctacattttgtgaatatatataataattatgctaatattaaactttgatatggtcaaaaccctaatcattaagacctcatcgagcatatgcatgctaaatatttatatatatatatatataaatatataaatgttgatgaacttacgtatatgtaaaccatgataattcattcaaggtttggtaattaattgaagtgttcgatcaattcaaccataaggtgaatttcttccttgaatcataggactcatcctatcactgagaggagctcttcttggtgaaggcctttcgagtttattactatttgttccaccttcaaacttcttctccggccccatatgatcacctgagattactggctttgtctcataaatatcagacaatgaatcaatctcgcttcctcctctctcagtcgacgagttcagcgccatctgaatctgatcttcaccaagacaagacgcggccgttcccaagtcctggagacgaagatcgtcggaccaaattaaaggactctttccactcccgctataaggactagtagtagtccttttctttcccaaacaaagagtatcattaggactactattattagtgttgttgttgttgttaggtaagaaaccatccatggatgatgatctttccatgttgtgttgaagatcaagttggtgatgatcaccacctccatagatgtttaggtcttgaaatgatggaaagccaagaggagaggtgaaatctttcatggttgatcccatctcatgattatgattatgatgatgatgagaatggtggtgattagggtgaacactttgatttacaatactacccttgtagcttccagatgccatattttcaccagctagagtttgacaagctttttccaatatgctttgcatgtactttccttgagcctcaattctcaattggagatgtttctggacctacccaaaaaaaaaaaaaaaatacaatacatctcgattttcattttagcgaaaactgatataaaaaaaccgaaataaaaggtcttttaaattattacctccaattgttcatgaagtcttctttgcacctccatttgcatcctgttacatatatatcaaccaatttaaaaaaaaaaaaaaaaataatcaattaaaggaaattaataaaatttttacacacgtactcattcatactgcggcttatcatggcagaagaagatgcggtatttctctgaagttcaagagctgaagctgtgtaaaagaaagaagaagattatatttaatattatgaaattaattagttaattagtagagaattaatatacaaataaattttcattgattttaagaaccctagaaaagaagagtcacctctcataccatccttaatcgaatgatcattgaattccttgtgaggctgctttccaagcctgaatttctatatatatattcaggttgaacaatacaacacaataaatcaattacaaattggaaaaaaaacaacagcatataatttaataattagtgcaactactatatctataaatatatatataaagataaattatataattgaaacctgaaggtggctcttgagatggtaaagagtaagacccttaacacccataactctcatgatcgtctttggtgttgcctctgaaaatattaattaaaaatattgttatatgtaaatataattaattagtgaaaatggaaatgaattagtgtggtatagtaatagtagtatagtactatctggtcctccaagctgagtaacggcatcgacgaagcgttcatgaagctcaacagtccaacggagacgaggcttggggtctgttgttaggacaagaccagagtcaccttgaacacacataggtctttcatggctatgagcatgggcattcatagttgatggcttcttgtgttgttggaacataataatattattctctctctctttcttctctttggggagagaggaatacgtaccaacagattcaagaacaaatgcgatatgcaaataggaaagaatagggtgcgttttttaagagagaacacctatagcggtgtaatcagctttagctcctttcggggatagaataatagaattaggtaccagtggtgcctaacactttctagatatattgtgttgtgattcgccagcgatatttcctaaaagttatcatattaaactatatggaacccgatacttagttagaccaataacgatattgacacataaaaggatgttagacaatactggtgctctttagcatttctctatttttaacctctcctcattacacaataaagacaattatatttctttaattttattttatttaaaaaaaaaaagaaaatttataaagaattataccctattctaatgtgtatgcagacccttcctttgcataaagatactctctctctcttaatataatatatatatacacatgtatctatacattatgagagacaggatcttataaggttgtatatataaagagtatatattatacggttagagtagtgtatatatattttgctataaggaaaagaagaggacatatatctttatagaaacagtagttttattcttctagcatgtgaagcttttggcattacacaaggatatgagtgagaccctcccttaagcaatgatgatgggtaatactttatcttctttttttgaaccacaaataaatatgcatagaagattattaaaagatagctgcttagcatttttttaatctcgtactgttgttagtataattaagagtgttgggtctcatataatttaaaaaatataatttttaagcaatatcgctaactaattataagacgctacctatataaaaagtgttagaccagtccaattataataatactcacatatgcatatgctatgtatactcctaaatagtcattacaaatattatatatataatttatgttatttattgtttatgctaacaagatccattataaaaatatatgttgtatatattttgatccctcgttagtttcgtagtacgactctctttttagtgtaattattatgagtcctaaccaatcaaccatcatgttttagaaaacaaagacacacaccctttatatcattaccaacaaaaaggttcaaatgatttatatgtattaatatttatatttatatataggtgacaaacaaattatttctataattaaaggtttgctatctaggaaaatatatataggacaatataaatatatatttatattgtgttgcattggcacgtatatttttatttataattaattcagatgcttcaatatgttgtagggaaaaattatctttctacctatactaataactcacaatatccaatgttaattttgacattttatcctcacccaagagaaacaaacaacaaaacaccaaaataaaatgacactgtgttttaggttacatatacacaaaacatagaactctcgagaaaaccctcagaatcggaatcaaacacccaaacttagatctaggaaaatctaaaccctagcaaaccaagttctaactcgaactcctctgatctaccctagatctaagtacatagatcacaaacacacaccaaaaatcaaaatcaatgggaagactaaagaataaatacaaacagaggaaatcgacacattgattgatctgatctcggagttcaccctaattaagggttacatcttcgtctagctcgccttaaagaaagcttgattctccactataaacattggtgaaaacatccagttatattcgaatgtttccagtcacaaagatttgatttggtaaatatctcgatctccctctcttattctgtgttatttcttttcttctgtacaacacagtcgatcctgcaatttcatttaaaaaaaagtaggtacgaaataaataacaaaaatatcaaaaacactcaaaaatcaaaatagtgtatatatcctcgagaacaaattgataagccatcgtgaaacatatagagcaaaatttcacaggtggattgttggattaaacctccacttacactgatattagactcaatttcctacatggatattgagaaactatcgacaacctatcgtaatggacacaaaataacaattttcagcaagatatcgacaaactatcatcgagaaatatggacagatcattgatatatcatcgataagaatgtgaaaaagcaaaacaagagagagagagagagaaaccataaacatggaaattatcaagaatctatttcgaaactattgacaaactatcaatataataacaagcaacatctcacagagttcctaattaatcgacaaagcatcgacaaactatcaacatactgtcgagaacaacatttcgcatgccaagaacagttttttgttagacattaatttaatgctcattaatgttaggcatttattattccactctcccaacaatttttctgaactagaaaagcaaacttctattttttaagttatatatatttcctcttctttaacgatgaggatttttcttctttaagttatttatgtatagcaattcgttctccattccctttttccaccactagggatgaatttgatcctaatgtaagagaccgatcttaaaaatgtcttcgcattttaacttattgtaagaccaagccatgacgagaaagtttgtagaataatatgttgttgtcgagctaagttggcggtgaacggttcactacgaagagtggctgcaaaatattattgttgacgaaggacataacatccccttcgtgttcttgtcgatgttaaatgtcattttatccatttgagagcaaaacgtatgtgagaatactgtcacattcaggaaagagagcaaagagaacgtgaggaacaatttgaatatgaaaggtggtgaacgagaggtggaacgcaatcgaagggatggtgttctcttttctcctccaggattccccgaagggtgctatcgttgcaaaatgattgtagttagagacgaactagtgacacatgggtcattgtgcatgtattgcatatggatcaccctaactatctcgagacttttaaattttatgtttaggtgctattgattgttattctgatcgttttgtctttatttatgctttaagtttttacttgttttagtattttttttaatgatatacagcgcatttaacaagtgacagtcaacaaaacacaacaattgaaaaataatcgtgatagggacaaaataatatttttctaacaaatatcgacaaaatatcgataaaatgtcaataaactatcgtgatgctaataaaatgacaaattttgcaatatcatcgagatagtatcgataaaccatcgacatacaatcgataacaatatgaaaaatacaaaaataaaccaaaaaatcacaattatggaaattatcaagaaagtatcgataagagtcatccctaaccttatacgctttccgtcgataatatatcaacataatatcgataaattgtcgatataatgtaaaagtccaattctcgtttgaaaatctagatcctgccattttcacataaaaaatactaaaataacaccaatgcaaacaataaccatacagatcatggaaataaattacatactcttctaaatgtttaagaaattatttgaaaaatatcttacctattgttgcagtgaatgtgcatttaccctggtcaatgtgtgattcgtggccctaatagtcactccaacgtcggctgatttgtcgacttcgtgcaaagagagagatggggtaaaatgggaaaaatttataaactaaaatataattttttataaattaattagagtctaaattttgattatatgcatatttttaagcaagcatattaaaatttctcttttgtaataggtatgtcatatttgtaaactttaacataacaccaaaaaaaaagtttagcatatataacacctagatacacaataattgttgctcagtttccaaagcatgtatgttttgggcatcattgctaagtaccagtagtgcttagtacattctcgacatgtcgcgttacaattaactaacgatattactaaaaagctattatattaaattatatgggacccgatacttatttgaaccaatagcgttactgacataagagggtcggtgctaggcactggtaccttttagtatttctctttatttaaatgtgtccaaatgtttttcatagtgctaatttgtgctaatgtgtcggtaattaagaggttaatttaaaaataaaattgaaaaggaggagaacattaattgttcattttagttctataaatatatatatgtatctttatatatgtatataaaatgggtcccctaagctacttattatatactaccaaaaagaaaaggcaataccatcatgtcatatcatctcgatctgaaatgaatttatgattatgggtctaaacagttttaataactttcatgattattttttctaatatatttatggaaactaaactatagtatattatatctctagaagtagaagtgtacaaacaataatcgaaacccatgctagatcagtattaatggatcatcagcagagtaatatgtaagtgtagtagagagttattaaatataatcatgaccaatataatatagtactactatagctagtcaaagtggattttcaagtatggataattggatatatacatacaaaaatattaagaaagaaataaaagcaccgaaaggaatgaagaaatggaagcagattaaaagggtgtgaggaagtgaacatcattcatatataaagctgattatcatgtgaagcttttgatgacagcagtaggggaccactcaatcctccggccccggccccggccccggccccggctccttaatcaagagcattgcgtattgtgagtagttagtaattttttattatttactaaattaaaatatatgagacttcataattcatattgaattgtacccataatgtataaaatttataacatttaattactaacattactgttcctcgtgactcaaaaaaaaaaaaaaaaaaaaaaattactgttcctcgtagaaaaaaaaattaatagtaaaaa

SEQ ID NO: 16666 - DNA, 3252 bp, Cannabis sativa
aaatttttcaattttgttttagctaaaccacacaaagctttgtcagtattaatattttagtttaatgttaaaaacaactgatgataacaaattgttttttcaaattaaattaagtttaggtgagtaatcatttaattcgttaatcaaataccagtgataatagttttaggaaagcttggatttaaaatttcttgagggcacttacttaaatgttgaagttgctcaaaatttaaaaacgcaaaatagaaactaaaactcactcaatctctctcactcactcactaaccaatctccaaattcaactcattactcactcactactaccaagtccctactatgcttttagaaaaagaagaccaaaaagaaaatgaacacttcaaatctcttctactagatcgaaaactagaacaaaagacaaaaattgagagatgaaacagaaaagaagtaaaattaaaaagaaaaaaaaaagacaagagagacctatttgtgctatctctaaaaactatgtgatgactttgtctcaaatttcaggcacatttagttactactcttatgcattggcgctaagggaaagattggcgagactgatgagagatgctgcgcgctgctctgagttctcgatgtcagcattcctctctactccatttccgcgttgctgttgctgctgcacagaaattacacattcttagctttattacacttcatatcataatacaggcaaccatgacagtacgaatggaaagagacttaccgtgaattcgctgttgttgaaattggtttccatcttcaatgttgctgcaggcttgatgttaatggctcttttggctaggaggaccttttctcggctttcgtagaagctaaaatcgtctaacaaagaagtcttcggtgtgtaactcttgaatatattcaacatttccagtccttgctttaatccaacctgtgcaaaaaatcaagacataaagaattgaaacgttattaacaaacaataacaacggaaaagcagaaacagtcgagtatggttggctctaagcagcggtagtacctcttgggtatcacgagtgaaagttacgggcttgttatcattattttcgaggataatgtgtcgcaattgagtgttggggatgtcttttactatatgccacttgacggggaagaatccgttccacttgtcaacttgccagaaatccatgtctttgttgaaatctacctgaccggccatttcggctacaccgagaaattgtccacttccatttacctgcacaatggaaaacagaatccatgttcacttagttatataggacattcaaacaatcctacaaagagagttgatttgtcatgagattaaacaagtaaactaaccgagaagaagaggaaaatagggtatcttgtgcctgtctcagtcgatttcacttctgcatcatggtatgctgcatctagcttcttgttgccatttggggtactagcccaaacagcgtatttaatagacttgtgaacgtcatcttcactgtaggacttgataacataaaacttagcatgttcataatcagtggcgaaatcaactgtgttatactgctctttctgaacagcagatccaacgtcttccttctcaggtgtagaatctgactggctcttaatgcgagaccttggaccacgggttaattcagttgaggcttcaaaatctccattcctattatttttgtcccttgacttgaatctatcgtttccaggccatatttttgacccaaaaggtttattatagcttgagaaaccagtctgctgtgggtacagaccttgtttctgattagcaaatgatgcatatcgtccagcctgagggggaaatcctttaaaaatgggagctgttgcagccgagaattcagaaccataatgaggcacctgtaataataaacaccatacaagttaatcagaagtccaacaagaagaataaatcccatttatagccaagaaagaccaaacgtatttactatattcataaaagttacttaacaaggtaaatgcaagtagatgagtaccttgctcaactgtttggttggttgcgtattaagaacaggcttggaaaacttgtttgtaaaactgccattagtttttgatgaattgtagccattcgtccttgctacaccaccagtagagcgaataccagacttggctccattgggaacatctctcccaaatgccggatcccatgaatacagagcttctgatccataagaaacagctggctgatgataccctgatgatggataatattgctgttgactaataccttgtccatcaactcccaccatatgcccagattgatacggattaaaataatagttataatacataccattttctgatggtatagcctgggagataagagtaaatgttttaattaataaacaaaaagtttataatatacaatacattacaaattttcaaaaaaaaataatgaacatagcaataaggaagaacctactgcattagaaccattggcatgataataaccctgatcatccacctgcgtaaacgatccattatatcctgtaaaatgaacatgcatctatttagaaataataaatataaccaataacaacctaaagtaaaaggacaataagaaagacacagtaaaacacacaaaactgagtaattctttcttgtttgtgtataactagcgctaaggtctggctttatgactagaagcttaacttcccactcaaatgaaacgactaggttaacactactatattggacttgtgtgacatctaacctggataataataactgtcacagctagaaggtggattgtgaacaccatgctctcccactgactgttgatcaatctcacctttgatgctaccgttgacatcctttgaagttgatatggatgagttcaagtcagatgggaccccatctttccctgaagcctgcaagaatgattgaaatttgagtttgacagagagaaatgattttcaaagcaaaatatacaaatatacaaggcgattcgactcaccacttcttgctccggcagaccagtagcaggatcagatatcaacactgtagcagcaggctcaccttgattaaacagataagaaaagtttagcatcagcatcaataatagataacaagacctatcatgttgttgaaatgaaggtaaagagaaataccattttcgattttcttctcacccgccatgaccagaaactcaaacgaagagtcaatttcacctaaagaagcaaacacaaaacaattctt

SEQ ID NO: 16667 - DNA, 7868 bp, Cannabis sativa
ttttacgataataatacataagttataagtctagaactcctttcggtatcagatcattaagtaaaattaatttaaatataccaataaaaaaatgacgcatagataataatttaaaatttaacggttatctacaaaaattctaaaaatataatttaaatattattaccgtaaaaaaagtatttattttcaatagtttttttttattattattatttttgtttttgaaatttttgactaggttggcaacccgagcacacaactggcttgggcgaaataaaaaagagctttcctttatatttccaccgcctctcgttctcgacttctctctccatattttcgcttcctcatccttcattgcttgctcttgcttcaccgtctgtcaactcgccggagctgctgcttactgtcgtcacacgactctccaagaaggttagggcttgtaagtcttctttcttctgactattaatttttccttgattttgtgtataaagagtgtttgtgcgtgtactttgaatcaatgtccaaaagttatacttgaatattgtcgataaaatctttgggaggaaaactagtaatggagtaaccggctctggtttgattggagtcatatgtgtgattttaaatatgttatttttttttttaaaagagcagtagattatttgatataaatatattgtcaatggaagaattgaatgtttaggaaaaattctgaccaggaaaaaaatatatgtttaggaaaaattcagtttgtagatggtgtttgtatattatttgatgaaatgcctgattgaatttatcctaagtaatcctcaaatatggagctttttcttaattacacaacaattgtttgatttcggttgtttttatttatttttaaatagattatagattattgtgattaaagcgtgatataatttcccttattattattgttcatttatatgctctgccatttggtgtttcatggctaacagtttaaagtttataatacaattatcaaattttaagacatctctcctggagcaacaaaaaggtttataactcgatcattttcttattatctccaggagaaatgtcttgaaatttgattgattggtttgtcaattcaatgttgcgtatgtatggctaatttttttttttggggttgaaattgtgtttggtttgtctcgaaatagaatagtcacatggaatgattatttctttgttccaagtattcgtagtgtaataacttttttgggcgctgaagctagaaactaatggttgcaaagagttcagtgtgaaaaagaagacaataaaaacttggaaatgattcggtttacagcctatgctaggaaggagtaatatttgatagaaaattcctagccacagtaaatattcagcagcaaaatagaaattggaaaagaaatgaaattgtattgatagacttttccaggaattcgagagcctggaccctccttacagtagttacagtatttctaattgcatgaccaataaaaggaaaccctcccttatttaactaatactccagaggcctatcctgcacccccacctcacccaagccaaccccactaaccgaattacacagtggagtgatcccctgctgtcatctccacattacccttcctagacctccttctagagtacacaaaagtgagtggtggtctatcaatattttcttatgttgtttataagaccattaatatattatctgaaaattaggcttttttccctttctgctcataaaaagatttaaagcttatgtttttaactaaattctttaaggaggtctaagatttttgttctctttataaaaccactgaatcccacgaaaggatgttttctggattttgtatttttttttctgttatttttgaaagttaaaagtattgatatagaaaaaacaatagcatgtagaaaatttaataaaaatctgagaaaaatgaaatattaatgtcaggaaggttttctgtgaagatgtcctataaactacaaagcttcttcagtgcagattaaaagtggttatggaattcaatttttgttgtttatttatttgtttatttttggtgaatacaggaagaaagaatagcagtattggctgccatggagaacggtcaagttccagaaaacgccaatgaacgtatgctttcatacttttctatgttcataagaagcttacagggtctcttgccttttgttttctattttatctgctgatgtatttgtgggatatccagattgcccaggtactgaatcagactctgctggaaaatctgatgcttgccaaggatgtccgaatcaagaagtttgcgctactgctcccaaaggccctgatccaggtttctttctatcctacttgataccaaacatgctgttaattcttcttacagtatgccatttgcttaattgattctattatcacttgggtccatcgaaatagtgagtgttctgcagatagctgatagctgtaatgtgtcctgcaaacttgtactgcttgtgcttaaacttgttaacatagttatgatgtgatttttgtattattgatttgtggatatgtatctgcagacttggttggcattgcagaaagaatggccactgtaaagcacaaaatactggttttatcagggaagggtggagttggcaagagtacattctctgctcaactatcgtttgctcttgcagctatggacttccaagtggggcttcttgacattgatatctgtggtccaagcatcccaaagatgcttggccttgaaggtcaagaaatccaccagagcaacctaggctggtctccagtatatgtcgagtccaatctcggagtaatgtcaattggtttcatgcttcctaatcctgatgacgccgttatatggagaggcccacgtaaaaattctctcatcaagcaatttctaaaggacgtttactggggcgaacttgattttctagtggtcgatgcacctcccggtacctcagacgaacacatttcaatcacccaatacctcaatgccactggaatagacggtgcaatcatagtcactactccacaacaagtctccctaatagacgtgcgcaaagaagtaagcttttgcaagaaagttggaatccaagttctcggggttgtggagaacatgagcggtttgtcccaaccgctaatggatttcaagtttctgagggtaacagcgacaggcgaggaaagagatgtgacagagtgggctagagagtatgtgaaagagaaagctccagaactattagatgtgatagcttcgagtgaagttttcgatagcagcagcgggggtgccttgaaaatgtgtatggaaatgggagttccgtttttggggaaagtaccattagacccgcagctatgcaaagcagccgaagaaggtagatcatgcttcactggggagaaacttggtatgggtgctccagcattgaagaaaattatagataaactaatggagaatcaggggttatctaaaatggtaattgataacgttgaataaaagtgcttcacctaaaggaaacaatttttttgctttggcattttgtattttgtattttctttatatatgaattagtaaacaaacactaatgtttgagcattttcttatattttatgattgatgagtaatgatatgtggatatttatatagattatatttatatagattatgtattaaaatattgagaaattactttatatgctgtttttttaattttttaatttttttttcaaatttactgtttggttgcagcgctagttgcagtaggagtttttatacatttttttgttgcaatttaagttacagtgctagttgcaatatgagtttttatgtagcatttcgtaaaaatgcaaaaaaaaaaaaaaaaaaagaattgtttttaagtgtaaaaatgaataagtccttaaaatattcaggttatgtttgataatatttttattttttaattttttaattacaaaaataaaagtaaagtttttgtttttgaaaaataaaaatgagtttcattattatttttcttttcaattttaaaaataaaaaataaaaatatgttttataaattttattattattttcatttgttgattttatttaagtcgagtctgaagtcgggtttgacttttgagatcgagattggggtgggtctaagttcggggttggatttagttttcaaagtctaagttagggttggagtttaaaatactgattaaaaaaattgtttaaaaaaatgttaaaggtaatttttttttgtctttagaatttagattcttaattaaaaaattgaaaaagaaaaacagttttatagaatatgattttgaaaatattttcactttttttattttaaaaataaaaaattgattaaaaaagtatcactaaatgtatcctaaatatattagacactataataaaattttctgtttgcaatgtagtattttattaatatctctgtatttagaagttactctgtaattagtaagttattgacaaaataagtagaaattatacacataaaaataatgttttaataattacgtttaattaacgtagtataaatagaatctttcaacccaattacgctaaagcataaaatgagaaattttctttttcttcttttccttcctaccaattcatttgcaatatattttcatctatagtaaataattcattagatattaaacaaattattagttaaaacgcataatcataatcaaattattattaagtaaactcacactcttgtttgttatctaagttcacttttgatttttgaaataattataaaacaaaaccccaattctagtaggtacgagaataaataaaaaaataaaaataatagacaaaaatggcattacttaagagacaaaaacaagttttttttttttgaaaatagagacaaaaataagttatgagagaggttttgaattatataacaaaaatcctaacaaaattttaaaaaccaaagtaacacgtgttcaaatactattgggcaagtgtgtaacgctgtttgtgttctcgtccacatagaaacatttccctcgcaatagtcctctcgaagtcccatttcttctttcttcttcattccatttccttctccgacacactctttctctctctctctctgcaacaacaaacaaagcttgttatccactacaaccgcatgtaaattattccggtacaactacgtctcaagaccgttcagttttaaacatgtatctctcttcggagaagactcgttcagttgatttctacaaggaaggagttggcggtggcggtggcggtggcggtggtggtggtggtggtggtggagaagaagaagaatcagatagagatatgatgatggaggttgttgttactaatggtgtcttgggttctctcccgaggaaccaaacccagaatcagaaccagaaccagaaccagcttcagcaacagatgattctgggtgagaatagtagtggaggagaagagcacgaggttaaagccccaaagaagagagcggagacttgggttcaagaagagactcgaagcttaattgggtttcgaagagaagttgatgggcttttcaatacttcgaaatctaataaacacttgtgggaacagatctcctctaagatgagggaaaagggtttcgatcgttcaccaactatgtgtactgataaatggaggaatttgcttaaggagtttaagaaagctcggcatcaagtcaaagtgggtagtaggtcggccaagatgtcttattatgaggatcttgaggagttgcttagggataggaacaagaacagttcttcaactactactgtttccacttctgcttacaagagtcatactcctcctcctaaagttgattcctttattcatttctctgataagggttagtgttcaaaacagtggaaaatcacactattagtgttggaaattttgtgggttgttttgtgttctaattttgatagtgggtaatgttcttcacaggtcttgaggatgccaatataccttttggaccaattggaggtacacaatttcatttcatttccatttttcaactggtttggcaagtctatatatgtttttgttaccattttaagctttttttttcttctgaaaattcttttaggaattaatttgatatctgtcacattacagctacagaccgatcagcagtcaatttggaaagacgactggatcatgatggtgatcctcttgctatcactgcagctgatgcagttgtagctagtggagttccaccttggaattggagagagacacctggtaatggtaagactccctttgaaatattggttttggtaccattaaggatgaagatatattatttaatagccattggagtttgttagtgtcatgactatattctgttgaatctgtttgtatttttgttataatgtggaaatgggatgtcagcttgactaagttgctaaattatagaaacagtttttgttaaaatagagaggttgttgatcttgttgcacaagaagtggtcaataagaaataatcaccccctgttcccttgaatgatgatacttaaatcttttcttgagtctttctttgtttcttgagaattttaatatacttgttaatggggttttcaggagcagagaatccacctccattttgtggaagaatcataacggtcaagttgggagaatatagcaaaagaattggtattgatggaagtgctgaggcaataaaggaagcaatcaaatctgcattcagaataagaacaaagcgtgcattttggctcgaggatgaagatgaggtggtccggagtcttgatagggatatgcctctgggaaactatactctgcatcttgatgaaggtttcatttctttaccttctatctttctggggtagagtctggtgaaacaacaaaaagctttgttaacatcatgaatgatggaactggaacacatatatgaacctctcctgatttcttatgacaggaattactattaaactttgcttttatgatgagtcgaaccgtggagtggttcgtgacgaagcagtaacattctataccgaggatgatttccgtgatttcctaactcgccgtgggttgactggttttagagaattaagcggctaccggtgtattgattgcttggatgatcttcaatctggtgcaatgtatcaaggggtcagacttcttgtggattaggctcttttattcatttttctttttacattttcctcttatgtttcatggttggttttttgaagataaatgccaattctctaaccttgaaatcccatctcattacactgtaaacttgtgtccatctcttaattatcagtacacacttctctacgagtctaagatggcattagtgcttgcacaattttaaattcagtttatgttaaaacattgtaaagatgtattcttgtatattctcatgtatgcctacttctgctctaaggaattgaaaaatgtcaattggcctttaccctttctttagttgtattttaattccaaatgaaaaaaactattagtttattagttttctctgtttaacttgtttattagttttctatgtttaccactttttcttattctttttcactaatttatttgtcttgtaatccttgcatatgatatgaacaaagaaaaagaaaataaaaacttgttcttctttgcctttgtacagaagaactctacctattccttgccactcatctcgtgaagtaatgtgatcatcaaggctctctttctcgaaatcaacggttgttaagccacatctcaatgccaacttactactcttcattcaagacttttggttatattgccgttatgtatataattaagcttttttaatagagcattgttatttaacactttaattaccacacaatactcatatggtgtc

SEQ ID NO: 16668 - DNA, 4295 bp, Cannabis sativa
ttttaattgagaattaaaatttaataaattttaaaaacaaacaaaattactttcaatttcttttaaaactatttttttatcagtattttagacttctaccaaaacttagactttggaacccgaaccaaactcaacgacaccaactcaaatcctaacctgaacccaaatcccaactccgacataaataaaatcaacaaagaaaaataaaaatgaaatgtaaagaagaaatcttttattttttgtttttaaaattaaaaaataaaaataattaaaaaatatatttttattttttaaaaattaatttatgattaaaaaaatttaaaactaaaatatcacaaaagcaccctagttttaaaaatttgaaactaagatgtaaacgaaatctaatctcctgttattttcgtttaaattgaaggcacaaaattgaaaaacaaattagtagggctcggctacaatacaaggctctgatttttatttattatgttaatttgttgttgtgacagtgttagactaatatagtacagtggttggtaggaaactgacaagttgaaagagaaagacgaagatttctgcactctaatttataacaataagccatggctgaagctccaaagctctataccaataaacccaaaaagggtaaatacccattttccctctacatctatcttttttttttttcctttgattcgaaatttattttctataattaagccagcaagaaggaatctttttgtgattcaatagttggggttttgttttctaatgattatttttattttttaaacagcgcagctgaaacaatttcaagggaaggacttttcttcaccatcttcatcttcgtcgtcaatggtgactcaccctccacctccacctccacctcagccccctaaggaatcatttgctcgccgttacaagttcctctggccgttgcttctcactgttaatcttgctgttggaggtatttttgttttcctttaacttaatttaactcatgtatttactgcttaattacagataatgtgaaatggaattctcacaatttttgagtaataatgtttctagcatgggttctgcgaaacttattagtatttttgttgtttgaacttgaagtgagatttaagtttagttttgtaggtactttgtataaaaatttatggcttttgtttcgagttatttgtgtgttcaaaataaaattaattctcaattaaatttgaaatctttgatactcacttctaatcaagggaaccatctttatatttgtttatggtatctgcaaggcttggcgaactggttataatatttacttctttctggagattgattaataatctaatatcctcttaattgttagacctagatgctgtgctttattgctggtcttattaggcccttaaaatagtgtctgggagctttgtgtaaccagttggagtcttgtagataaggtattcattaatgggatggaccataccgtaatttgtaggtgattgcagaataaattgtgcatctcaaactggcatgtacttttctttgtgcagtaatatgattaggtatctaattttgaatctgcaagtctgtgtctagtaaaagggataaaagcttccgatttaagtatcaacaagtcatggtttctgtgctgggaattaggaaagattataaagtgatgggtccaacaacattgattggaaatagtagttagttataatgtgaatatgacatgttgatagtgttcttgttccaatttaaaaaagataagaaagtggtgggttcagcaacgttgattggaaatagctgttagctatgatgagaatatgacatgttgatagtgtcttaggtttcatagaagcttggagctcatgtgataagaaaagattccttctcatttaatataatatgtccttgcaagaaaccttggcaactgaaaatgccatttccatcaatttagaagaacggtacagaggttgatttatcatcagttgtttaggctgttggtgctgtagaacaattatttttttatttgtgagtgagttcgagtagcctttcgtttggttaaaaaaagacctttctttgcttttgacgagcttttctaccttaagtttatggaaagtttttggttaaggtcaagttaaaagagtttgatatagaatcttcatgtcatggatattgagtagctgtgcagtattgggctgtctggggttcaatttatttggtctcctgcctaattaataactggggatggggaacaaagattgcagggtttggtggaaccttcagtttcctacttgagcctgccaagtttgttttggaaaatgtatgggctatttggaaagaaataaagactgtctgtctgtctaacatgtttggtttaaacaggcattaacttttccatatgaaagggagggaatttcttaccaggcattatgaattacaatccataatagaactttgagaccttctgacacattggttctagaatccacaaaatatatgactagactgacgtttgaaattttgtgtcaactttgtagcttatattttcatgagaacgaaaaagaaagacacagacgtggagctagtggatgaagttgcaactccagttgaaacaacagctactgtcactgtcccccttgataaatctctacctacgccgattgtcaaagagcctccccctaaattgcgacaaccaatctcagagaatcaacagcttgaacttttcaagtggatattggaagaaaaaaggaagattaaaacaaatgatcccaaagaaaggaagcgtatcgatgaggaaaaagctttgcttaagcagtttattcgaacaaagtctgttccgagcatataactggcgaacaactgctatcaaatgattaaggaatatctgaaaaagaaaagaggaaacacaattgtttagtattccaagtttctcacttccttatttgtgactacattatgattagacttttgccagtttacaatggaagtacttaaaaaaaaattgccatgtgtaaatcaaaaagttgtgtttggtctgctgcagaaatttgtggattttgtagttgcttggttacaaattacaatgagacagtagcagtataaaaccacatttttctattactatttgtctcctttgatcccagtctgctgggtttgtgtttattgattcaaatatgcatatcattttgagctcagatgaagtaagcatgatctgaagcttttgtacaaatttatgttccaggagaacagagcaagggagggccctctaaataccctttagattggctgatgttaatatattcttaatgcctttgaactttaggaacagtgactagtaatttgctttccttgtcatattttctttgtccctagtaatcatattgtcgttttctatgcaagagagaacataattttcatttggtaaccaatcacagaaatttcgaagttaaccatattctcttaaaaactttattacttaaaaacttgtggtgattcacatgggccaattgaaagcagtattaacaatttccaaaaatgatgtggacaccccacctgtgtgtaattctgagaagtccccacctcatgcagccatcttgacactaaaaaacaaccgttactatcatacatacgttaatttctcaccctctttatattctacctccttttcccaaattacacttgtattgcctatcgtctctagtccctacgcttcactcttcaaaggcaataccaaaaaaaacactctatccaaatatattccataagattctctagatatagtggcattaataaagtgtaaagattttgatgataaagaaaggacatatctttgaatggtacctaattataagttaggtagttagaagaaagagatataaacaatatttaaggagtaatgtgcggcaaaaaatatagaactaaaactaaactaaactaaaagcaaagtctcttaacttttttattttttttgtgagtgatagcgtgtatgactttgatacatgaatattgttgatgttgtttagcaatttgaaaaggcaatagtgttttaagacttgttagaaagctaaaacaaaagggtagtctctttattatagttattgttattacatatattggtgtggtgtgtccatggctgatggaaatgagaggtttatattatataacaagcaaaagagaagttttggcaaaaagagagggtaaggctgcacatgcagcctctacctctaccaaccatatatataaaatcacaaaggatggggcttgagtatgacatgagaggttcattcggctatatagagatgatg

SEQ ID NO: 16669 - DNA, 4761 bp, Cannabis sativa
aaaaaaaagtatagtttttttatagtgtaaatttttggtataataataaaattttttaattatttaagcatataaattcaaatttccctaacaaacataaaaaataatatattatcttttatatttaataaaaataataaactaatggacttaaaaactaatagaagaggtgctttgcatttcaagttttgatttttacacacacccaagttcataggggcaccacccacctctctctctcttaaatgtttctccctctaaaaactctctctttctctttctctttctctctctagtttgcatgtatgggcgtgaagtttattttagtttaaaaagctttctcatttagagctctgtataagtagagaggtttctgagatttcaaagcagacccataaccaaatacccatttggtttggtctcaattttcagctgatttcttactcttttgattaaattactgtaaaaaaattcaattttgagaaatgggtattgtaaatcaagaagcgatcaagcaatttcagttgttattggagaaaggtttgatttttattattttctacaacttaaacccatttttgtcttcttctttgatctgtaaatttacttactttattgttttctctttttcttttattgggtatttcagcagatgagccattgaagaactcattcaaggttagagactctcttttgtttttaatgtattatatttacttgatctacttacatgtttggattctgagaaaattataagaaaaaagatttgaactttgagttgacttgcaaccttgggaaagtgaagcctttataaagcttaatacaactcttaaaactttaggttgcttaaaatttacaatccaagatcttatatttctttgtatatgaaaatgaaaggtttataattataatatatatgctttttttttcattagattgattgatttgaagtttttgaatagttgcgtatcaaagtgaatttggtcttagtttattgctttttgactttgagtcccactatgttggctaattggtccatataagaatttataagatattataacaagaaatgatagaagtgaaattggtttttgagttttttgctttttctaatgatgcatttttgaattaaagtggatcttgtttgaaaatttgaagtaaaaagtgaaaataaaagtgttaatgtgtgtgatccacagaatgttcatcagggatatcctgctgaagcattggagcgatttcttaaagcgagagattggaatctcggaaaagctcataagatggttagatgtgtttccttaatctatgggaacttaataatcatttctatatgactagaattgttttactaatagctatatattgtttcagttgattgattgtttgcaatggaggatgcaaaatgagatcgataatatattgtcggtgagtaaaataagcccaatgaacaaaacatacctcaatatcgatagtgtttgttgcttagaaaccgttataagatctcatttcatgcttagaatactgattggagttttgttaacgttttacagaaacctatcattcctgatgatttgtatagagctgttcgggattctcagcttgtgggattgtctggttactcaaaagaggtaatccattgttctctttcgaactatcgatctttagtctttactgtattttgctgccaagtaataaagtattctatttctcggtgtttagcagaatcctgcattcaaacttgtggaaatcttaatttttcgtgtttatattttgcagggtcttcctgtcattgctgttggggttggactcagtacctttgacaaagcatctgtaaggatattgaaatttatttactctttaattttaaggtttagatatatgtttatttaaaaatactgtgattatagaatttgtgttcatgatatttgcttttgtgattctgtcatttcaggtaaattactatgtgcagtcacacattcaaatgaatgaatatagagatcgtgttgttttggtgagaacttcggttttattttgtctttttatcctcaatttctttcttgtatcctattctcattttgctgttttttgttttagccttctgcaactcgaaaatatggacgatatgtcggtacttgtcttaaggttttggatatgaccggcctgaagctttccgcacttaaccaaataaaggtattttttaacaattcatcattaaatagtttcactgaaaattgttgtattttccaattaatgccaatccgagtcttgaaacataattcctaaggatgaatattttatcgatgacctatgcatcgaggctgttgacttaaaagttgtaccgtttttcttttcaatttctctcatttaaatgtagaaaagaagaattacccaagatgggtagcttgttaggcctcaaataaccgagtctctagttagttagttcagcttagttctggtggttgttttgctagttagttagaatattgttattactctttagtaagtggctgagtccatataaaggctagtcctatcttacaagaggaattggtgagaatttatgtgttcttcgagatatgaaactctctcgaagagttgggaaccttgtaatcttctctttgatatcgatgaaatgcctatcttctcaagtgaaagcgtctttgtttatcgttccattctattttgttaagaaatcgaatgtttttaccgtgactgatcccatatatccgaccgactgttgcagctattgacagtcatatcaacaatagatgacttgaactacccggagaagaccgatacatactatattgtcaatgccccgtacatattttcagcgtgttggaaggtttctactaattccctttgcttcttctatagctgttttaatccaattcgctaaccgaaaagtggaaaaaatctatgcaggttgttaaaccgcttttacaggaaagaaccaggaagaaaattcaggtgcttcaaggttgtggaagagacgagttactcaaagtgagccatgtttttcttttcttttgataaatttaatcacaccgaacacagtatttacccaattaccgaaactctatcatggggttaagacttggtagctgctaagtgtaatataaaataatttcggacataaaagcatgtttttctttaaatggggccgattttgctttcttaaagattcggttattctgtttgatttggcgtaaaaacatgttcttttttcggttaatttgactcagaactttgtcttgcagataatggattatggatccctcccacatttttgtagaagggaaggatcaggatcatctcggcattctgataatggaatcgccgataattgttttaccttagatcacccgttccatcaagatctctacacttatgtcagacaacaagccgagtctttggaaactgctcaactaaccaaagaagggtctttccacgtaaggttccccgagccaaaccccgatgatgctgagattgcaagaacaattgaatccgaattccaaaagtatggaaacaaaaacggcctctccaagtcaatgagcaaccttagagttaacggttcatgaacaaataaaaaagaaactcgaacaataacagattaccgcgattattgatgctgttgaagccccgctattagattggtaaaacacacacaaccatcgtttatagatggaccgagttcttcgattattactgtaatacttatgtatttgcttgcatcagctcgatgcaggcgttatagaacacaatactgatttcgggtttagtttgaaccccccggccaactcggttggagaaagctatgggggcaatcttttgctcttttacatgctaattgtttctgactaatccagccaatacaatctatatagccttttttgggcaattttagaatccaaatgaggactcattttaggattttacttatgtttaaacacaaaagtgaaactatctatgcatagcaatatgttcttcattgcttaatgtactattatgaaccagaatgaaccataccccaagtatttgtgatttgataagaaatcatagtttagtttatatttttcattatatggatataaacaaagaatttctaaattataaattaaagtaattttagtgtgaaattataattttttgctacttctttagaaagtaagaaatttttgtattatgaaattactatattttctctaaaatcattaatataatattttcaaagctattaaagaattttattttcgagctatgacctttgtttttaaattttgtagtccttgataaatgatctctaaactattcacagtattttaaattaatccatctaattttattagacgtggcaaataaaataatgacatatttactatttaaattaaaaaaataaaaaattatatatttttaaaaaatcattaaaataaaaattattaaaaaaaaaattagtctcatctcaatgtcacatctataaatagtttgaaaaataaataatttttcttttttaattttacatataatttaacacttcacggctcaagtacttataaaagtttcaaaaatacaaattaattattgttactgttaaaaattaaacttaagtatttatcaacaaccaaaaattaaaattaaaatttttaatgccataaattactcaaaaaaagaattagtaaactccactctatttttcttctaattcattccactttccttcactttctactctaattttctcacaccacttttcttctcaac

SEQ ID NO: 16670 - DNA, 2964 bp, Cannabis sativa
  modified_base (2916)..(2923): a, c, t, g, unknown or other
aagcaaaaattttaattaatgacaatttctgtaaacctcgttgattagcaacgagctgcacagtatgttttaaaatcacgtaatacgcctattctagttaggttgttacacttgaggtcaccctcttctgataaggtatcatgtgacacatgttcctcacgatcaaggaacctctcgtcatagacctagtacagaaaaatgggtttactcggtaagcccaatctctcgaacctgccttcatcaagaagtaatgaatggcctacgattaaaaagtattgacggtaagaactcatcagcgatacttgtggttgaaaactctaagtatatatcagaatttaagaaaatagatgaaatacaagttaacttaagaaaatttgtagaacaacaatggtggaaaatgtgctttcttgtattgtcaattgaaaggtgtattttaaaaagattttccaaccacccctttcaaatttaagaaaacaattatttataggtgagtcttatttcctttcatttacatgttgatcctctaacggtccctaagtgcaagggaaggatatcctgctcctcaaggttatagttgcaggaggtggtcttgcaactagtactgttgtcaggtgtcaggcagtcctagggtaggagttgtggctgcaatatactccttgttggaccatcagagttttctagtgagacgcctccactactcgtcctctttttgtgcttaggtgttgcaggtgaagcaaggtcgtacccgtgtgtgatgtccttttgcttcttcccgtcataacatgctaaatgtctgctaccacattaagagacctgatcattcaatacaatgcactgatagggtttgcgaggtcaagaaacatccattcatgcaacaagagtttgaggcatgagagtggcatgcttcatgcgagttgaatgatgcttgcgagtgatctgctgcatgcaagtgtcctaatgaatgtgagttactagttgcatgcgagtgtcctaatgcacgtgattggccgatgcactcgagcggcttgttgcatgtgggtttttagctgcatgcgagtgacttccaaatgttgcatcctcttgcctgttctcaccctctcgcccactctcaccctcatgttcgttctcatcatctcacccactctcaccctcttacccactttcaacctctcgcccaacatcaatgtaacaccctactagtttaggcacactatagtacttttcttaattaccgtgttgtcctttgctaatcaaaaggtttaatataaaaccgtgtccaatcaaaataataataattaaatattttcataaataaatattgttaacgtaaattgtttacaaaactcggtatgccgaaatcaattttaaaaatttaaaaataacaaaagtgttggcagggactaataaaattaagcccatattatcacaaagatttgaacgctccaagtctaattatctagatatgtaaaatcttcactgagctccaatactcacaattagggtttatgcgctaaaaagcctgtaaagacatctctgatttataattaggagtcgaacattttgatatatgaatgaatgttaaattatttaatatttaatattgaataatttatatacaaatatcgaaaaattccttattcatatatggggcgccaatgacttgtacttgtacagagaactaagatcacttagttacgtataaaatggttagcaatatattaaaatttgggaatctttaatcaatagttgctagtaaaattcactgatgctcattcttcggtgcaaggaatatcggttcagattactgatgtactatgacatcaaaataaaggtattgtatataatagagattatatatgacaaggaccaatatgaagaaagttgtctttatcaaacttaccgtttactataaagacctaattgatatcataatgatgataaatagtagatcgacctaaatccttagtaatcatgaactcaagttcatgttattagtttctttggttcactcgttaaagtttctcaaagaagattattcttaaaacttctatttagggaatctagcaatgtgtatggttgggaagatgatctaacttatggaatcctaacttttttaacggatcaaatgttggttcctattatcccgattttttcccacttgaagttgtagtgattatgtgggcaaaatcagtaccacgttgaagtacaactcgccaataagaaggccaagttagaatctaagcaaatagggatcccgacacttaaacaggcatcaaatgacagactagctcctttgtagaagctggccggccacccctagccgaccctatggcaggccagcctctagacaacatcatggcaatccagtctattccctgtaggagtcatgtcgaccagggaaaggcctgcaggattttctgtgaacttctacacatggacaacatgatttaagctacaaattggcccctgaaagcctaatagattttagtagactaatataattactgaaatgaatactctatcatttattgcattaagccaagctataaggagactattgtgtcacttttaaaagttatagaagttgtagattctatatctatgattaacgctcccacttaattaaactaccgagctcccaagatataggtatttggccgattttattgatcaactgtaacaaacaagtcaaataacccacatagtataattatgctagaacttaaccatctcaagattgagatcaattgacctaagataatctaagtgacattgacttagaaaagacaaaacagtaagtttatgatatcttttttactgttaatatcagtccaatctgatgtatagtcggtacatccaatcctagttttctttgttaatgaccagtaaggacattctgttggaaattattttacnnnnnnnntagatctactcacaagcatgtttattaacaccctaaatatg

SEQ ID NO: 16671 - DNA, 2178 bp, Cannabis sativa
ccacctacgtggtgggagtgaatgctgatggctacagccacgacgagccaatcatcagcaatgcctcttgcaccaccaactgtcttgccccctttgtgaaggtgattgatgagaaattcggcatcatcaaaggcaccatgaccacaactcactcctacaccggtgaccaaaggttgctcgatgccagccaccgtgatcttcgtcgtgctcgtgctgctgcactcaacattgttccaacttcaactggtgcagccaaggctgtttcccttgtcctcccttcactcaaaggcaaactcaatggaattgctcttcgagtccccacacctaatgtctcagtcgtcgaccttgttgttcaagtctctaaaaagacttttgctgaggaggttaatgctgctttcagagaaagtgctgataaggaactcaatggcattctctctgtctgtgatgagcctcttgtctccgtcgatttcagatgcaccgatgtatcatccaccgtcgattcttcgttgacaatggttatgggagatgacatggttaaggtcattgcttggtatgataatgagtggggttactcacagagggttgtggatctggctgacattgtagccaatcagtggaaatgagattcccaatccaatcattttaataagattttttccctgccttaaatattattcaccaactgtttttttccttcttttttcctttttctattattcctgtctaaaaatttgtaatgagaactttgaaccgatttccctggcttgtcattactcaataacagctttcctttcaatcaatatttactcaaagacccataaacaaatcaaagaattacactattccaaagaatataaatgatccatccttaaaacaacaacatcaataaataaaaaaatttacaacagagagaccaaaaaaagtggagcttgtgtgtgtgagtaaaattgtaccaagatcacctatcaactaatgaaacataagagttgacgggttgcgataaatgtgcacaaatgcagcatctcagagtgattaatttcgataaaatctggtttatctagaacaaccaatgcttcttccttggcttctgctgtgctggagcagctgcaaagaggccattttagtggattttcaaactagtgcctttctcttgaaaccatattcaaaacaaaataagtatgaaagcttaaagctacaagtatggactcaaaacgtgcacaaaccttggatttcataaagtgaattataatgaacctcagaccagaaactcagccacaactctgcatgattcaaaagaataatatcaatgtaaatgtactaatgttttcaggggttttttccagcaaaagaaggtgttagcctaaacacaaaaagtacaactagttttgtcattagtccacacaatttaattcttgtttaactaattacttgatctttagtttaacgactagactttttgtgatgattgcataactaacatcattcctcttcctcttattaaactagtttccaataactaaagaacattcaaactctgttttgtttaataactcgaaaggagagaaaaaacagtcaaacttaccacgcttcggtgcttgatattgtggcatgatttcaataaaacaagtgtctctgaatgatgtcaaaaggcatatctttgctgcaaactgtgagggaaaaaaacaataagcatcaatcatcatcatcataacatggaaaaaatggtaaaacaatgccaatagtgtgatttgattgattctatataccttatcagctgctgcttgtaaagtaacatggtcaccccattcaccaagtctgcaatagaatcagatggtaaaacttgaaccattacattacatttcatttcaagcaataatgaaatcattcatcaaattaagaaaaaagaacacacttagccattttcttgtagtagcgtttgtacttcattgggacataactatcatacagagagcgaaaccccttaagctgaaaaaccccaaaaattaaataaaaatcgattctttggtagctgcaattacagtacttaatctgaaaaatgccttacctgtttcacaatatctttgcgcacatgtttgtgatactccggcgaacggtaaatctgatcagaaatcgcacgaaactgccaatacatatgaaaaagattatgtaatgatatat

SEQ ID NO: 16672 - DNA, 5984 bp, Cannabis sativa
taaaaacacagtattttttaaaaaatttctgtgtgacaatatttttgtaaaagttccagtatttttgtaagttacccaagtccaaccatatttggtcttttgtagaaaataatgatacaaaaataaaagtgtcatttgtgtaaaatatgattgtaataatgtttgaaattaattaaacatatttgcaattactttcccttccttgtggtatttttgatattatatttgtaaacgcttatatttttgccaagttcccccatcgcaacttcgggttggtggttaacagaagtacaaaaccctagcaagctcttaaaccccccaattcatcgtcttggttggatgcagaaactgtaattgcatcctcaacaatctatctcagtttttgtatcctgcaaaccctagagatggtgtggtttcagtgtgaggattgtggagacaaccttaagaaacctaaattacccagtcatttcagggtttgctgtgctaccaaggtaattttcctttgttttattctgtattttcatcgcaatatgtttgaattctcttgaaatttatgaatttgagaatacattcttcgatcgttatgccaagagcttgtacctttttttctctcaaaaaagtttttattgtattttctatatattaactgacttggttgctattgtggttctgataaaatcggcagttatcttgtattgattgcggaaaggtattcgggcaggaaagtgttctaggccatacgcaatgcatgacagagatggtaagtgacaatttagatagtagtatacattggtttgttcttgtaatgcaaaagtcttcaatgttcaaagattgtagtttgtctagtccaattgattttagagatcttattctcatttgactgactttatatgtctttcttgtatttatagtgctgttgttattattcatttcctctcttataagattggttgctaagctttagctaatcctaccatgctggataccgcccgtttttgctttccatttcaggaaaagtatggccctaagggacaaggacaagggaaaggcacgaacggatcagctgccaagccaaacaaggatggaaaacagcaaccagattttgatataagtgttggcttgtctgaacggcctccatggttttgtaggtatgttgttatgtttagattggtttgttgtagtctttgtctgtattgtaggcccttaattttattatgtgcgaataaatgttttatgatgtaggattgcaacgtgagaggttgggagtagaatttaagttgtatcaatcttgtgatattggtttatacagtctataaaaagcaaaatgaagatcgtcctatttgtagtcatctgatcatttattcttttttgtgtttgataactggtatgtgactgctcttcttggtcttgtatttatgcattttgcagtctttgcaataccaatgcaactagtaagcagacgttgcttcttcatgcagaaggaaagaagcacaaagctagagcccgggctttccatgctgcacagcagaaactgaacaagacagaagaatctgctccagaaacaaagccaccgttggaaaaccctcaaaacggtgagttgcttgacaagaaagatgtggaagagccccaagtgcaggatatcaatgttgaagcaactaatggaagtttaccatcaaataagaagagaaaatcaaataaaactgatgatgataatttgatgaaaagaaccaaggacgatgtggttgctctaggcaatggagaagtgattcaatgtggaaatacagaagcagggaaaacagggagtgatgttaagcaaaaatctttccctgctagtgaagaaaccttgaacaagatcaagtggaagaaaataatatcatcagctttaaaatctgtatgtactctaattcctgcatctcttctctgtttcagtttatttttatttggagtatgatctttcttccaatgcatatatttgaaaacaatgacaaataactatgaaagaaaaatgaaaggggaataaaagaagaaaggaaaagaagcgcaaattcacacataattatataatataaatatatcaaggcttatgaagaagactttcactttgcatactagtcttagactgagtcactgagcaaagtataagttttcacattttgtgtgatattacttcttttagttacattatttatgcactttctctatgatttattaattgtatattggtgggtgctagagtcctgatggggttataaaaatgaagaaattgagaaaaacagttctcaaggctcttcaagaatctggcataacagtagatgaagatcaattcaaaaatacgattgagcacaaggtttgcccatttctttctgcgatgcttgtattttctctggcatccttatgaactttgttaattatcttgttgcttgttgcagatcaattcaagctcaagatttactgttgaaaacaagcatgtccggctggtagcaaaagattaaaagtacagtctcattgaaatagaaggaatccatccctaatattctttcttcagtaccattccatttgccttctccaatgggttatttgtaacttagtttcaccatccacagaggttgaatttcaggtcctgggtagaattgatgtcaattgtctttcccatggaagaaaattttgattattcctttccgagaaagtaactgttactagtattataattattgttattatgaacaagccattgttattgtcatattcgattcatgttaaaatgagttgtgagttttgcgtatattctgaactgtcggattttgtggtcatagactccaaggcaagttgttatacgtgcacaatccaagtgtgttaaagcatttgcaattcaggagggcttgattttccactaaagaatttagtatcatgatagaacataatgatgatggcgatgactcttgtatttatttacgtgcacaatccaagatgggttatgtttacaattaggaaattgagtttcactacaaaatttacacgatgaatgatgtctgtaatgcttttacttagagaaacaatctaatttaaaaagtttattcaccaaataaaaggtgaagcaattctaattcattcatttttatttgtagttcggccaggaacttagacaatggcaaaaactttactgtaatcttatttgaataacacataaaaattgtaacattaacagagattttctcttatatatatatgagtcaatgacaatcatataaagtaagaaaaaaagagggtaaaccaaacaagagtactcataatcgaagctgtcggtatacacatgtgacaaatctcaatttttggtaactattttggtgtctttacaaatttttccattatctatttccttctcctggcatgaactcattgtctaaattgtctcctccaatgtgactttgctttcttgatgtttgcaaaggcgttgggagcaaaataggattggactgataatttgctagaatagctgcataactacaatagtcaacatgataacagagcaagctagtgcctgcaatcatgttagatcactatatcagtttgtcactttcaaggctgggaaaatcaacagaaaagggaagccaaaagtaatatactactgtgcataagaaaaacttgaatgtgtattagctgagaacaacttacagcaatggcagaggctgctagtccagctcgctctcggggatccttgcggtagtgattgccgaaatacaggaatgtgccatagtaccacatgagtgggcacaaaaagccaaaaagaaaactgccatgaaataagttagagctagaaaaggtgaaaacatgatctggaaagggaaacggagagattagagaaactcacgaaaaccatccaactccacagccaaagcaagggaggggtttatcgtatagcccgctctgtaagtcctctatgtctctgatcagagaatatttgcccttgtcccggtctgcagcatctgttactgcttgccctaccatcaccataattacctctcacatgtctggattaacactcgataaagaaagaccaagttcatatttaaaccttgtttattgattgaagatatgtgtttgcatgttgattggttttagagaaagtttaaataactagaactagattggatttaaagtaacttttattcgtacttgttcaaacaattgaagaaacataactactaggaacaaattttccaagcacacaaaactgattagttgtacataagtagttttagtccaaataggaacaatacctttaaacattgaataatatcgagatgagggtcgtaagcgatcaagatgcttatcagaccccgatctcaccaactcaaccccattcctcagtccttctgcctccttaacatttggatctgcaacaccaataaagctcgtttaagaattaagagttggtaagtaatacacctaacatatgcataaaatactctgccaacttcttaagcataatacttgctccaaagttgtaagtttcttattcttattcacaagaaagagtacccttaaacccagctaggggtttaacttaaacttatacacaatcaccacaccaaggtagtctgaagtgacaatcatgaattctaatttaaaaaatacataactatattcttataaataacaataaacacaagctcaatctcttgagctacatttaagtggatgcacaattatatttatagcaagaaacccagaaatgaagaaaagcttttactttgatccatctgtttttggaggagatgtatcaggcaggttcaatgtcttcacttctattttactcctcttagtacccctgaatcaagaaaattgaattagtatgtcatatctactcattcttgaaaatcttttggtttataaatcgcccaaatttcacatgttttatgtggattgttgagattaaataaatagaaacaattggattaatttcttttcacaaaagagtggctatgtacaaatatattattaacataacaaaccaaaaagaaaacaaaagaacaggcatatgcttaattttatctagcaacaaagacaatcttcagttcatcaggactctaagtactcctgcccaaataaaaaaaaaattgactagcaaacttcaaaggattcttctcactgtttcaattttaaagtcattccgttaccaaattacccaagaaaattcaaaggaaaattaacccactggatgtgtgtaagacccagcgaattccatctaaattcattaacacaaaattgaaaagaaaaactcaagggtctgccgggaaaacgaaatttattcgaagaacatgtttattaaactaatttctcagaaaaaaaaaaataaactttctgaaaaagaaaaatcaatggaaaaaaaaaaaaaaagagagaagaacttgcctgtgatttgcagaattctgaggatttcagtagatgtctttacagatcagaatcgaaaagtggagtctttgtaatcggaggggtgttttacatggtaagcaaaggctcagcttcggcaataaacaatcgaaagctccaaaaaattgactctttcgttatttcttttcttgtcttaaatatgaaattaaataatcaagaaaatacattaaatacttttcaacagcttcttttttatttatatatattttttattccatttgtaatattttaatctactaaagcttgttctttttttcgccagctgattaaactatctgcatgttgattggctggtttaatgaaaagacaactatgcccttcctttgactttattactatgcatagtattggtttcctattggatgatgtgttgattacggttgacagctaattattcctcgtttcccttttattattcttatattttcccaatcattttctttttgaaagggatattttttccaatcatttgctggttaaatttcatttatttttttacgtcaaaattttttttaaaaaaaaaagtttttttt

SEQ ID NO: 16673 - DNA, 6159 bp, Cannabis sativa
actttctgcacaccgagtgctcgctctcttgattacccaacaacttgttcatttgcttttccactatcaatatatagctattactttccattttcctactgtgtggctctattttcccttcttttgccaatatttatacttaaatgataggaaattcctatcattcacttctctgattgaacattatctcacgtttacgaaagaaagattgggtcaatttgctcatgcgcaactcacttctgatggtgttcaactctacgatcatcctgttgtgcaacaagaaatcgcaaatgtcctctcgacaacgtgttgaatggcaacaaagctcccatcagtttcgatccatgtagatctcgctcgttccattcttcagtcttgacttgtcccatggatccttcagagaaattgcatcactgagaatcaggagcaaagaagactcgcggttccttcaaattggacgcgccaaatcgacgatttcttgccattgaccatttccgcaaggaaacggatgccatcctcagtgaagaaggtgaagttgtggccgcattgctagtggtggagaacttgtttttcattcgtggaaaagcaactccctccgagccactcatcatcaacaataatgtgcatttgtttatgtttcagtccacaacagtttggttcagatgtcgttggtggtagagcacatgcaagattgagatcagcgcaaagatgggcggcgagaagcctagtcacgctggatcacaactcattaaaggagtggacgaattggatttatgtttacagaattgcttactggtggttcaaatattgagtacgtaatgaggcttcaaatttttccatcgtcaacataaagaaattcatttctaaacaaatggcgatgcaactgattacaaatattttccattaacattgttttcttttgtttagcttttcttttgagtactatgcaacatctatgctttcacttcaggtaatacattcggaaacttttttgcattcctatttggatcaaaatgaaaaatatgacacttaaaatctaataataccaccacaaaagatacacctggtttcattattatttctgactaatgggtaacagtatttccaagttcgatcttgtttttagtactacttccaataccactagcccttgtaatgtatacactaaattaaaatttagtttcacataattagtttagaggttaagtttcagtaggcttctacttcagctttcatagcttcttctaaaaggggtttttaaatctaaaagtcaaaacatataggaaactcaaacagctttaaacgtacatttagagtttcaaaaatccaaaagtatcatataaatatcaacaacttgcatgatagattaatgttacatgtacaaaattaataaaaaaataataataatcacatattattataaagtaactattataaataaaaattagaatcataccctagtggagcagctataaatgataatcagattttgatggccttagtttagcttctaggattagaaaaatcataaaggtatttgggaaaaaaaattaagacctttctaaacaaactaggaatcttaaaattaaaataatttacataattcttaaaagataaatatataaatttaatcacatccaaacacctcgaacgaaaaaaaaaaaaaaaacttttatttcctattttagctataaacaaaaagcaaacggggttgatgtgtgctaaagggattaaggataaaataaattaaaatttatataagactgtgtaggtatgagactacacagttaaagtgggtttaaatgacttgataggtactacctatgatgcatattcttttcagtggtccatcacttaaagaactctaaagttaagcgtgtttgacctgaaacattcttaggatgggtaggaaattttctgaaaaaatgtgcgagtgaagacaaaacacgctagaaagactcatgttggttagtgtcaatcatcattctaacgaaagaaagttattttcttttaactatgaaggagaagagaccaacaaaataaatgaaagttactctgtacataatatgttaagtaagactcattgacgaaaagaaaagaagagttaaaatcaattctcaaacagatatatggttttttttatatgcatccatgtgatgcactaatttttttttctttcttcttttgtaaatttttaataaagcctgaactttgattgagatggtctgttttacaaagataagtcctgatcaagtgagaacaacaaccttctgggagttgaaatcgaattgtgaacagatccttcttggttcaactgatgctaccacgaaaatttggaatgatcttaagattaggttgtctggtaagtggtaaccgtgttactggttcacaaaatgtaaacctgtatagaggaactttggattatgtcctagcacttaaatacatgactatttcactagaaacacttgggacatcgtgcttgtattgggttcaaagaagcttcttcgtgacgatcaccaatttttaaaaaggcaatgttaagtaccaaggtgttttgtcttgctaatgagagttgtattgaggcgcaagcctcaaacattgaattgaaaaagcattgtataaagcataaatagttaaaatcaacaaatcactcattctcaaagtcaaaggtgactagatactattactaataagattcacctattctggaaagagtaacacttgggctgatgtttaaaaaaaatcaagcaatttgttaatcactactaggggttgtttgtataaaaacagagaagcctagctcatgaaaaaaaaaggtgcctagaggctattgttgttttggtcattctaaaaagaaaaaagcaagcctctcaaatacttgaaggatgtggtttgcaattcgtatggtcatataagagaagagcaaataaactcttagttttttaaaatgggacaccgttgacaacttcccagtcaaaaacaaaatcaaagatttttatctttttagaaaatcaaatgccatttctcggtctccatcttgcagaactatcctatagatcacaaacctattcatccttaaaaaattctacctcaatccaacagataattagcctatcaccctttgaataactccactatactccaataataagaatgtcaaccaacacacactcctgaaccacacagcacaccctaatcttatccaaaagataaatccaaatcacatcaacaccaacgaaaaggaacctttcccgcttcctattgtttttaattttccaatgatactaagactcatagataagaagaggtgcaattgtgattatagaaataaaaactgcaagcaatttatattttatcttctctcttttatatcctcaaattgccaatgtagtttttcagccataataacgatccaacatgagcatgatagatcaatcaatccataatgaattatgtcagttgtgattctactggcatataactcaaccttatgcctattgatagactaaacataaatttgtccagctggagtaacatgcaaattatgtcacacatttgcagatatcatttaaatgcaataacataacatcattaaaaagaaacaaaattaaaaaatattactcagatctcttctaaaataaaaagtggctaatatgactaaatatagctaaagatggtgcatacaaataaacaagtaggagaaaggaaaaaaaaatcttacttgctctggagtatgaaatatttcaatgaatggatactccgttttctgccgtgaaatacagaaacccggatattttggacattcaacctgaaattgtgttgacgtaatgataaaacaaaatttcatactaaaaactttgactgagctttttgacaattcgttaaacatacatgacacaataataacttacacgtataaattttacatgtggatagaactcagatgcagcttcctccagtaccttgtccaaatgtctagtaagattacatctgcagtattcaaactattttgatattgagaaacaattaaattgaaaaatgggagaaacagataagaaccgaatccaaatgacctgatagtaaaagcagcaaccactggataaccttcatgaagaagatgaacaaagtcacgctctgaagtaaaatcaataactcgtgatggcccaagatcctttggataaccagtataataccttcaatcgcaaacaaaattgtaaggggttagaagtacgtcaaataaaaagaaaacctgagagaaacacacataaacttcatttaaagaacaataaggaaattgtctacatcggcatcccaccatatctatccgtatgttaaatttgaaaactaagtcagctcaaaatacggtaaaatagataattatcaatgttagtaagaaaaatttccattgcacttccaccatatcaaaacttgattcaaatgcatttacaaaagaaacatagaattctcttcttcttttttaacaaaatggacggtagatttgaactctaagtctcaacaatggaggttttctaactccaaggggtggtctagtggtaaggaggagtgctggaaagtgtaggtaggcatttgttccaaggttcaaatccccacaaagaaaaaccttaggaccactacgaggtctaccagtcgaactaacaaggccaaaattcaaaaaataacaatggaggttttcgaaagaaaataaaagagtctcaacagagaaggtaagtctgtgaaatgtaacaatttcctaacttaagttccgaagaccaagaaattttgagcaaggaaaagctaaaatctaacaaataatgacttctaaagtcatgaatcgggaggtatacaatctcataataaataaataaaaaaaaatgttaaggtatcatacaataatataatcaatttatcatagacaaaaataactttgtttacaaaagaaaaataaacagttggcataagttgttcataggcaaatattttaggtgtactcaaacaaaagctataaattattggcagaaatcatggttcctcattatcaaggatggtacacatacttggatgttgcacggagatgattgatcatccgttcataaaacgatggttcccccatttcatataactgtacacctatctcagtcctgcgtgaattatcctcttgttataaatcattaaaccccacattagttggcaagtgttgctaattttagaaaatatataacacacacacacacacacattacactactcttaatattaaccaaacatctttatctcgagcttgggagtaaaacctacaccgccccagaaagattgaggggtagagcgggtcagttttagtacagttctagcttctagagaaccttgtgcttctcaggtaccagctcaggataatgtttcacttagaaaaaaaattggtttcatcacttccaaaagtatctcgctattggaaaggtagttcaaaagatacccaattgcattgaagcctttccaatcactctgcctacatcctttcgaaatcaaatgttacattgaacttgttgtgaacgaagacagagaaagataaatgtagctaatatgtgtatcattttatcaaaaacttgcagggcgtcaaccattaattcgaggttccacaaacctacgctaccttgaagctcaaatctaacaaagatccaataaaaataacatataaccacaactaaccctgaaaatcttcagagaaacaaacaacgaaaacaatatcgtaaaagaaaagagagcaaaaagtaacaaaactcacctttggaacaagggtagtggagttggctgagctttaggactttcaagcgggtatacgtccgaaacaagatgggcttctgagattaaagtcagaaataaaatttgttaatggggggtgggtttcatttattcaaagtttggaccgccatgccccgctggggattttttttttttttttttggtcctccccattgaagcatttagtcaaacactttgaatggctttacgtgacacttctgagaattaaataagtacattgtttctctacacgaaagaaactatttctcaggagcattccatcaaacaattggaagacaaattaatatgttttgctactgagagaaaaacaaagaaaatcaacatggctaagtacaatccactaag

SEQ ID NO: 16674 - DNA, 5757 bp, Cannabis sativa
atctattacttttttagcactctatatgctttgaggtttcttgtaatgttatgttctatattaatttcactctatatgttgatttaataagattgctaattactcctaaaataccacatatcacatcagcattataaattgacttgtaacaatgttctatattctcaattgactctttataaaaatattattttaccaaatatcatcaagaatattttttattttcattatatattaaattatattatactgaaataattttttaaataatattatataaaagtatgacataaaacataactatgtaatatggcctagcaagcacactaaatattttatttagaattatatgaagagagataaaagagttgaggaggttggttggtttggtggtcagtcttcgaagtgtcaaaataacggttgtcttgtcatcattcaccatagtttcatttgaaattttgaataaatgtaacattaatattattattattattattttttgatgaagatttttattattattattgttatgaatgaacgaagttaataaagtgttgttcagaaaaaaaaaaagtagaattaataaagtggttataattgtccttaaatttagcaaatagatagatcatggactagagtactagagagatttacggacatcaatagtacctattaacctattattcttttttttttttgtaaggactaaggagtagtatctattatttatttatcagtaattattaattaaaactttatctctaaaaaagaaaaaaaaattaaaactttactttcaaactataaatgttgctgttcattttagcctattggatcttttattaaatgattagcctattagaatttaattaaacttaatttattattaaagatgtaaatatttaaaattattaaaaaaaaaaaaaagaaatactcttttttggtgttttgcgttttttaactagggatcttaaatttcaaacttctgatttccaaaaaaagaaaaaaaagaaaaatctatgaggattaaattaagaattataaaaagataatttttaatgggaagttcttttaaaattagaaagtatttagataattaataaaaaaatcataaatttagattttttttgtaaggataaattaagaattataaatataatttagaaagggtttacattctttttttttcttaaaaaaatcttttttttttttgcttgttattattttaaatttaacattaaaaaaactatattgcattagtattataatatttttaagaataaataaagtaattaataatttatttatttattttgatggtagagaaaagaaggttggttgcttcgccgacgtggttgggtccggaactcggagtaagactgttcacaacccctttggcctttacatatataaagtttccacctttgaccattttagcctcattcctacgtacccttttaccattctcaattcttttcctttacttttcttctctctttgctccaaaattccaaattaattattaaaaatacaaaattttgagaaaatcccaacattgttgattgcttcattcgatccccaaggaccaaagaagaagaaatacacatttcaaattcaaagagaagcaattacaaccttaccctgtttgttttggttcgtattttttgttattatgttttgagaattatgaatgaatgatttcaattgctgcattggattatgattatgggatcttgctcatcgttgttatcttcctcaactatagatcaaagatccagcttttatttttgtttattggtttgtttgattttgattttcaatgattaattagaaaaaaaaaaattgaatttttaatacttttgattttgtttaggttatgtttgggagtttgaggagtggaactgtagatttgtcttatgttagctgaattagagaatcaaaccagttctgaagtcccctttgaggcttcacatctctgactctgactctaatcccatgggagagtgggtcattggagctgttatcaatctttttggcagcattgccattaactttggtactaaccttctcaaattaggtcataatgaggtaaatcattcatcttcttctcaaccccaatttcccctttgccatttaaatcaacatatgtaaatgtaaatgcaaatggactattattttctctaaatttttcttctttgcagagagagagacatgcaatgttagaaagtgatggtacaattgcaaagaattctgtcaagcccattatatacttccacacttggagagttggtaattccagactctacttccaccaccaccaccattactcttttctttactcacctgagtcacctctttgattgattcccttcaactatctgatctcactctttaaattgcaggcattgtgtttttctttcttggaaattgccttaactttatttcctttggatatgctgctcaggtcagtacaaatcctggtttgaatgatatttatctcaaccaaccactttcataataatttgaattatcatttatctctatcctttgcagtcccttcttgcagctttgggatctattcaattcgtgtccaacattgcatttgcttactttgtgttgaataaaagggtgactgtaaagtatgtcatttttattttttcattattttctgcctctaatagtagctaaatttaatcccattgtaataataaattgcttcctttgcagggtcatggttgccacagcatttattgttcttggaaatgtgtttcttgttgcttttggtaaccatcagtcacctggtatgtatctggatcttaagttctcaaatcttactttgtgctgtattttatacgattacgtgagaactttcttagtcacgaaattccaaacttagtgtcctattctagactgtgttttggctgaaaaacttggcaattactattagctgtcctatatttctgtgtgtaaatcacgtgttccaatgtccacgtgttgggttaaaagaaacaaaagttgcttgaatcccttatttaaaccatgattaagtggagtccctcttgttttgataaaaggattcactatcggatttagatgaattggtggtgtggcttttactttgtgccaaagtccctgaattggtttattggtgtgagatatagccttttgtagaaagaaacaagaaccctcattttatgtaaggaaaatgccccatgtgaatgactaacatcgataatttcatttgcctgattttggcagctaactcttatgctacttttctccatttcagtctacacacctgaacagctggcagagaaatacagcaacattacattcctcttctactgcatgattttggttgtagttgttgctgtacatcactccatttacaagtgagatcttggtgattttacctatttatacttatttcatgttgttttttgtgtatcttacatgttgtcatgatgcaggagaggagaacttttgcatgcagtttgtccacatgaactgagaccgtactggcatacactacttccattttcttatgccatagtttcaggcgctgtaggatcatgctctgtattatttgcaaaatctctgtaagttagtccactaagtttattgtttccttctttcgatgcattgctaaattgggtgctgtcacattgtgatactaactccctaaactagtgcggtttcatcgcgatactaactccagttttttcttttgtagctctaatttgctaaggctggcgatgtctagtgcatatcagttgcacagctggttcacatattccatgctccttctatttcttagtacagccggattctgggtaatgtttaagagcagtcgaggagtgtgatttttagtctgaactgttcctatcagttgttttttctgtatattcaccgttatgttcttcatctatttatgcagatggccaggttgaatgaaggattgtcactatttgatgcaattcttatcgtacctatgtttcagattgcttgggcatttttctccatttgtacaggatttatatattttcaggaataccaggtccatactccctcctttaacagtagttaggatgctaattttgcaaattaattacctcttttatgtgctaaacctggtacagttaccaatatcgagaaagttgaataaatgattgcagttatttcagttgacttgactatttactgtatgattctcacaaaaagtacctgtaaagctcttgatccttgtaaagatttggatgcctttgtgtaaaaaatcttatatactagcacattggtgtttttggatgtcggcactgttgttgtttctagtctaacagcatcattctgctggtttcttcgctcatttagaaatacacgtatagattactagcgtgtgggctaatttgttgttttcataacaggtctttgatgcactaagaacaacaatgttcatactaggaatgatgtctgtgttcgtaggcatcactttgctggcacccgatgagccaaaaggtatttcagtttttgatcataataagtcgaaagtagaatagagaatcaatacagatggcaacttactttctcttcatgttttttcaggtgctgaagttaaagataattcttctgtagtttctgtgatgtcttcaaacatgtcgaaagatatggacaggttaagaatcacatgtgttgtttctttttgaaaagaaagtaaaagtgattccgtgtgactaatttcgggtcacatgtttataggctggttcttccatccgaagatgtagttagcagggacccgggtacactaatgcaagtagtgttgatgaagatgtcagatatcgcggtaaaagcaaaggtgaagaaagactttttaagagcgagccatgtcgacttgataatcatgaatgtgttttaaactaatttcaaaattgggtattcttgcagaatgcatgtgcattatcattaggtttcggggaagattcaatcaacgcgtctgcagtgtttgtgatgccaatggtgtcatcgaagatcacaggatttagaggaagtggcttcgaacggggtaagatgttctcgatgagaaattctggttggagtaagattcctatggatgaggaagctgtaaagatgctagaccaaatacctcaaagcccttgaattgatctcacttttgattcatatccccccaaaaaaagttctcacttttgtgttcattttgtatgtttagtttagatttcacacgcacccctttattggttggttggttagttccatattaattcagtaattatggaacattcttgtattttatatatatattaaaaaaaaaaaaaaaaagtgccatatacacttgtttatgtatattctttgcttacacttgttacataaaagagtagaaaaaataaggaaggaaatttgaacaagaaagaaataaagtggaaataaaaggagaatgtttgtcttattattattcttaaaatactctattatactaatatatactaaatcaaataacaataattaatattatttaaacaaaggattaatcaagttcaaccactaataatagcaataagaaagtaattttatataaagcaatttaatagtttcttattataaaaataattttcatgacataaaatcttttttttttttggttattttagcaaatataaatcaaaataataataattaaaaaaaaaagagagggagagagagttgtgttatatgagtggttatggaaaatgagaggagagagagagagag

SEQ ID NO: 16675 - DNA, 2756 bp, Cannabis sativa
ttcatatgaaatagatgcatagaaccattgattgctgattaataacttattaaatgtataaatttcatagtaaccaaacagagaattttgctttaattttcctcatatagaaaggaaaaagcaacaatttttaatcatgtaaagaatttttcataatagagttgtttcataaattgttggcattctgatttgaatgtgtaccaatgtttacagcaaaaccctgctgaaattgacaattccacgtataaagttgctgagaaacaggagggagatgcagctaaagcagatgcgccgcgacatagccaagcttcttgagactggtcaagaagctactgctcgaattcgggtataatctcttgttctgttgtatcttttttctagattggattgtatttgaatggttgatcttattgggatttttcattttaggttgagcatattatcagggaagagaatatgatggcagctcaggagattcttgagctcttctgtgagcttatttctgttcggcttcccattatcgagtcacaaaggttgtatttttaactttttggtttgtgtctttttaacctgtcgatataattttcctttggctattgagattgatttatatggtatttctgatgtagatttctcaggttattttacttattatatacataacatattaatccatccacaaccacctgagcataagctgattatcttggctgaaagagaatcaagacacaagctcatgcgtgcgtacacacacacacacaaaaacactctttttctctcttaaacaagcacagccgaaagcacaaatactaaagattgtaaaagtgtcaaataatgtgcatgaacatagttgggatgaaatttaaaatttatttgtgctgtagcttgtgtgtaggtttagctcaccatcgaaatgaatttttcagctcgtacatttgtgaattgtgtgcatctgatcacttaggaggatctaatgttccattaatttgcattagatagaaggatggtcaaaaggaagattctattgcttgttagacattaaggggttgcaagatcatgaaccgagaacgaaaaagaaaagagagaaaaattatcattgtcctttatgatggatcacatgatgttaatcttgcggtgtattctttataaactaaaatggttttttttttttaattttgtgaaacatgttcaacgacacaatgtttgagttatattgtttttaactgagaagcaccgggatgagaataaaaaaaaatgaactgggtagttatatattttgatttatggtcttatttcttaactatcttagcttgatagctcagaacttaatgcccgttttgtgtagttacaaatgacaatttgtgaccgagaaattttttttctttatccacctgatctagttttcaaatctgctatgattgtgttcagggaatgtcctttagacttgaaagaagccatctctagtgtgatttttgctgcaccaagatgtgctgatctaccagagttgcttcaagttcaaatagcatttgcatcgaaatatgggagggagtttgtagcagctgcaactgagcttatgccagactgtggtgttaaccgccaggtctatatgaaacttttatatgcgtgctatcaatagtgaggattttttatcattttctctgacacttctgattgtgactgcagttaatagaacttctctcggttcgtgctccttcaccagataaaaaacttaagcttctgaaggaaattgctgatgaacatgaagtagattgggatcctgcttcttcggaatctgagtttttcaaaacacatgaagatttattggtaaattatcatattttttactgcacttgatttctctttttatattttcgattgttcacccttctttcctatattgttttctttcagaatggcccggcacagtttgtcagtgggtctaaagttccccttccaatggaaaaacacgaggtatcacagactacttctactcaagcccaccaagaggagcatgattccgatgatgacttagattttcctgaagttcctacggtattagtacggccaggggagaacaattcatcagccccaccggtgatcccaccttcatcaaacgtgtcacgccctggaaacgatcatgacttattaaaaaaatctggatcttatggtgaatcatccgatgaacattatgaacctgatgaagtgttggatgaaagtgtgttgtttaataaagatgaaaaatctcaagcttcagcagctggtggtatggaagaaaagcagtttttgccattcatgtcggctccatcgctatcttctgcatcattttctgcaagacaaactaatagtacaccaccacccattctttccaggacgaaaagcgcaacaaatgtggatctgcaagatgtactggctgctgctcaagctgctgctgattctgctgaacgtgcagcagcagcagcccgctcggctgctagtcttgcacaagtcagaattaacgagctgaccaagaaaaacaacgagcgatgtcccgaaaatagcagtgagaatccattccatacatctagtccaaaccactcagttacagaagagagacctcatttcgatcgcaatgactctataggtgactccgaaggcattacaagccctccaaactatcatcaagttcattcacttgaatctcttaaagcagaattcgatgcttctcttcctctgcccggatcagatcctgcaagtcaccaacctcagagactgccttc

SEQ ID NO: 16676 - DNA, 7716 bp, Cannabis sativa
tataggctgacattatggtcgatagtattgtcgtatgaatgttctagactcagtatcgtgagggaaacgggcattaggattacgatcgggtgtatgggtgccaggttataacccgggttatttgtatgtttatgttatgcttttcttactgactctgtcgactcacagtgctattttaatgtgtaggtaagggcaaggctaaagttgaagagtcgtgagaacgagcaggtaaagattgtacttgtcggggcagttaggcctggagtgtacgatctttgggacatagaggctgttgttgtatagtcgcttagcgacaaacttttgtttatgtgtgtagcaaacttttaaaaagtattttgtaaatgggatcccaggattgtatatatgtattactttaagtttattaattaaataagcaaattttaattaatcacgtttttcattaatctcgttgattagaaacgagcagcacagtacgtttaaaatcacgctaacacgcctatgctagttagggtgttacaatctaaatctactaaagtgggagctctaattatatgcaagggagtctcaccgctaccataagtacttgctcccaaagcaccctgagttgggacagtgtccttgaagcagatagtgattgcttcaacatcactcaagctctctgggaattgtctcctccaattagcaagccactattcatcgaccttcacaacaattagggcatcctcaacagttgtgaccgtgatggcctcttttacctcttctggatctccttcgagagactcataaacaatttcattcactgagatgtggtccacttcttggtttggggcaatgaggcacacttttttaagatttttagtggtcacgagctagcccacttttaagtccttgggtgatagggacttataaaaattaaacttctcctcaactctagattcagggatgattgaggaagacaatctattagacttaagaggcgtatcagattacaaaaactggaaggagaataagatttaaagtttagagaaagaaggaacacttacttgctatattaagatctaacttgagtgtgggaactctcttcagtgggaagccaaaagtgtagaagtagtaatcttagaagtcctgcgtgcactttgtagaacttgatgaatagcaaacactcttagaatggtgctccaatatataagaacccaccttcactttatggcctctcatgagttgagatttgatcttgtagaaatacaagatctccttcgatgtcagtgtcgatttcttgtgctgagtacaaaggatgtaccatcttgaaaacaaacggttcaccttgggaataaatttgaaaggtgccacgtcggccaaggtgtagagagtggcaaagtaacaccttaatggcagatgtggacccatttctacatgagcccagctccaaatgctgaagcccccatccacgcacttactaggcttctccccatgaacataaattctattctagaaccatcctagaatgctttgaagcccctgttgggtttcatacttccttagattattataaattctaaatctatttacatactggtctatctcccatggattgtcattcaggacaaattttggagcacccttgtaatgccctgatacttaggcgtgctatgtgattttttaattattgtgccacctttgctaatcaaagggttttccttgaaaattgtgccacgttaaatttttgatttaaactattaatctttataaacatatatatatttacataaattggaatcttgtgtttaaacttttacaatcataatcaaaatacttttgcagacatgtcgcacagcgactacaaaaatacagcccaagttatcctgagaccgaacactccaggtcacaccgtctcgacatgtacaatcataccccaagctcggaactcactccaattcatcttttttctttcctttacctacacacaaaagtaatatttatgagtcaacacactcagcaagaaaagcatataacatataatataatactgacttgcatctaggcggcgatacacctatccacaaggcttatcagataagtaagaacgttctttactaaggtacgaccactgtaccacttgcattatgtaccaatcttgcacgagtgttggtagaattttcaccgtacctcgagcaccactaaatattctactacatacactctgtactcaactgtactagtgttggtaacacagtattgtagtcattgaacatcatacactataccaatgcacttagtacctctaccgtacaagtgttggtagtatacaagtcacaaatagtatgcatatatcacacatacacatattcatatataaatacgttctatgctagtcttacatcatttccaaattcaagtgtgttggccaaaaattacacgctagatgccatgtctcacatttacataaattgataaataacacgctaaaacctgatctgcggacctaaactctcaactacaagtttcaatatcgataactaacattacgataccctaattattgaggaaacacagaaactaaggctcttaaaatgacatgagctagcaaaatggattttttcgggatcctgcctatgattcagttaacccgttttataggacctgtagaactgattaactggtttacactagaaaacccctaaaatttcaaaacttgcccaattcgtatctaaacttcaccaaacattccagactttctgtaacaaaatccaacaacagaattaaagttctaaaagcaacatacaaacatagaatccaaatccactatttatgagttaagtttgagttctcaaattcaaaatttctcattcttctctcaaaccaacataactatcaataaacgtcctaattctattcaaaataacataagaaatcatactagaaccaagcctaccctaaacagccacttattctaaaaaatgcataatcaaaccaaacttaatgattaaacaacataaaggttagagttctagggtttatcttgatgaaattcttccacaaactgttgagaaacactcggaatcaacaagaattactcagtgcagaggacaagatccctaggtccttggttttttattagttccaaaaagagagagaaagtgagagtttctaattattctcgattttcctaattgattaattccaataattcaaaaaattagactggattaaaataaaatggtcacctaccaaccaaggacaaagccacctaatcctctaacgcaaaatacccaaaacgccctttgacttctaaattaagcaattataagcctaggggtaaaatggtccaaatacttcctttcccttatttcatcccaatcctaacatacaacatttctttgggagccatccctattatacattgataaatattattgtaggaaaattatatcaaaggtaagtatttattccatgaaccctcaaagtgcatgacacaggctcgtaataagtcttctagtatctgtattgttctttctgattacccattagtctgagggtaaaaagttgtactgaacttcaacttcgtacccatagctctctgcttacttacctagaattttgatgtaaacattggatccctatttgaaacaaaggattttagagctccatggagacgaactatctccttcacatatagctctgcatattgatccaccgtataagttatttttaccggtagaaaatgtgctgacttcatgaaacggtccactatgacccatactgagtcatacattcctaaaattctaggcaaaccaaccacatagtccattgtaatatcttcccacttccactaaggaagtgctaatggttgaagtatctctatcgacctctggtgttctactttgatttgttgacatgttaaacatttagacacgtatcccactacatatcttttcattccacgccatcaataatagggtttcaagtcctgatacattttggtggttccttggtgcaacgaataaggtgtattatgagcttaatcatgtatcccctttttgagctcagcgctatttgggacacaaacccgagctttataaagtagcattccattattcgtgattaaaaagtccttaggctgaccgaccaatacctcatcttgaattttaactagctcagtatcttccaattgtgtctttcgaatcctttccaacaaatctatcgaaagtgttaggttatgtaacttcccaaccacaaattcaatttcggccttaaccatttctgaggctaactaaggagctatcattagagtactaaagacctgcttaagaccttttctgctcaaagtatttgccactacattggctttcttgagatgatataaaatctcatagtcataatccttgactaattctagccactgtctctgcctcatattcaaatctttagagtgaagaaatacttgacgctcttgtggtctgtgtagatctcaatttttccccatatagataattctgccatatctatagagcaaacacacatcaacaagctctaaatcatgtgttgggtaacgtcgttcatataaccctgtcggcttgcatcaaagcacatccaacaccctgtcttaatgaatcgcagtaaacaaaaaacttttcttagtctgatggcaaagctaacaccagtgatgtgatcagtcgctgctccaattgttgaaaactcgtttcacacttgtcagactctataaacaattggttcttcttagtcaactccgtcagtggcattgaaatcttagagaaacctttgaaaaaaagtcgataataccctgcgaaatcgagaaaactttgtacttcagtaagtgtactcggcgtcagccaatttttaactgacttgatctttcccagatcaaccataattccatcttttccgacaatatgccctaggaaggacacctccgacaacaagaattcacactttttaaactttgcatacaacttgcgatccttgagtcgttgtaagaccatttcgagatgttgctcatgctcttcttctgtctgagagtacacaaggatgtcatcgataaactataacacagttatcgaggaaatccatgaatactctattcatgagatccataaagaccactgaagcatttgtcaatccgaacaacatcacaaagaactcgtaaagaccataccttgtctgaaatgcagtctttggaatatcttcctctcaaattctcaacagatgataactggagtgcaagtcaatcttagatcatacagtcttaccctagagttgatcgaacaaatcatcaatcctgggtaatggatatttattcttaatcatcagcttgtttaattcttggtaatcaattcacattcagagggatccatcctatttctttcacaaataaaactggagcgccccagggcgatacactaggtcgggtaaaccctaagtccaacatcccttgaagttgtatttttagctccttaaaggcaatcctatatggtacctttgaaacaggttttgccgcaggtgccaaataaattacaaaattctccctgtggaagcaatcccagtaactccttgagaaaaacatcaagaaattccctcacaactctgatatccttaggcccaaatgttttgggcttgctggagtcaattacgactgcaaaaaatcctacacatccattgtgtaatacatctttagcctttaaaattgaaataattaggatctaagaaccttgaacagatccaacataaacaaaaggatctttgccctccagttgaaaagaaaccattttcttttatagtcaatgtttgtggaatacttggacagaaaatccatcgaaagtataatatccaactccattagttccaactatactatgtcaatactcaactccctattttcaatcctaattggcgtagacctaatccaccttctggagataacaaactctccgctacgcagtacggttacaaaccctctttcaatgaaatcataaggcttagccaattgattaattacatttgattccacatataaatgtgcagccccagagtcaaacaatacagtttaataggagttgttgacaagaagttgacctgtcaccacagatggactggctgcagcatcaacttaaatgatggcaaacacctaagtaagtacgggctttacttcttgcttctattcttctttcttcgtctaagggtaatctttcttaaaatgcccaaccatgccacactgaaagcatgttttttgatcgcactgtccgagatggtgtttcttacaatgtgggcactcaaggtaagagtaaccctggtctccacctctcccttggttcccttggaaccttttgttctgtctcgaacaaccagatgtcaagaaagtccttctcttctagtcagcagtggaatcaccaccatccctaccatatccaaatgtaggaaaagcggtggtccaaccaacattttgagtctcttagggatcctgaataaattttactgctccctcagttcacagagccttctcaaccatctaagcataagtcattgtgtcacatgtagtaattaccagatcatgtttaatcttggcatttaaacctaccagatatttttctttcttactgaagtctgtgggtactatacctgaagccaacttggctaaacggttgagcttctttgtatattccgtttctgacatgccttctcgctaaaccaaatcaatgaattctttccacttagaattgaagactgcctcgttataatacttgacaccgaatatttctcgaaactcttcccaagtcatggtggtgacatctcgaatgagggataccaactcacaccacacaagagcatcctcctagatttgaaacatagcgcaagtcacccgatcattcctggtgacacccatgaaattcaagattctctctataacagtgagccactactcgtccttcataacattcggttctcccataaaaactagaggcgcctgcttgcaaaatctctcatacaatgtctccatacggttcccaataacaggtagttctgctagcaccgttggaaccatatcgaccggtgcttgctgcggaggcaccacaagaggaccctgctatttcaacctctgaatatcttcgtcttcttgaagaattcaagcttgcatctctacaaaactttgctcccaattcgaaggagcttggggtagattctcatgtctaccaccttgaaaccttccacagcccttgtcacatccacaaggatttaggggattttgacctccctgaccgcctccaatctcgaccatattacccgactcctcgtattttgctagacgtccatttaataggaattagcttgggaacccataagtcaggtaggttagacaatgatcacataaactctatgaaccacactttatggattttaaggtaatgcatttaaataattataaactattatgctccctatcatgcttttcaaatcacataaattactaaacatgtaaacacttactcaaccgttagtcgagcttttctctgatgatgattatacatgtcttgacaatcttcgacagacaaacctcgtggctatgatactaaaattttaatgccgtaatacttaggtgttgttgacttcacttttagccaaccataatgagtcttatttagtaagcgataagtaatttatagcaattgatatatagtaaagcaatgtaaagacacaaga

SEQ ID NO: 16677 - DNA, 4444 bp, Cannabis sativa
acaccgttcacaaaccgaggatgggataattttcctagatgctaggcttttgagggtagggagggttgagttggtggctcggaaggcgaagtgttttaccttgggggggatttttaggtgccataagtttttccaccaaggcgaaggggaggagggtgagggaatgtcaggaggcgtaaaagaggagaaactgaggtggtaaccagatttgactgaatagatgccagactttgttaattcccaaatcaactcatcattcgatggctggagtggaagagggatagagaggatcgcatcaatgacatgggaagggtaatatctctctaacagggtaatgttccaggtcatggttggggtaataaaagcggcaaccgtaggaggagctgtatcaaaaggggtaaactgtctgaatcccggaatccagtgagttcctgtaatggaagtactctgcccgtttccgatcttagaaataagtcctttctgcagcaactcttttccccaacaaatactacgccagacaaaagaaggcgagtgtcctaacgcactattaaggaaagaggagtttgggtaatatctggccgccagaattttagagactaatgagtttggttgtttgaagatgcgccaagcttgcttagcaaggagagcctgattgaagtgaaccagacagtggaaacccaatctgccatcctttttggacttacacagtttttgccaactttgccagtgaattttaggccgattgttgtacaaataacattttttagcgtattgcaaaaaattatgttaatcgcttagtacgttcgaattttttctttctctaactgaaatgcatgactgttcttacttgtatttttttttataaaaaatccgtttattaattattttctcacttaattagtcataggatttttttttattaaaaacatagaattacagtataacataagattatattgtaggaaataaaattaaataatgtttatagctttcgacttaacttgaaaattcagttggaaagagaataatgatctattagtggaagtaatcattttggtacgattcctatgtcgattgaggatctggtacgtacgcatctccgaactcatcatgtgtctccatcctaggctgattgttgcttgtttctccaccttgagaaccagtgttctaattattgcggttcgggcacctactacgatagtcatgggttgaggagcgacacatgcgacaatagtttcttaggacatgttctccattcaatcattctttagcatttctcgtgccttttgttctgacaagttcagggtgtcttaaaatgttagggttctcacgatacctgccaggttgtcgggtgtttccttttaggttggaggtaaactccaagtcctctttgaaatgtgtaaaatatgttgttagtcttgcaatgtcttcactggcttggtaatatgagctttaatgttttgctgcatagaaattcatagtgcccatttgtaagtttagagactcggaccttgctagctcataaaggctttcttgttgtgtttctgattggataagttgtaggtgtacacctaccttggcaagcttgctctttctcttcttgagtagtgtatttgggatccttctaatgtttagtattttcagagttgcacatatgtatctacacgagattccctgactctcaaacatcatacaattgcattgtagggttgtttaagcttcagaataataaactttatattttttttttctacaaattggaattatttacccaaattttaatgataatgacgtgtcaagagtaacaacacgtggcatgaaaataccgggactgaattaataaagaatatgtaaagtcatgaccagggtgaccgttaatcatgatgggtggtcataaccgttggaaaggatgtttgacggtcacctttacccctagcttgagcaaggtgggtgcctttaaggaagaaaagtgatggactaacactttcataagtgggataaacaatcatcacacacccacaggtcaaattagtctagggggtagataacactacccccaccatagacataatgacattctcaaaggtagatgagtacatcctcatgacactatgactacttacaacgtctaagaggtctcgggggattatcccaagatgacaattaacacccttctcatgtcaggtctcaggggtgtcacccccagctattatcttctatcctcgaaggtggttaacgaccatgccacacccttgggagaccctcatcgtcagtggctagttcaaatattaaaattccacaagaaattcaaggacagttgccaacccacaaaaatagcatgatattatcacaaaaatcaaacttcaaccacctccaaaaaccaaggagacaattgagatagcttcgcgttggtcacgtctcctgaagcgagaaacactaaccttttcccttatataaggcgtcacccatgacctgggaaagggatccgcaattttgagcacttacagaaaaaaacactctttcattctttacattcaagagcctgttcttgacttttgcaactctatttaataaaaaacaaggggagtaggctattacaaatatttggggccgaacctctttaaattctggtgtctttctttacatttattgtgaattttggtatcaatactcacattcattgttatgattttgatttaactctcatttattacgactccgcgttggttggctaaaaatttagtcaatattttggtgctttcattgagagctttaaccaaaattttgaagtttttactagaaaaaatggtgttgaccaaaagatctcaagaacaaccagatgaggagatggataatgcccagcaagttccatcaacgagaaatcttgccagaagtaatggagagagacccccgcgtcctggtaatggtggtgcaacaaccactaacgatactgcccaaactactgctagtcgtgggaccactggccaaactatcggtgttgggcagacaacggctgggcgtaccaccaatgcaactactactggaggcggcgctactaacggtgcactagaagaggcaataccaaaaactttgtcccacctaattacgacatggctagactcaaacaggtcaaggccctagcatctttagtccacgggatgaaccccatgtggatatcgaagaaattgacccagagatagatcaactatgaaatgcgatagggcgaatgtaaggttagttccaaactgtacaccaagagcaaactcaaatttgagcgaccctaattgaaagtctaactaaccaaaggagagagttccaattttggttggaagatcatgctcgagaattgaggaggcgccaagacgatcaagatcgtcgcactcaagaagctaccgaattaatacgaagctatttcaaccaaaacactcaagggttgggtactgacgcccaaaaccaacaaatacctcaagaccaccgaacctaaccacaggaagtccataccccaagaaacaaacgggaaagggtggtctacgggcctgaagaacgcccaagtaactaagagaggaataggagtcacccctctaatagggttccccacaacaacaattaaccgctccctacggattaacaagtcctacccggtcactatatgggacgagatgactcccataatgttcgtctaagacagagaggtaggggaaacactaaaaataacaatggtgaccgtggtagaaatggtggaaggacagcccaacaaagggagtggcagccccgcgaccaaccacgagaggacaatgatcacccaagaaacattaggcctagggggaaaagagaaggccccgaggtcaatagtgattatcgtcctaactactcctaccgtacaatatttcatagggatccatccttattgtactttaataaatattattgtaggaaaattctatcaatggcaagtatttgctccatgaaccctcaaagtccatgacataagctcgcaataagtcttccagtatttgtattgttcactctgattatccgtcagtctgaggggtgaaaagctgtactaaacatcaacttcgtacccatagctctttgaagacttatccaaaacttcaatgtaaactttggattcctatccaaaataatagatttttgagctccatgaagacgaactatctccttgaaatacaactttacatactgatccactgtatataagttgtttttactaacaaaaaatatgctaacttcgtgaaacggtccactatgatccatactgagttatacattctcgtggttttgggcaaaccaaccatgaagtccattgtaatatcatcccacttccattcaggaactgctagtggttgtactaactgttggattttatgccctaaataaaactccaattcaatgtaatccaatttattcaatatcaataaagaaa

SEQ ID NO: 16678 - DNA, 7186 bp, Cannabis sativa
ctacaaaatctaatgtggatgaagattaaatatgatgtaattatcttaaccatataactaaatatgatgtgatcctattttgaaatatcctaattaaaattagtaagacaagacatcataatattgaatttaagtgagtaaattgagaagcatcactatcattattattattacattagtatttagtaggtacacatatgtgccttcaaatttatttttcattacacaataattgttttggccaatttcttagccattttacttgcttcattcctatcagcttgatttccagcaaacttcttcctaaacaactccacatcttcatctttctatacaacaaatcacaagataatacatgaatcagtcaagagaaatttattacaaataatggttttatttaagaagtaatataaataatttacataccaattccttaaataaaggttctggtgtcccaattttatggccagcaggtacaagctcccaaggttttccaaacctttcaacaaaatctccatcttcattgctaagtgaaagttgattttcatgggagataccaagctgctttagtaccttaacaaaagagtgtcaataaaaagaagagtaatttgttagaatattcatatgggcagtgtcattattagcatataagagtaactatataatcggtattgcatgatattctatttctatcattaggccataatatgatagacataatgtgctaacacgtttgggacttatggacacgttctaaaatgtcttttggttagtccaatggtcaagaaaattaattctttcaaattgagcatgtagacccaattggcccaaggttgtgcccttttattggtgaccaagaggtatgtgtgtggctaagatgtgtgcaaaagtgtaaaagagttgcgttcatcgaactctgttagagagtcccacattgttaatgtgtggaaagataatagaacatataagattaatgattactcctctcattatcaattggttttgagataaaaccacattcaccctatcccaaattctaacaaaccccttacatttttttcttatgtttgtgtgggtggatgacactgaagaacaaagtgctctaaggattcatagccattgttacaaggtaacatagtgtttattattattattatttgatccttaaataagatgattaaatagagaataaaccgagtttaacaacatttgaattggtaatgatgcaatacctaccttgagtgagaaagaaggcatgaatggttgtaacaagcatgatagaagatagactagaccaactgaagttctcataacaatgttacaggaatctttgtcattcttgtaaagcttccagaattggctctcctataaagtattatgtcatatattataatacatttagaacaagttaaagtacagctgattactatgcaagcttaaattgtgatcttacttgtaggtatgcattgccttcactagagatgctcattccaattttcagtgcttgcttcagtttgacctgaatcaaataacaagtgtataaggtaaaagttgttgagaagaaaactaattgttcttatttgattgttcacataattaccttttccattgcttcaatgtattggtccacaagcttactaatcttttctgataatgtttgtgttaaggaatgggattcaactcctggtgaatccgaaatgatggatccatatcctgttcctgtagcagaacataacacggaatgaaaatattagaatattttatatggactgagataattaaggtatatctatatgcatggtataatgtttattatgtaattaaaaccacatgggaagatgtgtttaattaatgtcatttgaagcacatcttagcattctaataattatagattggcccattacgatatagtccaccgccaatagtatttgagcccaatacatccccactttacaccttagagtctgtttggtacgcataattggattggactagattaaataatttcactagtctagtgtttggctatgctggtgaatagatgattgtgaggataaggtggtaaggttttgagagagtgttgcttaccataactctttctttcactttctattatggagattcaattctcaacattggatgtgtgttctatactaaactaattccctaaataaaatatttcaatcttgaataatttatgagcatgattttgtgttgattgttgttaataataacatatcacattcattgtttattaaaaactaacaagatattcatccaaagagatcagaaacttggctaacttactgaactaaccttgaggttttgcaatgaagctcaaaactcggttaatgaaattcccaagattattaagcaactcagtatttaattttgcttgcaaatctacccatgtaaacattgtatctgagacctaaaacaaaacaaacaatgactttagaaattgggtcaaaacaattatgtgacattagtaatgctgaagtccaacacaacatacttctggtctgttagttaacaagtagtatcgccacacttctgatgggatatttgtatcttttgcatcgttaccgaaaactcctactcctttactcttggagaacttacctgcaccaagaaaatttaaaactactatatagtaacaaagtaattatgaaacaaaaccataaagcttaacttgtacctgtttcatagtttagatattcagtcacactaatgttcttcatcagtgtccagttttctcctgttccaataagtgtagatggaaacataacctgaaaaaagtgtaaaaggtaaaccaaacatgaataattgtaaattatcacagttgcagaccccatatgtactagagggatttatgaggcatatggtgttggtttcttagttgagagcctatatatttagtctcttagttccacttgctcattaaaacggctcactttttagccgttttaactaacttgggttttgtaatgagctgcacaactgtttgaaagtgcaggctcgggttagagagtttgagaggaaaaacacttgagagttatactagagtaacgacaacaaatgattgagttcagtagttccccaggtaaaattatcgactctagacatatagtaatatggaaaagacaaaattgtttcaagtagtaacaaaactatctagaaacgctccttgtttgaaagagagaaggatgggttattcacaattttgaggtcgtcttatatttatctatattatatcaaatagatggacaatcaaatctatatctcgattcgatagaaagcctaaaatggtgaatagggtcccaataatgtgagatattccatctaatctaactttgtttctgagtgttctgagtattggatcttgagctagaaatctgtttagatttcctaagagttttagatttggcaacaccttaatattattattagaatgtatatgaaaaactcttactgtgtgaaaaggcacattgtcttttcccatgaactgatacaactcaacattttcagggttcttccaccacagctcccaatcagaagtgtaacatgaagtgatagagacataaccgataggcgcatcaaaccaaacatagaacacctaaacaaaaaagaacataagaaaagaaaagaaaacaccagtacatagaatttagtacaatactaaaccttatccttaaacttttcaagtggaacaggaacaccccacttaagatctcttgttatacaccgcgatttaagtccttctttcaaccatgcatatgtagcttgaatggcattctggctccaacaccctgcaactgacatgacattgatgtattcttccaatttctccttcaacaatgggagttctagaaataagtgttcggtgtcccgaacatgtggagttttgttgcatacctgttgttcatttagctgaattttcaccaagacaaaaacccaaaagactcagaattgtaactcaggagaaaaatacatactttacacttgggatcccttagttcagttggattcaatagctttccacacttctcacattgatcaccgcgagcagaatcatagttacaatccagtagtggacatgtaccttcaacaagccgatcagccaagaaccggttgcaattttcgcagaaaagctgaatagtcattccagtttagagaaataaaaagaagacaagtgatgcatagatagtaaaagatgaatgtttgaacacaaaaaacaaatgacatacttgctgcattgtgttatcagaaagccaattgttctcaatcagtttggtgaaaatttcttggcatattttggtttgttgaggcgttgatgttcgtccaaattcatcaaaacttatgttgaaccaatcatagacctctttatgaattgcatgatatctattaacaaagtaaagaagtacaacaaaatcaagagtaagaaaaacagagaaaagaaagatggaaaaagataacaagatcagcttatataccaaattacaggctcatagttttactcaataaccaaagagaaacatcccttaataaaaattaataccaaaatgttaatggtataaaaaattcaccttaatatttgatagagggacagtatgttaggaaactttcggtattaagtagtggtgtttacgtattggtttagtgtagatttttaattttttcaaaccaaattagtattatatttttaaaaaattcaaaaccaaactaaataaattaaatgatcaaactaaatcaatctactgaagaacggattaatttggtttaaaatcatgatttatatttcgtagttgttcgaacaaaccacgaaataaatttatgttacataaaataacaaaatatttttaaaaataatattaaatcaataacaatattttacgtaaagttcaaaatatcaatatttcatccaaaatatgtattattattaatattaagtaattatacgaattggttgaagggtcttggacaacggcccggccaccctaggccctgactgatcgttttgtttgaccagagacctatgtataactttccaatttatgatgtcaagaaacagctacaaatttctctaaaataaaatcttaattaaaatatataataattaggaaccaaatgatttttgttttatttcttttcttctccaaaaaaagttgtgaggttgaccagcttacttgtcacaaatctgttgaggagtagaattctcctcaatggcttttgtctcagtggccgtaccatactcatcagtcccacatatgtaaacaacgttgtacccacgaagacgacagtatctagcaaaaacatcaccactcaaaacacctgatccattcacaaattaaaatcaaaacccatttcataattaatctactaaataaacataatctcaattcaacaataacaattatacatacatccaatgatgttgccgaggtgaggaacgttgttgacataaggcaaggcactagtgattagtacgttcctcttacctcgtattggtacttttggactacttttcactactcttcttggatcatcttcttcttccatctcttcttattactttgttttaacaataaaagttagttaataataataatactaatatactatatgtaatgttatgtagtagttgtgcttggtttttacgcgccgtgacaatgaatttaagcatatgcacctgaaaatggcttatttatgtctcaaaaatatgcttgttttctttacaagttggatatattgatcaaataatgaatataattggtttgagattttagtgagtactctttgagaaaatggtgtgtgtttatattgtatatgatgtttgggtcattgggggggttagtcaacagcaagagccccaaaagtccaaaagtctttacacgtgtaatctttcttggacggcaatgcgtggtgagcaaggtcattttttaattgggtttgttggataaagacttgtacgtgtaacatttctctaaatgggactttagtctcttaagtctagcaaagctatgaagaagaaaatatactaaattattatataatagttttttcaaaaacataattataaagggtcatttgatttaggcacttctccaaaaaaaggtatgatattagacgaaacaactttgcctattttgtctacgtggaacttgggttaatattataacactagattataagatctttcttactgaaaaatactctaggctttgcactagtggggttcttttttatgtgaagtgggtactattttgttttagataatatggtatttctttgactttgttgtatttgacgttgtcattgtatttctcgcaagagaactttattaattagtacaagacaaagttagactccacaaaattttagacattgcatgatttgcatctagttgcaccaaatttgtaaataaatttgcgtcatttgtatagagctttaggtttgaagatgattgagcaaaagttaagaaagctaaaggcatggtagatgaaagccactaagcaagcccggccctggcataggcgggctaggtctgtgcttagggttcatctagcccagaggcccaaaaaaaatttccctttaaaaattatacaatttttatactgattttgaaaaatatcacatttttttctaaataagagcccaaaataattttttctatggcccactaaatttcagggccggccctgccgctgagctagcctcagtgcagtggctagcctaaattattagaaatatgttatatcactatgctacacttaaacaaaaaaaaaaaatataggagatgagatatttttaaaatgataaatgaattttttttcttaaactataacaataataataaaagaagaaaaaacactagattataaaattagcctaaaaagaggtatagtagataagatattttaaaattttatttttgaaaaataaaaatgtgttttataaccactttttttttttaattttaaaaacataaaacaaaagtgtctagagtcgggtcggggttggggtttgggtatcaatgtccaagttggggtagcagttcaaaatattgattaagaaaaaaaaagttgttcgaaaaaaattttaaagtaactttttttgttttcaaaattgattctcaattaaaaaattaaaaagtaaaaataagtttatagaacatgtttttagaaaa

SEQ ID NO: 16679 - DNA, 3700 bp, Cannabis sativa
taaatgtcaatttcgaaaaaaacgggtattttcacaccctttagcttccctttttataagtgggagtgaaaaaacagcctctaaaggccaagattgtagtagtgtactatactaaaaaaatttaaaaaaaagttaaataagcaaaaagttaaagaaaaaaataggaaaaaaagatagaaagaaaatgtagaaaagactcacaaaagtattaataattggtccaaatatgaaaaaaaaaaaaaatcacaaacacacaaaaattgctaatataaccttatccagcttgagaaaatacaaaaaagtaaagacaataggaaatctttacctatgcggtgtgcaacaagtaaaaaaaattacaaaattacgtataattagacaaaaagttaaattttaataaatatgtacatattaataaagaaaatgttaagggatgtgctaaataccataaataggagcatatagttattggtacatttcaatatcgagtctcacaaattttaatctattaaataatataaaaaactgctaaccaattattaaatgttatattcttatagtattatattaggcatcttaaggtgtcaaataataatattttattaataataataataaataaataaataagcaaaacaaagttgtacaaaagattattcattaaaaaaaatcatttataaaaaacaaaaagaaaaaaaatatgatcataaaaaaaaacaaccacataaatctatttatatatgacagatttaacagaacatttattatgataaaaaatttatattattataaatgtacaattttacagaatatatagtgtaattcggagcaacttaaatcacaactcaattcagacaacaatccacatcgcaacccacacagcaactgagatatcaaccaatgaaacaacctaaatcgtaaaaataaaaaaaaaaaaacaaaaacaaaaacaaaaaatcacaaaaatagaaagaaaaaaaagttaaaatttggtatataaggtggttccccataaagtatttacttttatgctacttttattattttattagtatatttaattacagtataattatgaactattatattctatttttattgtttatattcaaaaattaatgacaaagttattattttttttttatatacttagtaataaaaatattaaattttgcactaatttttgcaattatgcattgaagtacaatgctaaaaattgatgcataatgtcacaaaatatttttatttgtcaaatctaggacaattcttacatctcctattggaaatgctcttaaacttatgagtaactgataaaaaaataaaattataaacgatgctaataaagatatgtacgtattaataatgaaaatattaagttttaaacgatgttaataaagatatgtacatattaataatgagatttacaacttttatgttgagctccaaatctagctccgcctttaaagtcgtagaaatgtacaattaagttttgccttgtaaaaccgagcttgcgggcttccactattttctactaaaatgtgctaacatccctccaaataactctaaatgcatgattagtttttaaaataacctaataaattataattacactaattaataatttaaagaatcaatttaagaatattaatacataaattggctatatttataagataaaatattgacttatcaaattcccctacacttgactcttggtcgtcctcgagtaagttaatgataaaatgaatgatgcttaaataaatcggtctttatgaagaaaaaaaatagtttcaaaaattatacatccacttataattttaagaaaatttaaactcttcaatcattaaaattttaactcaagataattacttctcaaactcaacttttgtgtgtgttgttcaatcaactcatcatattactaacattcaaattaattcatgcatgccaaaaattaatttttatctcaaaataaatttgtatttcaatgaaaattcactctgtaagaccatgcataaggcatcaaagtaaacacacattaaacacgagcaatcattgtcaatagaatttcattcaaactatgatcactagaaaaactaatataaactaaaaaaaacgataaaaaaataaataaataactaaggaaaaaaatctggatacacacgacaattaatctctctcccacacttaatataagcattgtcctcaaggctcaatcaaatataatcaatacaaaataaaaagaaaatggtatagaaaaactctcgtaatttactttatttaacgtcgttagctcgactttgataatacctttagtgttgatgctggattattagatttaaatacactaaaatgtatttaatcaccatcaaattccatcatttatgttcttgacttaacatccaatattatactcgccgtactcataaatggtctacccaacaacaccagtgtagtgcatgaaatagagtcatctttcatgtctaggatataaaaattaactgggaaaactaagtttttaccttaacgagaacatccttcactactccacgaggatagacattagattgattggctaattgaatgactattcctgtttcttttagtggccaaagattcaacgaagcataaatagaatatagcatgagatttattgaagctcccaaatccaacatacatcgatcaatcaatttatcccccataatacaagggatcataaaacttcctagatcttcacatttaggaggaagttttttttttttttggagaatcacagacacattctcccccacacttactttttcttcctctttcaacttttgcttactcgtacataattctcttaaaaattttgcatagcgaggtacttgtctaatagaatcaagtaatgacagatttacctcaactttgcaaaatgtctcaaggatttctttgtcaacttcatctttctttgtcttcctcaatctactagggaatgaaggaacaagaacataagtaggtagaggtggtttaggcattggtgcatccttgggaggttgaatctcatcctcttgtggtgatggtgcaagaggagattggatggatgaggaaggtggagttgatggtgcataagttgtgccacttctcaacgttatggcgttagcatgagctcttggtttttcaataggtcgagaaggcaatcttttagaaagtttggcttctatcttggccatagatgtagcgatttgcccatagaatttgccaaactcttcaacgtggcttcagttgtttgtggaaaccgtagtgcattcgtggccaagggagtaatcaagtcttgaatagagggcttggagttttatggtggtgcttgttatgcttgaggtctttgttgatagttaaacccaggtggtctagttggtgcaacttgttgttggtttccataactaaaatttggatgatcacgtcattcctcattaaatgtgttcaaaccaggattatactgctgccttggttgacctgggaaactttcaatagcattaacatcttctgttggcccttcaaatagagtaggacaagtatcaacagtatgccccacaacctgacatatcccacaaggtcgcgtcggttggcctaaaacaagttattgtactatagacgttaagtgatctagatgcaacccaaattggttatcaataggagtgctcactgttggaaatattttactagg

SEQ ID NO: 16680 - DNA, 4844 bp, Cannabis sativa
ttatgtgggtgataagtttttcgtttgttaatcattgtaatgattctttgtttaacgactggatcattcttgctcttaagagctgggaagttgggttttccttttcttcttctttattctttcggtctttttgtttgttatagagatgtgatttcttttcttttttctttttatctgatagaggtttgcatattcttgtaaagtgcataaatatttgggcttcactttatttgtctggcattgagagttggagtggctgtgcttcttttatatctgttggtttattggtgtaagttttttctgagacttgtttatttattgcagactagacataaggtggcagaaacttctcagtttatgcaaatctatcgaagtagggaagtcggccaatcatatataacttctatttggacaactttactagcaatggttcatgcactctggctaatgattaagattagacctgaagtggtactacttctaatcactcttcgaaatttctcaacaattttcagtactgcaattctaacttaaaccaatcactaataacgttttggtaatcatagatcctctgcaatggtcccgggacttgcattcctctttgcgtaatcgcctacttattcaaggtctagagatactctttttcacctttttctttctttattatacacagtaaaccttgaaattcacctattgagttgatattaaagtttctttttatttaaaaactcttgtgtgcagattattgggattagatggtcatctattttttatgttgaaagtatagcaagagtgcaaaggctatctcttagtggcttgattctttacaagttaaacatttctgatcagttctttgtgcaatggccacagttgcaaaaaaaataccctcgagctcactatgttggatgtctaatgtagtgtgatcaaaattttgagtttgctaagctactcaaaggttttcaagttctttctctcacataaagatttttggctcccattgagaagcatttatttctcgcatgaagtaaatacaaatagactatgacatgtatgtacgtacaacagaaattaacaaaagaattatctgtgttttgctaagatatcaaaaggaggaccattatgaaattgattggtgaattagagaaaagggtcttaataactctagtttgttgatagaattgaagcattttttcttgggagagttggctgtctctcgaatacaagccattgtggagagtcggcgatctcttgaacaccagccattttcttactgtaatgttctggtagtttcttcagtaaaacactttttcatcatcttttgtagtttgttcttatattttctgtacaagtctaatggatccaatcatttgtgtcattgaaaaatgtaacagtatcgtttattgtaccacttatttttttttattaatatatatatattttgtcttttttctttcttgaaaaattaaaaatgaaaaactactctcctcacctagagagacttgaagattagatcttgtgggaacaaatcacatgctttaattgtttaagctacctttggttacttggttacagttttgcatattttagtaacattttttaaagtaccaaggaatgaagcaagattggtaagtgagaagcaagttgcaataatgctcccattcagttttgtctttcctcctttttcttaatacaatagtattgctaatttgcttctgtatttatttgtttgaccagggtgattttcttcatcagcttactgagctggtgaaaggagaaagaaattttggtggatgatatgttcggcacacttggtgcccaacagaagaaaaataacaagaaaattctaggtacgaaccgaagctcattcctcactcactattgagctagcttgtgacttgttaaaaaaattgtaacaaaataagattggaaaactattttggggtaaaattgtgtttttttttttgatgcttcaatgtgtatctggtgctgttcattagttgggttaggctggttggaggatctttctccattcaatcccatagttgggttgcatctgccaatttgaaactcacccaaccaaccaaaatttatgttataaacttgtaattaggtagcgtttggtttagaggaaggaaaatataggcatatgaatgagaataagaataagaataaaatagaatctaatttaaaatgtataaaaaaaattgataaaaaaattattatttttttttatcttgcattggaatggttattccttccatttcaaaatgaaatagtcattccacaaaaatgatggaaaaaccattctaatagaataacattccaatactttaaaatgcaaccaaacaaatgaatggaaataaaatggttttatttccatttcatttcattacctctaaccaaacgccacctaaattctttaaatctttaaattcagtacaaagtgattgaaattcagtgcaaatgaggagaggagaagattacttctaggggcacaattggtacgtggtataatattgcttttgtaccagtattattttatgttatattgtatattttttagtattagtataatattacatagaactttagtacaataaattattcattcgttctcaatatataataataatataaaaattctgatgagattgggagtgaagtatatcgggaagaagatcttctctaaacaagacttgcggacaaagctttcattctttaagtggaatgatatagaagacaaaaatataatcatagtcatattaatatttatattctacactgcaaagcaattttatataaacctaaatgagcatactattattgcatgacaaatagaagacaaaactataatgcccattacatttgatttttgttttataaacttattcaaatggaatatcttacatattgatatttttgtatttatgtaaactaataagaaaacaagctagttgattaattcaactattgatctctttcactctctgtggtgaaccattgcttattggattttcattcttggaactgtaactgtcaagatagttctgataagcatatgaaacaaagccccaagtagccaaaaccatagccatagctttgatcccatccatcttttcatggaagaaaaacacagccataaccgggacaataggtaaacccaaaacacttatgacattagagaagagagaagagacttctagtattagacccaccgttccaattaagaaaatttgccatgttatggctatccataataatgtcatgacatatgaaactttcccaagttcaaactcattcatttcttccctcaaagttgaccactcactgcttgcaaaaagtcccacaagaattgcaatggttgccacaagtgattgaaacactatgacatccacgatcactgagaaactctcctttttaagaactttgttcataaaaaattgagctaaggagagaaccaaaccataccctgctgatgcacccacagtgcaaacaaacccagttgcaaacttcccttttgagactttagaagactcttcagaatcaggtttgaaaactagcaaaacagaagagatagtgagaagcactaaggagttaattatgtaaggagtgaacttctgtgagttgagaaagaatgagaagaaagcattgaaagccaattgggatgcacatatgattgaaaaagttgatactggaaggtacataagaccaactgagtaaagataacaatctgctgctatgagtaggccaagaaccaagtaaattgaggtcacaagtaaggtagatggtttttctgattggacagaatgagtaatggtagtattattagtagtgttgtgattggttttgtacttttttgttgggatgaaatagatatagtaaggaagaaaaattggaaagccagctagctgaactagtgtagccatccatttactttttccacctctttcatagtataatctccctaataaagttgctactgcctgcccaaatagaacaaggaatgaataaatcccaattcgaatccaaacagtaacttttctggtttgagggctagttgagtggtgggattcatttgcaaagccatgagaatctccttcattagcttcctcagctggtgaagatacatatactttagttagtaagtacttctttagtaattaattaatatatatatatatatatataaacatatttatgaaatcaattcaattgagtttgtagtacaaaaccttttataaaacaatagtttcatgaaaattggtcacttacctctgatgctgagttgaacttgttgagcttctcccatgtgaaaagatgaacaaatttttaatggttggagctttgagagaaacaagcctcttaattatatttaatcattgctaatggacaccagtggtgttcaacatcttttattgatggcatcgtaggaacctagtacttaattacacaaattataatacagtatgacacttatttacgtaataggcactgtcacagatgtaggttgcattaaatattgtcaacatatcagtgtctcttcattaaatttctaccaattagaatatcttatatgagcatgctagagctggcaaaagatgattatcaccacatctttttgtggtcctatcttaattgactattctatgaatgttaatggtagtggaaaactagcattaacatattaattcatcttccaaaactgataaataatcattcttaaaaattattggtactctcttatgttttaatttttatacacttaactctcttattttttttttgtgacaaaacccccttatgttttaatttttatacacttaatcctcttatctttttttttg

SEQ ID NO: 16681 - DNA, 3201 bp, Cannabis sativa
  modified_base (1263)..(1264): a, c, t, g, unknown or other
tggggcgggtgacacggctgagtcatcgcttccgggagagggaggagaagaagcatcagaggattcgggggaggaagccggagtctcagaggaggaggaggagtcaggggaggatgctggagtctcggaggactttggagaaggagccgagggcgaagatgaagaggatggagccttagccggagcagtggttggggttgttggtgaggattttggagcttgggtactgttaccggagctaggttttggtgaagcggccggcggagaaggtgagggagatgttttgggagatgattttggagtgggcgaggcggtgggactggtggccggtgccttgttttcggctacaactccggctaccgccacgacgacaagagctagggtaataaaaacttggcgtgccattatattaattttattatttttttagaagtgaacaaaataaattaaaaaaaaaggtaatattattaataataatatagagatagagggattcttaattttattttattttttattttattgcagtagtttttctctttaattaaaaaataatatgaaagagaaattaacagtactgcagatagattagatggaagaaattaagaatgaagatgttggagatgaaaattatgggactttataaagttaatttgagtggtcaaaggtaattaagtacgtaggtgttgtacgtgcatgcatgcatggctgagtttggaggttggttaattttttcggttgagacagttgacggtcggtcatgcatgtttgcctcgacgagttttaagggctatcacaagaccctttgttttcttttctaatcaagttaatactaaaattggcaaatttcagtttttttaattttactctattttcttatattatatattaatattaattcaaagacaacccataattataaaactaagtagagtcagttgaggattaaatgaatgagagagaataatttcatgcataaaaaagaatcacaaaatttgattggatggatttattttattttttgatgaaagggtgaggatttattttagattattgtcaaattgtagtagaacttgcattttttttttttgtcaaaattgcaagtttgaaatcttaaaagaatctatgaataaaaatccaaatcaacttaaaacaagtataggctcggcccaaaaattgatcactagctgtaggagcgagcatttaattatatgtttagccgagaaatgctagtttatttttcatttttttattattattatnnttattattattattattttgtgaatatataagaaaatttgtattacaatatattttctattcaaagttccttcagggcgtgtgaattaacacttataagaatcaaatcaattaaataaaatatgaacctagaatagctaaatcaaataataacataaactagaaaataaatgcagaataaactaaataaaatatatagtgataagttttatcgaggtttatcacctttttgtggtgactgcttcctaggaagaactatcttttggttaaactttattcgatcttcaacaatagaggaatacaaaagagaatacagatcgagttaatctagcaagggtgtcttgcacctcgacaatagtactgtcttgagttagagaatttggaattcactactgaggtggtagagcacagcacgattgagtgagagaatccctaagtaactaagttaatcatttgtcctaacaactttatgttattccttgtattcagggcaatatttctttgctatgtgtaatctctctattggtactatgtaccctactctgtaagtgttgtttggctatatatatataactgttagattatttttatcctaagtttcaggtcatttttaaagttgtttttcttttttgttgttacttttaggatgattttacgcttgtttttcttgatttcaggttttcggagttttaaagtttaggtttctggagttttgaagtgtaaaatctgtccaatatcgaagaggcaagacgagttggaaatagaaaaaaaatcttagttgaatttcttgaagctcgcaatcacggtcgagacggtcctaggctaaggcgggctagacccgcgcctagggcccactcattttagtagctcaaataaaaagaatacttataaaaatatacattttttttaaaaaaaaaaaattaaacatgctatttatctttatagtaagggtccatttttttatttatggcccatttcaaaacgggatcggccctactcgcaacgaagagcccttattatctggtcgcaactaattgtcatctcaatgagaataccgtatggttgcggcgagatcattaacggaaacatggatttttgactcgaggttgtcgtcgcaaccacactatctgtggttgcgataaggtgttccgtagggacttaacgacagttttgtaatttggctattttgaattgaacgtaaaactgatttctataagaggatttcaaatttttatggtaattatttagaaatagaaccctaaaaataaaagaagaagacttggaaaatgagtgtggcgatctgatcaagttctccatctagtttctttatattcccttcttatttcttatgttaatttctatttttagtttaaacatatatttgattgttgaagtattatgaattaatttccaatttaggaatataatgaatgttgattgattttattctaatatgttaatatgattttctttttcttctctttggatctttttgatttgttcatatttgtgttaatacatgttttagattgaccatttttaatatgatttatgatcctaatatgaaatatgaaaagtaaatattatgaatgctttaattgaacaaacatagatttgatgtgaaacgagagtattcacatagcttgtgtgacccttagattatttcttaatgtaaattatatattattctatctcagatatgcgatgatatataatttaggaccttaatcatctgaaaagagttagggctatttttataatttttcatcacttaaagaaaaaagattaataaatagcattgacaattaggtaattgaaacaactagatttatatccctaatctcttatctattaccttgaagttttcaattatagggaattgttcttgaagttttctgtcaatttttattatttttctttccaatattatttcgatta

SEQ ID NO: 16682 - DNA, 6538 bp, Cannabis sativa
  modified_base (5213)..(5225): a, c, t, g, unknown or other
  modified_base (5251)..(5252): a, c, t, g, unknown or other
agccattagtccgtgggtgtaaggacacaatggaagcttgaagcggggatgttacaagtaaaattaaaaataggatcatttacttacatttttcaaaaataattatcttaccattaattcttattacttattagtaaatatatatgcttaataattgctagtattgcattatttttttgaataagataatctttagttggttacatttaataattattaatattaaattttttttttgaataagagaaatttttttaatccatcctaatttaaatatgtcagatcacaatattactatacaattgttcaattagaataaactattaaataatctataaataaaatattttttaaattttccaccttaaaaaaaatcctttcatatatattttatttctttttccttacatcattcacagatggagaatcacaaggtgacagtgtagtgtcattatcgtcgcgagattccaaacacaagtacatacagcatattcatctaaattggtacacactcatgaagatgcagtaactgtgtttttaccgtaacatattgcacatgctgcagttctttgatttctcttcttttttttgaaaataagcctatcgatgcattaaaacataagataactaaacttcgcggtcattacaaagtaagttttccggcacataggagatcggaatacagccatatatttggtggataaacgcccactttaacacattatggacaacaaagttacaatatttaacattcataaagttacaactaataaaagaatgtaacttaataaaagaaaaaggggacttagctagtacaaaaaagacatagttctttgaattcttccatcggcctttattggccttatcagctagttaattaccaagttataaaaaaaaaaagaaaatataatagtaaaagtaactcatcatgtttgatattgtattgtggtccctttagttacaccataaataaagtagtagctcatttaattacaaacaatgtctgaaagtgtaactgtacgtattattaccaagttccccgagcacgtggtggagccaccccatatatactttatttatgtatattatcttcatgtacttcatatgtagagatatttcctccacgtttttcataactcatcaatcatacctaatcttcaatctaatataaattgacaaatatttcaaattgtgagctacaatataactttgaaaaaaattacatctcagaaatgagttgataaataagttacaaaatttttaatctatcatctttaatttaatctttcaccactttaataattatgttagaattactttttacaataataaattataagcctttctccataataaattccaacgacaatagataagaggttatttccttacaaagagcattaacaaaaagagtcgcttgataccaacccaatacaccttcccttcgtgatgatctcgagccactactgccgacatcatttctcctttcctaataaccgcattgtagttaagttcagtccacactacaatatataaaagggtattaattagcggggactactgctaataaactcattttccacggctaaaagttattagtggcaggagtccgctgctaataattctttgctaataactggccgctattaatgatgattagcgacaaattttaattttgtcgctaataataattaatacccgccgctaatatattaagtatttaaaaaaataaaaaattattccttaaattttaaaaaataaaactatataaaaattaaataaaattaaacaaattataaatattttaatttaataccaaaataaatatataatattcattattgtaataatatttcaaattaactattatataaaattactatatttaatatttctaatgtcttacttattaacatatttaaattaattaatgcataaaattatcattaacaatatttcggaggaaaaaatcttgattttgtgaagaatcgtgtagctgtcgttgtgaaaaataaaatcgatcatatcccacccttcaaaagttcatctttgccagtcctaaatctaaattcaactatttcttcttccacttattgagagagatacattaattataaggatgagaaagaagaggagcacaaggtatgtaaaaaatatagtttttataattattaaaggtatttgattataaattgaaagtgaattactttatatattattattattttttttttttatatttttgctattattctgtggttgctatatgtgtaggccgttactatgtagatttaacttataatttaagttgctccattaattattatgtagattgctatatgaattttttagaaataaaaaaaaatgctattataaaatttaaaaatgaaaagacaaaaaaaattaaaaataatgaatttataaaattaattaaggtattgttaaactcaatagaaatagaaatatatgtgtgtgtgtgtgcattgcacacagtagatgatccgtaaaaattatcacaaaactatgaacccagatagattaatatccaaaactaaaaatattagaaagaaaaaagaaattgtatcaacaaaaaaaggaactaaaagatagtgaaaataatacgagatttgaagtatttttattttttaaaggaggctctttataaatatattatttaaattaattcgatcccattatactttgtatggccatttgattttgaagtactcatgttacgcacctttctcttggacaaaattatttgttcttgaatagtgagtattacgtaccggttggtagatcggaacatatgtaaaggccacgtggacggctatcatcccaactcgcaacctgtatgattgacaacctaaaaaaaatcttaatgtacgtctgtaacatatttacatgtgggtccctcagtttcattaaattaccaacaacaggacttgttgcctgaactcatcacatctcatcgcatgatgatatttatattttatactatataataatattgtctcttttaactagttgcagcccatgtataatgtttatccaaaaaccacactaattaaattacgttacataatcggcagtcaaaatcaacacacaatttttaatccaatcactattgattagttcagacccgatattatggctttgcccattcactttgttttgatcagttatctggcaaataatacataaattaaataatttaattatgcatgtcacctggaaattaattaactgattgagctgttaagatgattaagtccactaaaacgttcagtggacattagttaattaagggtatgcaccataaaagttactaaattgaataattaatatcaaaataatcttaaactatacacttttgctttattttgatctttggcccacttgggcggctgtagtttatctaccgctgtggaaatttttaatcctttgaattataggcgtttttggaagtctaaatcgtttagcaattaaaattgttcttgtcaattgactttccatatcaatttaagaaaataggatggatgtatagtaattatatgaaaaacaaaaaagtagcattatatacttattgacgaaaacgaatggaataaaattagatttaaaaattaagagccaaaacaatacattttaccatttaggaacctagctaaaccggggacaatcatcaatagtctttattattattattattattattttacgggtcaataattgtggtaaaaatcctaaaagtttaatttgatgcagaaaattttctaatttcgaaaaataacaatagtagtcccaagcttaaaattcttataagtctgttggtacttattttaacagatttattaattgcttcaaaaatattatgcgttgatattaaattgcagcatatattcttaaaaagtttacttggatacaaatatataagtccccaatctcaaaaaaatgtagtaatagccccaagttcaagattctcgttaatttgcaggtgcccaatttaattaatttgtttgttgctcttaaaaatattacgtgttgatattttatttggttcaaatcataattttaatttaaaataaacaaataaataatttttaaaattaattaattaaatgtttttttcttttttcttcttcttcttctcgttcactcctagcccaacctgtccagtccaaatatgctctactataaaactctctaatttctatttgtaagtggggactctaaaaagaaattgtctaagtaaactttgaatcacaagagcacaaagctgaggtcaaagaatcggccaccaaaattcaccacccaccactacttacatctctctttctctaccgcatactccatctatatctctcggtttcttggaaacataagaaaaaaaagtttcatctctctccaagatcaagatcctgatatcccgatcgcacctgttctttttttttttttaatgggatgggacaaagaaggtggatcagatgaagggatggtactagtcggcagtaaacctccaccaccaagaaagatggatcgaaaatcgtaaaagtttctacaattttttattttttatatatgtatatatatatatataaagttctttaagttaataaaagaaaatgaaaaaaaaatattgaagtaataattttttttatgatgtggaccaataaaattttgacacataataattttaagaactataaacaaagcagttaaattgggtatctatggactaacgagaattttgagtttggggttattgctacaatttttcgaaattgggaacttatctgcattaaagtaaattttttagggacttatgctgcaatttaatatcaacacatcatattaatagaaaaatataatttttaaaattaatttttttttatataaaagagagtaaaatttagtattgatcaaaatttatggagtaaaaatattagtttttaacggttaaagtaataaaacctaattgaggggcatgattatgtaactcatatattttagggaaatttttaacgagacgtatattttaaaaggtatgattatgtaactattttattttacactacaaaaaaaaaataaataacttttagtgacaactttttaatcacgacataaaatttttgtgactaaatgtgaattttagtcacaataaaaaattacttgtaactaaaatatatagcatttaaatacaagttgtcactaannnnnnnnnnnnnacaacaagtattgtgactaaaaatanntttagtcacaataaattgtgatttgtgactaatacttttagccacatactttttagtcacaacggaggaatgataatttatgattagtcacaacttttttattttaaatcacaaattttgttatgactaaaagtaagattttttgtagtgttagaaaaaaaaaaaaaaattaacaagtcgtatattttaagaggacaagatggatcatgttgtgttgaaagttcaagtacaaaaatacttattattcttacaagatggatcacaattaattctttatcaaatctcttagtagaatgaaaatatacgaatatagtaataacaatgggaataagaataggaaaggaatggaatagaataaaatttaaaatgtataattctttccattaaaaaatgaaataatcattctaccaaaatagtagattagtccttccattataatgaaattccaatactttaatatacaaccaaataaaaaaaaaaatagaatgaaatttgtttcttttctattccattttattacctccaaccaaactaacaattaatcaaatctcttaaacacattattaatattattataaatatttttaagttttcaaaagaatttccaaaaccatattgtcaaatagctaggaggacttataagtaaacactctcttttttttttttatataatattcttaacattactgtcatttaattaaacttataatagtattaacatataaagcaattgtactatagtatattgtctcttccaatgagggaaaaataggaaaatttaagtattaagttcacttgttgaagtgaatatgcaattttatttattcttattattctcttttagaaagcagatgatcatgaaagtgaaaggaaacaagataaattattatatttaagcaattcaagctgttacaaatcatattaaccataagttaacaagaaaatcactcagtacaaaatgtgcaatattaaatattaatcataaaaagaaatgatcccaagttgtctgagtgagtccaagcttttcactcactttcttatgctctatttcagattatatacctactccaatttatataaatatatatatatatatatcttacctattatataaatgtgtatctaacagaatttgttgtgtcaaatctgttagttttaatagagactttaattaaactgttaaaaagttaagttataactcttcaaaaaatgataacttttcaaatattgcaagtgtctcttctttcgcattgttctcattgctattgtttttccctcattattag

SEQ ID NO: 16683 - DNA, 3656 bp, Cannabis sativa
tttttttttttttttgtagtgaatagaacaaatttttttacttgatacattgatcttcatgtaagaatgtgaagaaaaattcttggttcatgtacacttgaagattcgtgttgaatggtttataatactctacgacatgaaatgaacaagagtttttttttttttgatgaatcagatgaatttcattactccaagtaaatttatacaatctatagcaccctccatctagaggatctaaataatctctaatatttacaaggtttcaaaccatattctatcactattagacacttttttaggccaaatacaagaacttcaactctttataacatttttaacttgtgctatgatcatgtcactatttacaactttattttcccaaaaaattgagtttcgggaacaccacaatgcatacaccagctctgccaatgcagcagacagagttccccttctaaacttgctaatatcgcctttccaagccatctgatcactcctgacagtggtctattgctcatgttccatttcagccacaacttcacttggtttaagcaaacctgtccaaaagttcagttaaaaaataattgctacatcgatcatcttcactgctgcaaaacagacaagctttatcaatttcaggttggtattttgctatcctatccttggtcttgagtcaattaagcatggccatccacatactgaagctatgctttaggtagtttagcctactccatactatattcagccaatgttcttttatctctgcagggataagcctttgatagccctgagtaatcacatatttgttgctaatattctccctctcatctagatcataaagttctttcactttctcctttattgcaacaatctttttccaatactaactatcattacttttggctttacaatcccacaaagactgatcttttatgtatacacaatgtacccatttcaccaacatattatcttcttttttagctacagcgcgcccaaacatacttaaacatagcagcaatattccatccagttacctgttttaagcccaaactacctgctgattattccttgcaaatggtcctccatgctacagcagcaacacctttaagttgatggctgccactccataacaagctcatgcaaatggcctctatttctgaaataattttctttggcagcaccattatttgactccaataagagtgaatagccatcgaaatcgaattgataagtaccactcttcatgcaaaagtcaaatttctagtgctccaagttcaaattttggctaccattttctccacaagcatagaacactctgatgtagagattttctttaattgtgcaataaccactgtaagtattctgaaactcacacatatatttcaagattttagataacatgttatagaaaataactgtttatgttatatgataatttacatgaaaaataataagatcatatatatatgtatttccaacactttttccgatcaactaatgaaaagtgatagaaatctggtcttggtgcttgtgaacacaattgtgacgcaaacttggatagtggagtttagaaaaaatatagcgtgaacacttattagagactcagctaggtctgtttattctttaagtactatacttggtatggtagtatcatgacagtcattgctttagttttgagcattcaagactaatttggcacagttgtattgtggcgaaaaacagttctggttgtgttgtgagaaaaaatagttgtagcataattatagaaaaaattgagataagtgttttggtaaattataaattttaagatgctttgaattattcagattctattataatgataatagtaatgttataatttaatttattataataataaatatataaatttatataaaatatttattttctatatattttaattatatttttccgtaagtataaatttatatgcatctgataaacataatttatagcattttaaattatattatatcacatgtacaaaaaattgaaactcaaataaaaaagatactctatataggttgatgtggtttgttaatattaaaattaaaaatataaaatataaatatatttctttaaaaacaaaacaaaaaaaataagaaatttaaatatttttattttgttataatgtataacaaataagtaaatatatttttagtacaagttattataaccttttaataaaaataattttttttataaaaattaagttgtaccaacattaacttttagctgtaatttttttctataaattttttaatataatatattttaacaatttaacaaacatatttttataatagttttaccaaaaagtaacttttaaatttttcaaaagttatgtcaaaggggcttttactctactttgttcctttgtttaagacttggatatacaaacatcattgtggagtcccactgcttgaatgtaatcaaagctattaacagtattaggaccatcacagatactactgcttattgtaaaatttttaatgatatatcttttattttattgtcctaaatttactaatagagtagttaatactttggctatgttagctgtttctttggatgattgttatttgtggcctggctacctgactgcagtactggcggatgttgtgatcaatgttatttattagtcctcttttttctcttaagatttatctaactagatttactcttaaggatttaatttgactatttttttaagaaaatatatatattacaatttatttatatgtcaaaaatactaaaactacctataaatggtaattaatgataatcaccacccgtgtataaatgtagacattgaaattatatacgtaccgacactcccaactcttcggtgttcccatacccaagtcatcaaatctatcacacgtatatacatggtaatattaacacgattatgatcattgccgacttcttcaaaacaatgtatatgaatagaaataaataattatttaattcatttcatcatttatatattatatatgtaagctgagattcatgagccgtatacttgaaagaggagatatatacattacgtcataaattattagctagtcattcagtaaattaattgaaagtgaacaatatatggtgtagtactgcaatgtatactcatcatgatttttgatttattataaatgcatgcattacatggtgcggtgagtgatacatacatataagagttggaattgtaattgttattaatccggcaattatatacgtacgtactcacgacacaacatatatattatatagctccgtataaatgctgttgtacaacatttatttttctttccattatgtaaacgatgtatttgcagcagttttatacgtaccatgcaagataaaaatatgattctacgaaaaactctacaagtcccccgtttgttttcgagctctgaaacaacctgggcggaacgagtcctttcatgggaagggtggagtttatcagtccgatcatcattgtgctgctctctgtctcaatttattctggttttttcatggatttggatttcactacaagaatataaattttcagcgactagattttttgtgactaaaccaacttagtcactaatagttagattttgcgactaatatttagtcgtaaatatttttagtca

SEQ ID NO: 16684 - DNA, 8583 bp, Cannabis sativa
tgaatcaaagagcatgagaaaatcaatttcaaaatttggtcatgtcttcctctactggcttcatcaagacttgtaaaaaaaatttaacttatacaaatttgtattcacgttgttattaatagataaagttatatctactttattagaggagtaatcgaataactaactaactctaattattttttttttcaaattttacatgtccgcatttttagacaagcgatatgtgtgcatttggtgcccccaaatcaatctatgggcccactctaaaggccccaacatatagcaatttgggtcaagaacgaagctggaagaaggatggtctggattcgattaaggcttgactggggcaaagccgaaccaatgaatccagagagttgatagaaccgaattaccaaatgtcaaaaagacatttatggataccccatcagtattttggaagggtattccaagggggtgtcgcaaagatcaaccttctgggatcggtccgacgtggcatgcctctaacatagaattccatggaattaagggtttgcctgcaagtcagacattggaaaaggcgcacattaaaaaaagtaaagtacctttttattttctaatgtccactcctctgactcttactgtacatgattagcggtgcaagacaaccttacgaagaaagtactacaatgtaagaatgataattattcttcaataggatctcacctactaggccaaaagtcgacattatattttatttaaaccaatcagtgggcttatttcatgaaaaaagtctaacgggcctgggttcatccaaaagacctagtttcagcctataaataaggtcttaaccctccatgcaaaaggttacgaacttatgatagaaacgctgcaggaattcaagaagaacacttaatactccacaacgaaggagcttcaataatatttactcatggacaaatgctcattaacaccccaaccatgtcaaaatatttttcttctttcctttaaaattattatttcttagcttagtcttttattaattcatttgccaaaaatttcgagaaataatgcctgttgaaaatgtaataataattataaggtcaaaaaaaattaaaaatgtaaattgaaggagaaaatactaaaaaaaaaataccctattctaacctaaaaagtacacttcaatacaaaaaaagtgataagaaaattattctatagaaataaactagtaaaaataaataatatataaagattgctaccaatatattactattcatattattgcattttgtatattttatagatctcttgtaattcttgttttttccataatatacacgttaaatattgttcatttatatttttatatacaaagttatattctgtttaattttttttctttatttctcttctatttttttttttccaattctcattttaaattttttgttaatggtttcaaaggctaatgattatgtgaatttttatatgaataataattttgggtaaagaagacaatactttttttgttattattaatttaaaaaaatttcaaaaattgcaaaataagatattaaattgttttcttttaaatatatatatttattgtgtataaagtatgactatgtaacgaaatttttggtttaactgaattttttagttttttacattaaatttaaatgaaaataaaaaaaaattatgtaaatattttatataaaaattttaaatttaaaatattataaatatttactatatttttaattttattattatttattttatattttaaattaaaatggttgcaataagaaattgattactttctgttttagttatggtaaaccgatttacactatatttttcgtaaaatttgtgaaaaaaaaaactatttatgaacgtagtcaaatttggttatgtgagttttggttaacaatatagtaaattataatatatgcattattagatactttatttaattaaaaaaaattacaaatttaaaaaatacgtatatatataaccgcattcaaataacacaccaatatagcaataactaaaaaaaattttaaaaatcaaaatctcaaactctatttcaaatttttttttaaaaaaagtacattacttaatgaaaaaaagttaaacatacatgtattgcacttaacattaacttaattgaacctaaaaaaaaaaaattaattataggtgtattacacataacattaacctagtataagtaaatatgatatgatatcgacatcttgaaaaaagtaactattattttaaaactgttagtaagaaaataatataaaaagtaacagtagctaatttttattttgtttcaaaaaaaaaaaaaaaagataatgtgaatatatagaattatagatgatgatattatatatgagactagggtactaagccgcgcttcgcgcgggttcagccctattttagtatattttttaaataattaagtgatgtagcttaaaatgtaatattttaatgtgaaatttataccttaaattgtaatattaaaaagtaaagtaagaatattttaacttttgagtttcataaattttgaaaatgttttctgttacaaatatttaaaatcttagattaattattattttaaatattttacatttgtatctgtaactattattattaatgtaatattttttaaacttttgagtatctaagtgttgaaaatattttcacttataaatatttaagatctcaataaatattagaattgaaatatcttaaatatcacaattttattattattttataaataattaaaaattatttacattttaacatcttatttcatttactgctttaattatatatacatataataatttctaaaaaataattttgagttggtaaatgttaaaattcaaaatcccattaattattatgtttaaaatattctttattttttagatccacagttttttattattatatatttatgatttattttaaaaaaaaaataaaagaaaaatatattttagaataattgataattccaaaaatttcatttcaattcgagtaatatttatatatatatattatatacatatatatataaattgagccttaatttattaataataagagcttgattaaatatattactttcataaaatctaagagaatgatttacccgttatattaattttataataaattaatctcaatttaattttagtttaaattcaaaacaaaccacacaattctaaaattcgaaacaaaccttttataagattttaaaatatattttctttctgcttttttcttattaagaatttggcttcttctttttatattttctctatagttagtaatcattatatttatttagtagctaaattagactcccgagtacatttagttaacttggaaaaaaattcattcaatagaatcgaataaaacgaaaatccttgaggaaaaaagtatttttacttaacgaaattaatttgttcataaagttgtagtatagaacctcaaagaaataaaaactaactaaacataattggtataattagtcgatgatgataaagtcctgtaactacaatataaaaggactgaatataaaaaaaaaataaaacaacgacctaaaaagtaaagacctaagaagtctaatatcttagtccaaaattaaattgtcgtgaaattgttttgcacccaaattaagtcaagccgcataaaacaataatttgacttcatcaaaataaacttcataggagaaacataatatgctaacaaacttaattattgatcaatacacacataaatctataaaagaatgctacttttattatacaaaactatttttgtatcaataaaaaggtatagatttctttaaatatatatatataaataagccatatgtgagaaataaaaaataaaaaaagaataatcacttataagaattaatcaaataaaaaaaatatcatcattgatcaagccatcaagataaagaaaacataattaataaaaaaagaacataacagttgacaaaggcttaatgattaaatttataatgtaatagttttttagatttggtttataagttaatgtattttgattccccaacaaatatgacaaaaaatgccatcatatatttctattacaaataccaacacaaaattggatctttaatcattgaggaagaagaaagttaaaaaaaagtataaatttgttaccatgttatttacctctcatctctctattattgtgagaccttgctatatctctaaaactcttcttgatgaacaattctataaaaataaaatcaatgtttatgctgaatttttttctaaaataaaataaattaagagaaaaaaataactctatcaaaatttctaatagtgattgacaaaaaaaaaactttcttcgtctatatatatagaatatcaaagttttataccaaaaaaaaaaaaaaataatccctttttttcttcttctatttcatgataatgatcatgaccattacaaatttttttaatatatttccccacaatctcatgactcataatgaccagaaaaccttcagctcctagaaaccaacgtaaaacctcattaacatgttgtagtcttactccatatttagatttagaatatcccaaaaaactttagtcttgaaatcactggatcgtaacatttcgatgtattttttctttcatttcgcataagacctgtaattattgttattggttttaatttatttaacctctaattgaattgttattgtcaaacatttttttttttttttttgagggagttattgtcaaacattagacaaaagaaataagagaaagaatgagaaaggattggttttgtattaatggtaggcaatatttataattataatatatttattatgttttaaatgctaaattaataaaaattaaataaattaggaaaacagacaaatgaaagaataagaaaagaatgctttggatattgtcacttcattttaccatattaattttaagctataacatctattacacatggtaaattaccaaaaaaaaaattaaaataaatagaaaatataagaaataaaacaatgtaaaatcaagctcataagcatgctatgtcactgagtttatattttactttatatagatatataaatagacatatatacattataattaatattaatcaataattaatatgataaatgataaaagaaatagaataattgctttataaataaaaatctaactgataaagaattaaagcttccattttagtgaggtatacctttattactatatttaatattagttagttattaacaaattaatattagttaattattaataaattgttacagttttattgcttcaccaaaaaaataaataaatcatcgaggtacatagagaataaaaatttaaaatattgatttttctaatatttattaaatatatttatgcgttaatcaattatgatatgatgatgaatataaaacgttggtacattaaatattgggtttttaaatatttgttatatgtaaatatatattataaattacttatgataatttatgataatgagctattattatgattttttttccacgaaaattgaataaaaatctaattaaattagaaaaattgagggaaaaaaattaagcaaaataaattatataatctaccaaatcaccttgtttcattttaggattatatatataattaaatattgacataagtaaattaataaatatattctaatcatatatgtaatttatagtttgtaaattaatgtaagtatatgtacaatttttaaatgaataatctatatctaattactatatataacatatatgtgcccaaaaataaaactaaaaaatttacttgtaaactaatgtaaataatattatatgtttttttaagaaaaataaataaattaaattcataaaagtgtacggtaacataaaaataaatattgttaattataaaagttataagaaaatataaatttacatactatcaaaaataaataactaaaactaaattattattaataattggttataactatgtttaattaatatatatacataaatatatattattgtaataggcatatagctattaaaatataacaattattatcattacaaataattataaataaaaaagttaatatatattattttatgtgttatatatacctacacctacaccaatattcatatataattctctttacttacaaattcatagatatatatgaattatttatattcatacattattttattaatttttcttattaaattaagtagatatagtatgcgaattatgagataataaatatcattattattatcactatgtaaaaaaaatccaatataaaatgtcaattggctttctattttttatcaattaatttttattattagtaaatattaaatacgaaaaacagaaaaaaaaaaattataaattaaataaagttgaactttaaaagagaacactacatgaccttttggattggatgtagttctccttatgtttgatgcaaatatctagtgaaaaagaatttgtctataaatagtcatttccatgataatctaccatgagaggaaaacttgtgtatggatattccttgtcatagtaatctgaagaagaagaaaaacaacatcaagaattagaaaataaaaaaataataacaaaactttaaaaataaatagtcatggctaaataatttaaaaatacaaaattaagaattagaaaagataaataataacaaaaacttctaatctaagagtgaagagtggatacaaagttttatcttgtatttgagatttgagatactatatatatacacatagataggtaagagttatataaagaataccaatagtttttatttttttagtagaagaatacaaatagttttaacaattaataataggatattaagttaacataaataataaatattaattagtatgtcttttaaattttcttattggattgaattaaagataaagttaaattagtaaaaatagttgaaaaaatgaaaataattagaaaaactacaaattagaaaaagtagaagaatgaaggagatgaagccacctcaactctcttatactttcctttatttatatatatagatatgaaaatgaataacgtataacaattgtacccttgaaattggtagatttgaaggggaaaaaaaaagattataaaagattaataacactagtccacatatattaaaaaaattgacacgtaaaataacaaataaagtgttgtgatatttatcaatactctaaaattttgaggtctttataaaaacttaaaaaatttgagcaaattattccaataaactaattcgcattctaattatttttatttttagtaatctataataataggtaactttaattagtaatttaatttgtattttttaaacaattattttttccttatataacctataactgtaaatagtgaattcctatcaaacaatttttcatatatactagttatagatgcttaactatttttcttcttggacttgaaagcaggagacaaattcagagaaatctataagtcgtcatatatatatatatatatatatatatatattagtcatatgcacaatgtgtgaaagattcaatttggagttaatttatataaattataagagtgacctccgaatgagggcaaaaaaaagggtcccttagaagattcaattcatgtagggtaggagagtgaccaaaatcatcatatggatgtcttacgttattattaattaaatagagagattatttatatatttatattacaaagacatttcatccatgactcaataacttaaccaaccatgcttataaaggcaaagtgtctaatagaaattattttatatataattaaatataaaaaatttctcttttttttttcctactatataaatatatattacgaatagtacttaaaaaaagaaattttacaaaaatacttaattttaagtaaatgattacatttatactatcacacggtaaaatttatatttttactgccttgaccatatttcttttttcttttataatgtaaacaccgaaaataaaaaaaaagcttccatcttccacacccacagacggaaccatcacagcaacacgacaaaagctgaaaaataatcattaattctggtgagacgaaacaaaaatattaaaactgttgtggctcactacaaaattttcttacttttagtcacaacaaaatttgtcactaaaagtgaaaaagttgtgactaattataaattatcattcttacattatgactaaaaattccgtgcctaaaagtattagtcacaaaaatcacaatttgttgtgactaaatgtgtttttagtcgtaatacttgtgactaaaattaaattagtgataatttgtgtctaaatactatgtttagtcacaagtaacttttttgttgtgactaaaagtcagatttagtcacaaaattttttgttgaaactaaaaagctgtcactaaatgtgatacatttttgtactggctgtcatggtttttctaatgttatttttggcttgttccactgttatctcgtatgtttaacaaatattgg

SEQ ID NO: 16685 - DNA, 4739 bp, Cannabis sativa
  modified_base (4568)..(4574): a, c, t, g, unknown or other
aattcaaatagatcaacataaataattatttaaatatcaataaaaaatttccataattaaaccctaattatctgctaatttccaaatttaaattaagcggtctttacagcataaatatcacacatagaattaaaatatatctccataaatttataaatcataattagaagtctaatttctttattaaaccctaattatctgctaattttcatattaaaattaagtactctttacaaaatatccttatttttgtgggttgttgggcctgtcccgcaatttgctatgttgttcagagttgtgcatataagttggttagtcagccctattttttagggcctggccggcctctgacctcctatggctggccatgtatggttcttacagcctcggtatgtgtctgccagcttgtgctcaaacctttactagcctacaagcttcctctagtcggcctatgtactttccatggtctgccatacatggttgtttagggtcttaacgacttgcttaactccattcacttattgcttgatagtttttctttattgctttagaacccttgatagttgacatgccgtgtagtatgactttgtgttgttgttgacgagctatgttccacgtgttttcagtcttgattatgtggacatgccatgtcaggtgaaaataatttaggataacactttactttactggcttttctgggttagtttttttaataaatttcgttcacacatataatattaatataattgtcaaaaccctatcatagagtctttgagtcaaattttaattgattgtctgatttaattagattttatagtttaatttcataagtcatttgttaaaaattatttgatatgtctcatatatttttttttttcatgtaactagtttttgtgtatctatttatgttttaatttttttagatgtcttatatttttttcttaattttttagttatttgtattagaaataagtttctatgtttattttaaatgtttattaattattattatcaatgtattactaaaactctaaagtattattttttgtaatgttgaaataaaattaaaataattgtagaatatataatcaattttagttattaatttataatttatttttaatattaatattgaaaataataatactatactaaagttaataattatgttaattgcttaacttgtgtatattttttatttagagtactttataatataatatttaattctttgcttaattttgtgctttatacacaaaatataaaagaaaataagttatggctatgtgttgttcatctaaaataattaagaatataaatattatatatataaaaaatgttttctttttcatttatactttcttttactcaatacaaaaataaagaggttgataataaaataaaatttaggaaagacaaagaagtttatatatatatatatatttatatataaatatatttgtcaatgacacaattatattggattttaaacaatgttggagtcatttgagcataaatttttttttctttcaactaatatcatttgccttttattattgaatactttttattttatttatttttaattaatataaataaagataaatattaaattatatatagatattttaaataaaaataaataaattattttcagactctatttctaaaaaataatataatgagtaaaaaattaaagatatataaaacaatttaaaataatccatattatataaaactgcaagcgttgaaataaaaaataatacttttaataaaatttgttcccaaatatctattctatataaaatgtatccagaattcttagtttaatgatactttttgggttttacgttaattttaacagaatatcctattaattaacagaatattctttactaattttataatattattatatatatctaaaaataaaaattatatagatattttatattatagatattatagatatttttaatcatatttttaaatttattagtttaactttgaattgaaattaaaaaaaaattaatttaaaatattataaatttatttaaccatatactttttgggtttctacgttaactttaacaaaatatgttattaattaacagaatattctttattaattttataatattattttatgatttaaaaataaaaattatgtagatattttataattatatttttaaatttattagtttactttgaattaaaataaaaaaaataattaaaatattataaatatatttaaccatataattttaactttattattattatttattttatattttatattgaaatggttgataagaaattgattgctttccattttagttatggttaatcgattcatacactatatttttcttaaagtttaggaataaaaaacctttatatcaaatttacgaatccagcctatatatagacatactcaaatttaattatgtgagttttggttaagaatatagtatacgttaactaactaagaaaattttaaaaatttaaaaaatacctttatatataatcatatcgaaatgacacaccaatatagtaatagttaatttttttttttcttaaagattaaaatctcaaatgccatttaaaaataaaaaaaaaatatatattatctaattaaaaaaattaaacatatatacatattgcacttaacatcacctaattgaacctaattaaagaaaaaattatacgtatattgcatgtaacatcaacctagtacaatataaacgatctgaataagtgttaataaaaatatggcaaagtccatagttttaaaaagttttaaaaacataaaatactataaaaagttgacgaacagaaacacattatattttttgaatattatttccaagtgtaatttttatcactcatattatagctttaatggccatcacactccattattttaataataatatataattaaacagcaaaagttgggttggaaatattaattcttacccttcacgttgtgaatatgtcatacacatccataaaaagttgaaactcaaaagccgtaacatcctccaaaagttgactaacttgaaaaaattaaagcctaaacatcctccaaaaagattcacatagtttttttaaaaaattgatttagttttagtgcatggcagcccataagcagtcattttctgctaattttttttgtgcttcattttataaatatattatatatgaaagattgaatgaagtgttaagcagtaagtacgtacttaagccgattttgaatttttcctgtatttacattacaccggacttttttaaaggtaactgaaaaagtagcttaagctacaataggaaagccatctatttatattttatatttctaccgctactgcgtttctttttggttccattgctatatcacttgtttatttatgttagtattgttgagttaagataaaatgtacgagggtatatatcttcaaactaattagaaataggaagaatagtatatgtatcttatatatattgttatctttttacatattagtaaggtaagactttaacattcttcttaagatggtagtaagtgttgctcacaaatctctaatggcttgatcacaagttgtatttttggctcacaacaaatcacaagttctttttggctcgtctttttggaccggtggtacttttggttcattgtggctcttttttagactcgctaaccctgaattacaagcggctattttggctcatctttttagaccgattattagatttggatcgaatattcattagagttgtgtttgactaatactatgttagaatacagaaatgtatggttgagatagattgaatatggtctatgtaggataaattacatgaagttccatctcaaaattaattggcaataaaaagagtagcctataaatcatatatatgatgctatttctcacacattagcattgaaagactaacaattcaattgttttctttgtgtgttattattgttgaaagtaggggtgtttatcaaactgctcacactgcataaacttcttgcaccacactacactacacaaaaaatgtgatttaaaattataacaccttgctaatttaggcacgctacagtacttttctaaatactatgtgctcctttactaatcaaaaggtttactgaaaaatatgattaattaaaacttttaaataaacctaaacttttactaagtaaacaaataagttacataattacgagattcgttttgttttacaaacataatcaaaatattacatatacaaaggtgtaacccatcgactaataaaatctgagcccatactatcccaaagaccggcacaggccaagcctaaccatctacatcttcaagtctctctcaaaacccacagattgcagatccaaatgctcaggttccagccacaattggaatccctatgaatatcgcagatgtggtaaatcctatcaccacgacaggcgccaagagcctggccactacaactagccaaattgatacaaacatctcaatagatctgaatagcaggcccttgttggtaatattttaccaggatttagattnnnnnnnaagtatgttgattaacatcctaactatgaattctctaaaacaacaaaattaaacacataagggtttaacagaaccttacattgattgcagtgcaataatatgactcgttccgttcaagatctctagagcattatcaagatttgaacctggatctctttctcccct

SEQ ID NO: 16686 - DNA, 4776 bp, Cannabis sativa
cccgccgctaatacccgcagctaatactatttaaaaataaaataataataattttataaataatattatataatataataatattaataattatataatattatattagtgattatataatatataaataataatttaaatataattaatcaaattataaatattataatttaactctaataaatttaatacacaaatacactttcagttccaattaggtaagtgcatttaatagcttgttctaattgggtaagtgcattgtaataccgtggtcttaaatgtaccatattaaaactaggattgattaaaatattttttttattcagctctattttctgacatttgctatttaattgagaaatactatttgtctcccacgtgtccatcatataatgtattatctaaccaattttttgtaattactttttttattaattcattatttaattttaggacatttgtcaaagatacagaaacagataaaatcctaatcaattttagggtgatatatttttagtgcaaaaatatagaaactaaaacttttaaatcaaaaatacgttctccattttaccggcaatcaaaagccggtgacctccatctttagcaactatccaaaatccgatgagctccatctttaccagccatcaaaatctggtgaacttcatctttactgaccatgtgagcttcattcctaaaaagttaatttatcccataagatctttacttatctttgaaatttccaaattctttcttaactgtgtatagaaaattcataccttgaaactgccagtcgcagtcaaaacttttcttgggttttggttaatggggtcaaatgggttttgatcgaacaattccatattaagaactaatgaattgaataagaattataggtcaaacatactaagaactcaatggtggtggacgcactgaagtcgtcgaggttgtgatgccaaagcagagctggttgagtttgggagaagaaggtggaattgtgatcttactgcgtgaagagttattgggattattttagaagaaaacgtaaaacgaatataaaacatttaatcatggtatcataaaaaaagaaattttttcatttatatatttataaccaatcttttatttatttatgcagtaatattaaatttaatacacaaatacactttcagttccaaaactcacccctcctcctttaacggcgctcctactgatacccaaggctaacccatctctcatcaactttttctatactacatccttctcctcaaatctagttgatccacatgaccataatgaccaatcaaagtcctcgacatcaaagccaaaagagaattaaaataaaaatattgcaagaaaaataaatcaatgcaaagagttgagagtgaagaaatttttaaaacaaattctcaatctgattaggtaagctacattatatcgaaaaatccaaataagaaaaagctctattcaatcatatatataaattgttaccttcaaataaagtgaaggttctccaaagtgatcaattttgaattagtttcagttaagaaataagaaagataagaaatcaatgaacagtgaaagagaggaagaaatgtaaaaatgaataaaaaatcaaagttaacataaaattaaaaaacacaaatacaaaaatagaaaagattaaaaattactgtgaaaatgaatataaattccttaaaagtccacaaagatgatgatttccgataaaaaaaatgggtttataaaacattaaataggtgagacccacattataaattaataataatctcttacactacaccacattgtagtggccatgtatctttttttatatctacaaaaacatagtgagaatcattttataataaatcctcacagataagatattttcaaaatttcccaccttaaaaaatttttataattaaagtataacaacataaaatctaattgctcacacaaattaaattaaaatactaatgagtttgatcaggcccggccctggacataggcgtgctaggcctgtgcatagggcccacctagcctaggggcccaaaaaaaatattttttttttaaaattatacaatttttttactgattttaaaaaatatcaatttttttcttttaaataagggcccaaaataattattttttttatagcccactaaatttgagggccgctctgagttcgatttaatattagagatattgaatttttagaaatctgatctaacattcgattttaatctaattaaatatttcaaaataacataaatattcaatatttaagggtgaattgtaattaaattagatccttttaacattaaaaaggaaattcctgattaaataaacaaattcgccgcacaagaccaaagtaattatatatatccaaaaaaaaaattaataaaaccacagtaggcgtatagatctaaaataaagaccacttaggcatagcattagctcagggctcccactttagtaattccttattgactggagcgtgaaaatcacgtgcggcggcgtaactgtaggaaatggtttgtacttgtagttaaacaactaaccactgagccatataactgtaagctgtaacggtgtaccctcctttacctgcatctaccccaaagtttctgcagcactgtcgccacaaccactcgataagcgcgtgacaaacatagagagccacatatgtcagcgcacgcgtgtctttgccttggacaattgtgggcccccaacaaattgggcccaactgaagttacccaatacgactactctttggggcccacctccatcattgggctccacattctttgctctctctcatttcatcacttgaattgaatccgcgcaatttactccgtgattggaacccctcactattttttttttcttttattgttattattatattaaataaaaaaacttatttataaattaatattcatttattatgttttctcgacgttctggtttcactttcatacattcgagtattttttatttttatttttttgattgagaaagtacatttgagtattgttaagatgtaatattcatcaacaaatgtggagtcaatatagtagctagtgaaaaaaaaacaggcccactaatgcctatgtagtacttttattttgcaacaaatcgtacaattgaaaagcattctgaatttttagaccctttcacttgataattatatatcacttatcttttaggacccaaaaaaaaaaggtgctatcatggtaagttggatgatacaccacttgctgggattgggctctcatttgttataaaaagacaccaaaataatatattagtacaaattattgtccctgatgagttgtattattgtatacaccattatattatattaattccaataattatattctgaattctaataaactttctaattatattttgagttgtaattttattttgattgttacactttataattttatagttaagtatagttttgaggtatttttatagctttgaagtatagctttataattttatgcccaaaatataactggtatagttttgaagtattatttgtaatgactaaaaactttaaccatctcttttttattaatgaacgctaattttttttaaaaaaaaatactactccatacacatattcttcgtcattatatgactcttatttaataggttattgaagtgaagatcatatcatatgtaaatctgaaatttgtacactcatagattgattattcatacgcaaatttaacatcaaacttttgctttgccaattccagtcttccacaatcttaccataaaaggtgggtagttttttcttgattattttagtagtttatagtttcacaaaatatacttttcgattagacgataacttattttggttcgaggagaatcttgtacgatttgtagatatttacactgtaaattcatgaatgattctagtccgtatgtatatataaaacatgaaacaaagaaaaagaaaaggtgtaaatcttcttaaaatcttgcctaagagaggattttatttaggggaaagaaagaaagaaaaaaacaaatccatctggctagacagatatatatttatatatatataacaatatctatatatccacatttgaggagagaaaaagaagtttaatctttgacacgtaatcgataagtctcgtgaactatattatttgttgtgatccaaacaccatagcatatcttataataaccaacaaaatagaggaccactaatattgattgctctgtaaccggcggcctttgttatccatggaaaatttgtacggaaacttcaacttcatttagaaaatactacttctataaatatataaatatacatatattatactttgtaagtttgtataatgcatattatcttgaaaataaaatatatatagtaatttgatgaaaattggtaagattcagaatccgtgaataaacctcactttttctcatcctagcaaacaataaagagttcaccaaagatctttttaggggaaaagaaattgtgtgaagaaagatagatttggttggtgcagacttatatatgtacaaaaagcttgagttggtaattggtatgaggtgggcttgagtttgttttagtagttcttttgttctattaatgttcaaccagtactaccaaacaaaaaaagtagtgctaaaatatttactatttacacattacactaatgtttgacataaacataaaataatatttttagggtgaataaattagaaagttggaagaattatacacaaaataatcgtttcacaaaa

SEQ ID NO: 16687 - DNA, 4929 bp, Cannabis sativa
agcaattgaatcatgtggtgcaacaatagtgttcctagaagcagctgtagtacaaagtgcaattggtgtttctgttgcaatagaagcaggaagagcagcagtaggtgtcttttgacttagcatagaaatattttggctcaaactgtacattgttggtgccaacttgttctgaagtggagctgctaaaaccaataggagatatgttcatttggacagcgttaacatgtccagaattatgtgaaacattggtctgagtgggagctgcttgggtagtagcaacaggagctgcttatgaaacagcagcaggggcatttgaaagcgtatgattaaatccaggaggtgggaatggtagagtgggttttgaggtgaactatgagagagaatagttgctgagatatgtgataaggatgtaggctgagatgaatgttgagatgcctcagtggcataagaaaatatattcttatcaaagagaacatctctagaaatgtacactctaccatccttggagagacatttgtaacctttatgagaaaggctataaccaataaaagtgcaaggttaagacctgtattgtaatttgatactttgttgtaaggccttaagttgggataacataaacatccaaacacttttagtgaggattaggcaggtttgacaatgaatataatttctattagtgataagtgatttaattgtggtgagggcattctattaatgaggaagacatctgttctataagttgcatcccaaaattttaaaaggcatgatggcttgtgctaaaaggcttaattcactctctactatgtgcctatgctttctctccactatattattttgttcatgtgtatgggggcatgaaactttgtgtaggatgtcagattattgtaaaaaattaagtgaaggcttggtactctacaccccaatcagactgtatttgtttgattggcaacccaagttgaagctcaacttgtgttttgaatgtaataaaagtgttgagtgcctcattttttgttcttaattaacatgtaaatccatgtgtgcctatagaaaccatctaaaaaaaagatataatatttatattcagaagcaaaattgatgggggcaagaccccataaatctgattgtaaaagttgtaatggttcagtgtagatagtggtggatgtgggaaaggaaagcttatggtgttttccaagacaacaaacagaacacagttgagaaaaattattgtttttattgctggttttaatattacaagtagttaatacatgttgaacaataattctatgatggggatggccaagtcttttgtgccataaagagaaagaaatgtttacatcagtaagactgcttgaattacattctgtgtctgctgttggagacttggaactgaatggttgacaggtgtgagaggtgagaatgttgagctgattggagtcaaacttctacaggcctttcttaagtttcctaacaagcaaagtcctaaaagagacctgatccttgataacacaatgaaaggggtaaaattcaaagaaaacaccattattttgagagaattgagaagtactgagtagatttttagtaattgatggcacatgtaataagttgtttaaaacaagattttgagagtgaaaaggtgaagtaaagtaagattgaccaatgttttgaatttgtaaacttgttctattgcccatgtgcacttgttcaccgaggtaattgttgctggtgctgagattcaactcattgggtgtgaggtgatttgtggcacctgaatcagggtgtcaatctagatcattaaccacttcacgggaggcagaataggcttgaacttcaactatattagcactgttgttgccttgagcagtctgaaatgactctggtccagtgactgtcttatcgaacttgtagaagcattgataaaccgtgtgtccaagcttgtgacaaagcttgcactgtgatttttgtcccccaaatggtggagataccatgttctcgagacaatccacctctgaagtttccaaactgcccatgagaggaattggcaccagctctttaaccaggaggaaaatacccaggattaggagcattgttcatagaaaagcctggggtaggacctctgttaaattgtccagatccaaaaccagtaggatttggtgagaaggaagaggagccacgaccagcttgagatttggtgtgagcaagattagcttcagtcttggcaacatcaagatctttagccgccttgtccagttgaacttcttgggccattaatagggcctcaatcttaggaacactataagcttcagttcttgtgttaactaatgaaatgaacacattgtaatatgctggaagaccattgaagatggcgtcaatgtgatcttgtgcaaatgtagggtgaccaatcgatgtcagagtatcaattatgctctttattttgagtagatagtctttaagaaatgcctgcatttttgtattgcaaagtagaattttgtattgtccaatcttggctcgattaagatatgtgtagtattcacgaaggttgagccagatatgagctgcagagtcaaatccagccatctttgtgagtattttttcatacattgacgagaggagccaagatacaagaatattatcttgttgttcccagtcttcgaactcaggactaactctgtttgcagctcgatctttagttgtgagaaactaaggtggagcacgatttggttcaagaaatcattgcacgcgactacctttgactgctgctaggacgtggtgtttctatggcagatagttgaactcatccaggcgaacagaaagagagtgagagaaagaaacaagattagtttttggtaaattaatttgttgagacaaacttgggggagtcgacgatccacaattgttgacaactgaagaatgctccgtagaagagcaattaaagctatgataccatgtgaactctcaaagaaaaataagaacgaagcaggtaagcaagaaagaggaactgtttcattgattgatcaatggagaagacaaaacttcttatatacagtcagtgacggacgcagaatttttacttcgtgggggcttatttatcattcaaaaatatttatacctatattataatcatttttacaatatttatttaattttataggggcttttctataattttgatctataattatcaaatttaaaaaattacatttaatttttttaaaggcaatatttttgttagtgagggctatagcccccacattaaacacctgtgtccgtccttatatacagtacaataagcacacgcaggaaataaaactaactgaaagttacaataaaactaactaagctaacagaaaataacaaacaacggtagtttatgttcccttaataggagggtcctagctaataactaaattcctacattgtgacagggctaaagaccattgttaaaacaagctatatatgtcctatatatcattatgttccttaattgcttgttttacatttttgtagtaagctagcttaggttaggttagtttcgagttgtctcctcgtaaagaaacttgttggctcgtaacttagccttttttctttcccttcatctgctttgtttggtttaaattttgttctagaatatatatccttgtttttgtggtcgagtatatatcttcacctcctttttcacgtgtaagaataatatctttatcaagctaacagggacgtaggagaaaggaacttaattgaggacaataataagtccaagacaaggtcttaacaaaatcactccttataatagagcacattattactcaattcacacttcattattctacaatatccaacgacttataaattagaaaagaaaggaactcaaatgctgagctagctgcaaaaattattaaaacttggatccatcaattgtcactattgtttaaacaacgaacatttatatatatatatgatgacttcattaattagctcatttaacatgtatatatgtttgatgaaagttaatctaaaaagctatcttgagagagaagtggtgggaaattaagcgagtgtacgtaatatgatatgtaataaagaagaacaatattaatctgtcccattcggaatatgcgtagacaaagtaatgtactccgctaatacacgtcactcatgttgaggtggaggataagcagagcttctttccaacccaacattggagcgctatatatatttactagcaagttatatatatatatatatatataagacccacaccaataattatatgagacctaaaaaaaatattaggcacccttaatttttttttagcaactacttttaccaactcattattgaatcaatgatataccctagcgatctctaagcaaggctaccccaacagaacaacagccccccattaaccaaatcaggcaaagaagcaacccccggagacacatcacagacgccttgatgcaactccgcctaaaccaattaccacgaacaaagccaatcgagaaaagaaactgggagaccaaacccaatgttaaaacagaaaaactatatgtggagaatcagaagaattaagacccctgaccagaaccacttagaaagagtcgatgagccctcattggagaataagaaataattcactactctacggctgcttgagtagagagagaataacaagagagaaattaactctaataggttaaacattctactttaaagctagacacctttaataataaagagataacataaaagttgttaaaatttgattaaatttttaaagttttttaataaagcagaatcataattttaatatatgttcaatctaattttattataattgaatatctaattttcactttttatatgagatttgataattcaaattctatttgaattgaatttgtgtatttttaatatattttaagtgaattattattt

SEQ ID NO: 16688 - DNA, 6354 bp, Cannabis sativa
  modified_base (28)..(34): a, c, t, g, unknown or other
gtaaaactgctccaaaagacaccaatannnnnnnaatgctaactttaaagacccgaaatataggttaattataacctaacaataggggtcccaaacatcaccaaatacgatagactattttaaatacagtaggacattttcagatttcctacccagaaatacttaccagttttctacaaaaaacaacccccgagtttagcttgctctaaacaccctccaaacctattcaaatagtctcaaacttcacagaacggtccaacatcattgtaacattttcaaattaacagaaaccaaaattgaatcaccaagcaaaacttgtcattaatgaacaagctttgagttccaagtactcaagcttggttctacccttctatcagctgctatctaagcttttgaaacctcaaaaaaatttcatttaatcctagaaacacttcagtaactattttctgaatacaaagctctctctctcattcatttttacatcatttttatcactcaatactcaaggtttctagccataatatcgttgacgagttcttaccgtcagtcaatagctaatgtcattacacataaattatcagttcgtgcactcaaagtggataggagactagtttagataaatgatttttgatattttttcaatgtattaaattctaattattttcaatgaatgttcattattcaaaaataaaaataactggttacactagacatgtaaagtacctttaattctgtaaaacggtttaactaaatggtgttctctatattgcaactagacacattaattacctacaattacttaaaaattgtattattacctagttaaaccaacacattaaatctattaattaatggtaattacatcgaaatccaattatcgagtgagagcacctcagatatgtaatgaattgtaatttaactgtacttttaagcttagtttcatatatttacttatgtaaatgcttcattacattcaagtattcattcaagatatattttagaaatattttttcaattaaatatttgagactttttacaatagttatgcctcacaaagacgaaaaatttggaggtaagttgagaaataccacttttttgtatttattaatcaaaatcactttcatattatatttcattaaaatatacccacatttgtgagtggattgcccaattaccttcaccctccacttaagtcttgcacataatttttattaatttaagaggtataatggaacatcatctataaaagtgtgtatatctcaaagaatatagaaataaaggtaaaaatcaaaacatataaaataaagtaggtatacaatgtaattttctcaaaaacttgaggctttaggcctgtttggcataatgtttagaaaagttaaaagttatttttttgaaaaaactgtggtaaaaatatatttagtaaacaatcataaaataactttctagagaatttatgaagaagcaagctcctccaacccaactttcaagaaaaattgttttgattaaaaaactaataaatttatttagactaaaattatatttatttactatatattaaaaaaaataaaaatatttaaaataaattaagtataataaaataaataataattaaatatattgttttttttaaaaaaaaaaaaatatttatgttttattttaatattaaaaaatcacattaacttagagttcgatttctaaattatttttctacatttgataaaacataatataataatacataaaaaaaaatataaatttatcaaatacatataaatttatatttaaaaaaatataaaaaaaaaatacataaaaaaaaataaaaatgttatataaaataaatttttatatatttgtcgttataatcaaatagattataacatcatcattatcattataatagatttgaacagctcacagtactttgaaatttataatttaccaaacactcagctcaacttttttccacaaatttgctgaagctgctttttcttacaacacaattacaattgttttaactagcccttaatttttttaaacattgggtctataacttattgaatattaggtttttaatttcgcttaaacaatatcatcacattgctttgggaaatgaaactctattttttaattgtccggctataaattctactaaaatattagggtgtccgtaaacagtggcagacccaggatttaagttgaggggaacgacacttttttttttccgtaagtgaggggaacattttttttcctacattgtataacatgttaaaaattgatagaaatttatattttaatattaaatgtagtataaagtaaaaaaaaaatgacaataaaaatatttggttcaataattaagacactaagtacaagtcttattagtagaggttcaaaaagtaaaatttaaatactaaagtaaatatgcttttattggaattagaactcatgaccttcactatatgcacaaaatagcttttttattataccaaaacttgtattatgtttattaatattacttctatttagaaatatatattgtaactagctaaaatgcatatacatttttttctcaattttttttaaggggacgactaccccacctcgcctctatgtgggtccgcccttgtccataaggatttgctattcttgtaatagcaatattaagtttccggttaatgtagttctttttttacattcatctgtatttcttctattttttttccaagtcaaatgcagtagtgctcaattatctgtatgctaattttactttgataaaatcagcaatcaaagttgatactacacattaattttagaagcaaaaaaatcattaggctaaactaatgaagcattgagtgcgcttactttcaagtgagggatgtatactatttacattctctacctggtatatctattagcatctccttcaaaagttccttgaagccatcttcagtaattcccttgcgagatatgatttgcaactgagaacaaagtaccaaaacttcaaaaggattcaggtgctttagaatatctgggtctctatcataatcctgagaacaagaaaagacccaaagaaaaacaggaatgagaggcagcagaaattaaggaataatttgtacactaagtcaattaaaatatatagcatcagcataataagtaactagtaccttaaatgtgcagaagcatcatattatatatagaaagcaaacatttaactacaattaaataagacagtgagttttatatctcctactgaattaacaaaaatataaaatttggctagtagagtgtacgaatttgcattttttttcctggtaaagttgcctttactagttactataaacagttacttgtttctgacacttgaaataaatctccttcgtaagagtattgattaaaatatatctataatgcaaatttaactaaagtacaagctaccccaaaccagtgtatttgaaagtcagtaattacaagataacatattactaggatattatttatacagcataaagtctatttgtataccaagtaataattacatctgaatttttattttcatatttgaaaaaagagctaataattaaacaaaagaataaaaatgtataatgattaactatttaaacaaagtaattatttttaactacaataattatttgcaattacacaaagtaattgcaacacattatgtctggttttttgaattgagaattagagtgtaattgaaacacatcaattaccaccaattacataattactttgtaattacctaattaaacaaacactacaaatttaataattacactgaattacattaaagtcaatatacagtgtggttttccaaacacaccttatattgtcatattctaaccttttctgtaactacaacgatgggcttggaacaaaatttcttctccaactcttcaagtctctctctcacaatcttgatatcctggattaggaaagccaaataaagtgagcatgtatgaagtttatcagcattaacaagtgattaatagacttatgtaagcttgaaaaaaagacgatatcgtacggtgagctgaaacatgtgatggtcgctgaattcaagttgatcaacataaactgctcccaactgcagcaagttattaaattcatctagttaagagcacaaataaaagcggggaagaaaatggaaaattattaaatcacaaacttggaaggacaaataccttcttgatgccctgcacaaatgcatttgcagaaccaatggcagagacacataatacgatggtgttacacaatgtttccaaaggtttatttgagttgaaatttctcacatcagaaaaatgagaaggagccattgtagtgaagaaaatgggtagagattcctttacatctcgtaccattaactcaatgtctttgagttttttctccgaaagctgtgattttaccaattttacaagtttcgtattactaaatgaaaaacttgcataaatcttcattgatggcagaaataaagcaattaataatttacttttcgtataccaagtctgcatgatggatgacaacaacatctgcacgtttaagtgcaatcaaaggttctcgtaagggtccgagaggaagtaaatggcaatttccccacagcgttactccattaaccattacaatctcaatattccttcgcaagctccaatgctatcttccatataacataagaaataaatttcaacacagcatgatctataaattcgaacaaacctcttttctttcatgaaatcatcaaattgcataaaatagaatttaacgaaaatcaaatgcaactgagttttaaaaaaactcatatcacctatatacatgttaagaattaggattgttgtacccccagaatgttgttgagaaaagtacatacctgcattccatcatctaaaatggcaacaccaatttcttcggatccaaaatgacttggtccttttgcaccaacccaaagtctttcagagactgtactgggatcaacataaccatatttttcaaagaaagaagaagcagtggctgccctatttgcaccaactccaatacgcacaggtcttcctaaaagatgtctttggagcattttagtttcatccccaccagcataaccctgaataataaatatttatagacaattagcccattagacttgagttaacctaattttaggcctttaaataatctaagtgactctactttttgtcagactttcagaaatatcctagattaggcattcctaaactatgtgatagacctccattgacttatatgctaggaagaataggaagtgtacgggtggtggggatgcagcagagaataattctgctgtgtagtaattctgttatgggggttttgtttgggtaaagctgaggtgcacagcaggcctcttgaggtttagctatagataaggattgtttttctttgtaagcttttgtctagcattttatgagagttgtaactctttgacaggagggaccaggctctcgaatacctggggttataataaatacagattgcattttcatctactattgctccttttatttctcttgctgctgaaattaattttgacaggaaaattcctatcaaattggtatcagagcactcacttttgatgggacccaagaaggattcagcgatagaagttttggaagatgtagagaatggtgaatagaattatatgttgtattccataaaatagtatatatttaaatacaaagttaggagtactaatcataaaaaagaaaactactaaatacaaattactctaatttttacaactaatatactccccctcatgctggagcatagatgttaataatgcccagcgtgttacaaagataatcaacccgcacctcattcaaagcctttgtaaaaatatctcctatctgttctccggtcttcacatatcctgtggagatcaaaccttgttgaattttctcaataacgaaatgacaatcaatctcaatgtgcttagttcgctcgtggaatacgggatttgaagcaatatgaagatcagattatcacaccacaattttgctagaatagaagtcttaaacccgaattctgtccatattaccttacacataaattgtgtcatagccctatattttgagtcagcactggatataaacacaacattttgtttcttactcttccaagaaatcagactgccccaacaaatacacaatatcctgaagtggatcatctgtctaccttggagcctgcccaatctgcattaaacaaacacgcaatccaggtatgtctatgatctttgtaaactatatctcgtcctggtgctcctttcaagtaacataaaatttgctctactgctgcccaatgatgaattgttgg

SEQ ID NO: 16689 - DNA, 3883 bp, Cannabis sativa
  modified_base (2163)..(2168): a, c, t, g, unknown or other
atcctttgtaatgaccgcgaggtctagtgttttctttatctatgcaacgttttattttcaaaaaaaaaaaaggagtaagtgagccacaacaagcctttgttgtgttttcttatcatatgagctaatgtggttcagtccttcactcatttattaactcaacttaattgaatatagccaggctaattgatctgaacagatacaagtttattaactcaaacttaattgaatataatagaagtatgaaaaatcataaaccttgctgaatcaaacttctatttaagcctataggctacaacaaatcaaaaacaaaaaagaaaaacagaatgacaaaataacatcattatgggttaaaaaactcagttcttcttttcctcttcaattgcctttttctttgatccagatgttgcctgtgaatacaagaaagttccgaaaatggcaatggctgatccaagagcattaagaggcctaactggatttctaaacaccaaaacagtagacactataaccaccaccctcttcattgtgttcccaacagaaaatgtcaatggactaatttcatcaagagcttggtatgaagattgattgtaaagatggtaaaacaaaccagagatcaaaacccatgtatagaatgtgtaaggttttccagcagaagcagcaatggcctggtgatacccttgaacccattgagacccttcaacaaaaatggccactggaaatagataaaacagtgaaattatactaatccaaccatataaattaagcccatttacttccttaaagctctgtaaactccttttggagtaaatattcctcaaaacaaacccaacattgctaatcaaagcaccccacaagccttgggaattgaaagaaacctcagtcactgcagctaaaccacaacccataacaatggggagaatagagagccatacctttaaagggtatgtatcacctaagaaagaggagaatacaacagagaaaacaggctctgaagatttgatgacatgggtgaacgaaacagctaccttggagaatgaaacgcaagctgaaatgtgacctactgtgtggaacaatgcaggtccaaggagagcaacaatgaagggtttagtgattttggggcaaggttggagctttaaggaccagagagctaccatccaaatggaacccacaaagagttgaaaagaagcgagaagccatgggaatgggaagagattcaaagccttcttgttgtagatgttgaagacaatgttctggaaataccagaggccgaaaacaatggcgagctgaacctgagtggccttcgattttggggttggggttgaaagggaagaagctggttctgcttcttctccgttggaagaggaggctgctctgggaagaagatggtggatgcgacagatggggttgagtgaaaaggggaaagctttgtgggcattggtaatggcggctgtggattggtgagggagagatgggtaatggagggtgttggtcgtggtggtggtggttagagggtatctatatctatggtggaaagatttggtggtggtggtgattggggtgatgacattcaaagcaaccatttttgtgtgtatgagagagaaataggagtgtggaggctatggcgaacgagagagagagagagagaaagaaagaaagaaggagaggaataggtaatgagattgagtggatgggggccttttttctgtttttggttaaaagctgttgaaattagtttgtgataaatggaagaattcaacccaaaaaaagaaaagaatatcatattattatttttaggttaggatttttgccccaaatcttgatagggtaagaattcgagtagtattcatgttgtgatgtataataggtatatgtttgacctgaacacaactcgtttaataattgtgttagaaaataaaatacaaacacgacatgtttataaatgagttgacctttataaaaatttaagaacacgattttatataaattaagtttgaggatacggtttaatacatagacaattatcgtgttagtaaaatgtaatggaattaaataaaagtcattgagtttataatctcaatagttctgaaatttttttgacaccctagacttgataatgtaaaatttgagtaatttttttgccttttatttattattataattattatnnnnnntattattattattattggtatataaattcagatgatgtgtatatagcataattttataagcatataccaagtgatttttgtaaatgtattttaagtcacatatgcataatcagaaaatagaatcaatggccaaaggaccacttggacaaaaaattaaaagaaaaaggtaggtcttaaatgagacatttcgaaatcactttccaaaacaaagtacatatatcaaacagaaatcaatcgtactattatcttgaattgtgtacaagtttggatcattggcaagttatcttgagaaagaggtgacaggtgataccagaaacatttcaaacttgagttaggtaattcagtacctgaattaactgacatacatagacttggatatatgcactcttataaactcaattgactgaagtaattagtagtagttaacatagtgagtgagaaactgtgtgatccaaatggtcaaatgtgcctttgaaacctcaaacaattctatagaaatgacttttacttcctattttttagaattgtctgatagagttaggtaattgtatgacttacttcctattttttagaatcaccttttttgtggtgactgattcccgagaggaactgccctttggtcaaactttattcgatcttcaacaatagaaaaatacaaaagagaacacaagagttaagcggtcatcaacaatggtgccctgtcgttccatctattgtgcctttgaaaaactaaagacttttagtgctcttcaatgttcaacaagtttaggtaatgcctaaaattttctcttattatactcttggtgaacatattagtcgatttctcattggtgtgaatctttttgactgaaatctctttgatactaatgatatctcttctaaaatatagattgatatctatgtgctttgaccgttcgggaaatatggaatttttgataaggtgaatagcactttaattgtcacaatgaacaatcaactcatcaatcttgattccaagccatataagccaaatggcctcctttattgcctctgttgctgccatatattcaacctcagtaaatggtagagcaacaaccttttaaaggttagatttccaactcacataacctccaagcatagtaaacacatatccagtgttgaggatcttctagtgtctaggtttgcagcatattctagtcaacttaattagtcacattttctttaaaattacctagttttcccaatactagactagtattgagagtccctttcatgcacctcaatatcaatttaagcattttctaatgagtgtcgtatactgtatcaaatttattattattttaattctaatactttcaattattttagtataaaagtaagtaaggatcgatgtacgcactgatgacaatttagcaaatcctttgacgaaaggactagctagagagaaagtctataaaacttcgaaaggaatgggactattgcctttagaaagatgagttacccataatggtaactcaacctaatgactggagatcccaagaattaggttcaatgggtaataacaagttatgaggtgatatgtgttgatcatgcgattgttatatgagaatcatgaagtcttgaagcgataagaggatgagttaatagaaactcttaatgagatctatactctatgtggagtggagtaccgagctacaggagtactcttgatagactcacctatgtgaatgtgggag

SEQ ID NO: 16690 - DNA, 17253 bp, Cannabis sativa
  modified_base (17187)..(17218): a, c, t, g, unknown or other
aaaaaaaaaaaaagaacgaaaaaaattaggggtgtattccttgaaaagaaaaattaataggggtgtacatgtgatatgatataagaattggggtcaaaatataaagtaatttttgactgggtttagggtttaagaaagggaaggttggttcatttctgaaacctcaatactcatctctgcatttgggcatcatcaccatgtgggctcttcgtcgtgcttctcttcctctcaggtatctttcgccctttcctattttgctgtaaaatgagcgaaaattgagtagtaattttcgtggaaatcgaataatatggtgaaatgaattatatatttttggatgttattaggttttcttgatcttttccacttgaactttcttacgtttctttgggttctgtgattgacttttcattcgtttagcttgaccataagcttctttcgtttttcttttcttttggacaatcctcttctaattgaaatgcataacgatcaagccagtggtttgagcttgggtttgattccttatggtcatagaaattattacttgaaactttaaaagggaaagctgggagatttaggtgataataggtagatgttaagggaaagctttgttttttattattttcaaatggagacaaatttttgttgataaaagtctgaatgtgatagtgttaggctatattttgtgactgattacttgaccttttatcgatttgggtttttgtattcaggaatcgagtatttggtattagagcttccagtgctactctttctgatttgaagctacaacacaatgctggagtctcagattctcctgaagtgacatgtggtaaatgtcgttctttcaagagatgttaccacgaaaaatttgattctgcgaaactatatgttgttagacggagtctttcttcacaagctggtacaaaaagcagtggagaggaagatgacttggaggatggattttctgaacttgaaacaacagatggagctaaggcagttgttggggacaatggtgaagatgagcttatttccgaaccagatctctctgataatgaggatcatgccgagcccttatttccgaaagctcctcttaggaagagggttacttcagcattgtttaaagcaattgtagctgctcctggtctctctgttactgcggctcttgataagtgggttgaagaaggaaatcagatagaccgtggtgaaatctcattaaccatgctcagtcttcggaagttacagatgtatggaagggccttgcaggtgaattttcattatttatacacactgtatgctttattggcttaacttaacttgtgtactgtagtgctcattatctctaatctttaaacttctcccttgataagtgtttgcaattattctagtgtcagaagatacactcttcttgcttccagctgtatttgcgtcagtgcaactatgatccttttgtcaaattttcctctgcagtgttgaaagaatgttgtaatcaaatttgtttgaaggcattagtaatggtgatggatagtatgatacataatgtttgtgttttaagtaaaatgttggctaagctttagttgacttattatgcattccttgtttggtgtatgtgctttagttgactaagtataccttatatagtttgaccatttattagttcaagtgagcatataataagaaagggtaactattagctacatttcttgttcccttgtagcatcactccttttcttaaccaattagaaagtgggaaagaagtatttaggttcagttaaattcacataaatttgcggattttttggtgagtagtgagaagtctcttatctatcctcttcactctgtggttgttagatatttgggtcttatgtttttttcgtttttggcttgggtggcattggttgtatcttccaggcatgtataaaacttgggagactgaagtttgttagcataccgattatatctggcacatagttctcttcgcaatttgtggatctagatatgcaaagaaatagaacaacatatgagagtattaacatatgaagtgtctgtgctgcttgacttgttggcttatgcatttaatggagttaatatttcttaggtcttttgttgggagttttcagatagtatgctgatataatgtcactttttaaaacaaatccttgaatcgtaagttatggattctcatacaaatccttttcattttgagtgaccagatgaaaaggtacatttgctcttttgtttctgtttctcttatttattgttgttgaacaaatagtttatagctctcattcttcttctcctgtgacaataatcatttagatatgagctgtaataccccatacaatggtttgtactagctcgagaccttaatttcctttcatgcttctttgttgtgcagttctcggaatggttggaggcaagcaaaagagttgaacttatcgaaagagattattcttctcaccttgatttgattgctaaagtacatggtcccgagagggctgctaagtacattgagacaattccaatttcttttagaggagagttagtttaccgaaccctcttggctaactatgtccaagccggcaatgtgaaaagggcagaggaagttttcaacaaaatgaaagatctggaatttccgatcaccacattttcttgcaaccagttgctgctcctgtacaaaaggactgacaagaagaaattagcagatgtactattactaatggagaaagaaaacgtgaagccctcgctctttacgtttagactcttgatagatactaaaggacaaatgaatgacatatcagggatggaagaacttttggagaaactcaaggaacaaggttttgagccagacattggtataaaatccattgcagcaggccactatgctgccgccgggcttaaagaaaaagctgaagctgttttaaaagatatggagcgaggaaacttaagtgagaatcgtagggtttgcggagacttacttcgaatttatgcattgcttggacaagctgatcaagtggagaggatttggaagttctgcgagtcaaatccttggactgcagagtgccttgcagcaattgaagcttggggaaaattgaagaaaatcaaagaggccgaagctgttttcgaaaagatgctaaaaaatgtgaagaagccttcttcaaaacattacactgtgcttttgaaagtatatgcagatcacaagatgctaacaaagggtaaggatcttattaagcgaatggcagatgatggttgcaatatcggcccacagacatgggatgcacttgtgaaactctatttagatgcaggcgagatagacaaggcagactcaatcttgcacaaggcttctcaaaacaaccaagtgaagccttttttcaggacttacatggctgtcatggatcagtattcaaagaaaggcgatgttcataactcagaaaagatcttccatagaatgagacaggcgggttatatgggtagacttcgtcaattccaagcgcttgttcgggcgtacataaatgctaaggcaccggcatatgggattagggaaagaatgaaagcagataatatcttcccaaatcgagatctgaccggacaattagtacaggttgatgcatttaggaagacagcagcctctgatttgcttgaatgagaggcattttgagttgttaatcttggcatggaatggactatatataatgttatgtagaactattaattttttaggttttgacaaacgaggtataataacgtttgcttttctatacttcaattttattattgttcagaaaaaaggcctcatcttaagcttagttagttctattctatttgctttgttagctttttgttctatgtttttactttgaaagtgtggttcttttgttttgtgtataacttcattttagttttccaaattagcatagcatgcagtcaatgtaggcccttggttacataccaatgtctacatcaaatgtgtaacattaaatattaagagaattatttcatatatcgttttttaatttttttttcttttaaatttaccgtttgggttgttttggtagtttttatgtgagttgatatgtgatttaagttgttttgttagttgctatgtgagtttttatgtgaatttttataagaaaacaaaaaaaaaaaattgttttgaagtgtaaaaataaaaaatttcttaaatattattgcttccttaattattttacacaagtattaaaatgcaaaaaatcaaattctataagtattggtactgcaaattctataagtagtggtaattgaaaattcatgtttttgtgccattcatgtttttagcttagggtattgatcaatgattttttctcacctccccctttctttggagctattgctctcaaaggtagttttattggaacttttcttcttaaaaaaatacatatattttatttttctatatttgtagaaattataattaaaatgtcatatttttcgtaaaaattttcaataaaaaatgatgctcgacatatattagaaaaaaaaaaaacaaaaattataataatatctaggctttattgacataataatagtgattttagcccctaattacaaattggaagatgagttgaaaataaaatttgaaaagttattgcctatttgagaatgaattgcctaaaatgattatatctatatctaattatctatatcatgtataataatttgttttagctagcttttcaagttgtgataattttttttagctattctaatgtatgatgaaagaactcaactattgtactacctacccatgttcccatttcctccactactcattaaaaacataaactctataaaaatagggataatatatatatatatatatatatatatatatgaagtctatatgtgatcctaagcctccatcatgacttatggaaggctataattgctttctagtgtatagcattttcaagtgatccatgtgatgatgcatttggccaagttaatgattttttttggttctagaataaatttttaaaataaataaattaaattatttgtaaacaaaagcacaaaaaatgttttgcccttctaggaagttcccacatgtagttcttggtcaagtggacaaattttggagatttaatataaaaaagtatcttatattaaagttaaattctagtttgaattccatgttttaaaaatttataagaaggacattctcaatattaaaatggtaaaaaaataatccttcctaaataatattagtcaatatttttttttttaaaaaaaacagagaaattttattaaaatgcaattaaaaagattcaagatacaaaagataagtgaaattaaatacctaaattcataagtaggcctctccacgaaacacaagccccgtctaaatcaaggattcgttttgctaaaaactaagcaactcagttcttagaccttttataatgagtcaaagatatgctattaaaagattttcaaacatggttaatatcatcaagtacaatgccaaactcattaagacgaggatccttgctattaacaacaagaactaaccgctgacaatcagaaaaggcagtaacggacgtatatcccaactgcaggcaataagaaagcccttgaagtcaaattttagtatcacactatcactaaatttagtgtcaaaaagtattactactctaaccacaacacaaaaaattacacaaaaaaatatttcttattattatattattttttaaataaaattttaaaaaattaatatcatattaattaactaaaatcaccacaatgcaccatctaaataaaaaagtcacacgtgcaacagacagtttgaattttattttctgcatattaattttattttttatttttttataattttacaagatatcttaaataattataatgtacacgaccatgaaaagaaaaattgaactaaaaaagtttgtttggtgcaaaagcagatagcaatacatcaatacattacttttagaaagatctcctctaaaatttcccaaaattaaattcttaatttcataaataaatcaaataatataaatatatataaatataattaaattaaaaaaaaatatatcaaccacatatataccgtgcactggaacattaattttgaaatggggtgtttaataaattaatagtgtctccttgaaacaaaaaaaaaaggattttatataggttttttataccacatactaaaatttttaatctttttactgtagggtagaattttttttgaaaatactatatttttttttttcataaatactgtgtattttttatactgtgtattgtattaagttttcactgctgttctacggttattttttagttgttccactgttatttttaattgttttgttttgttattttacggttgttttagaaaaacacagtacttttgtaaaaaaaatctgtgtggtagtaaaattgtaaactgttgcccaattgcccaaaattcaatatttttataaaaatcccttttatattatgctgcttactcggagaagttcttagggtagggcatcggcggacttgttgttgaaggttcctcaacccaagaggtcttctagtttctattttttctatgattctttttagcatttgtccataacgccccaaaccaaatcttactaaaacaacttaaaaattttatttgaatttatttttcaaataaaaaatccattttaaagattttgttccaagccccataaaaattaaagaggatcttatatgagaaaattgtattatatacccactttactttattaattttaatttttactttcatttccatattctttgagatatactcacttttacatatgatgtccacattatagcttttaggttaatgtaaaccgtgtgctacacttaagtggagaacgagagtctgttaggcaacacactcacaaaagtaggtagattttaatgaagtataatataaaagtatttttaattaatgaatataataaagatgtattcttcaacttatcccgtcagtgtaattttggctttaataaaaatcttaatctcaattatattcggtatatccactaatttaccgactatttttactaaattttaaaaatgacattcattaaccattaagcatgacccctaaacctaattgcacaattttgtggtaacccagccttgtctttggactgggcccatttaggtttgctgttgcaaataaatatgtggaattagatccatgcacatttttttgggcttaaagttgaagaataccttacctcctctctaaaattattacaaaaatagcccttatttatttaacattcctattatattcttaatttgatttatagtttttttttctaagtaaaatttatttattccatgtcaaaaaaaatttatttattcattttcttcattttaaaagtttttttagggatgttttaaaccttattttatcccccccaccccacccccttttatgaagatgaccaattatgaataatgtaagattaaaaagggtaatttagtgaatttatatttaaaattgggtagaaacttaactaaatataaatatggtcaactaactttaatttgggtatttatgaagtatcctataaatttagacctaaaaattatttatgtaatagagtagagtagctagtagtgtcccatgaaattgaaaactaatcacgtgatattatgataaggcctttttcattttcttggtctttgaagggaagtaaacttgtttgaacaaacaatcatcacataaatagaagaatttaaagaactactagcctttgaacatgtgccattaatgcttaatttccatgtaacatatatctcgagtttggtttgaggaatgaaaatataagaataataagaataagaatgaaatagaatcaaatttaaattaaaataacaaaaaaaaaaaaaattatcatgcattagatatttttttttactattttaaaatggaatagtcatttcaatatttctaaatgcaactaaataaaataataaaataaaaattattttttttttctattttattttatttcattacttccaactaaacatcatctattgacatatgaaagaataaaaattattactaccataaaaaaaagttggattaattttgcttctttatgggctaataataagcataagaacctttggtttaagattatacattgcaagagttgaacaagcatatcctagaagaagagcaaatatacttgcaaatatagatgaagctttgaaaaagagtcctagttacggacataatgattccttttttatttggtaaagttactacaattacaatgttacatagaagaactataactaaggcaagatatcctagaagaagagcaaatatacatgagagtctgagcaagaatgcttgaaagggccaagagcaatatttatcacatgcgtgaacccccaacattaatgtttaaaaactggtggcggactcaaaatttaaattgaaatatcgtaatttatttttaaaggagagtgcatgttttttttaatcatgctataacatattaaaaattactacaaacttgtttttataggatagaatatagtttaaattaaaaaaaaaaaataactataaaaagattagtacttcatacaagtcttattggtagagattgaaaaaatatatttaaaaataaaaataaaaatgctcttattgagagttgaacccttaacttatattatatgtgtaagctaacttaatcatatacaaatttaacagtatgtttataaatatcaccttttattatatatatgttgtaaataactaaaatacatatttgttttgttctcaattttttttttcagagagcgactgcccccttgcctctatatgagtccgcctatgctagcaacaaccaccattgctccccaaaggctaaccacataagtctcagtgactatctcaactatggtggacatgaactccgattcttctaaatcaaatgtggcaaatagttgagctttgtttgaattgtactttcattctggtaatggcttaaggttagaaaaattgtgggtctcgacacacaattagacctgtgagaaattatgactaatgtgtagaatcaaatcaactaaaatttcaatcaacaaacagttagtaatgacaagataaaccaatcacaaatatgaattgaagaaaaatagggatgaatagagtaataaaaatttagaaacgattgaagtagtaaaataataaaattaacactaagatatatactggttcaagtcctatagatcgatgtgatatatggctctactccagttcttgaataccgctgaaatctcctttattgattgagcaagaacaaggggtacaatacagtcgagatgattctttattggattctctaaagtgtttcaattctcacactcttacccaagaatcttcttcatctacagaatattcttcatacaaaatccaaacccaatcactctcttttctctgtacctctctttctctacctctaaatctttctttctctcaatctcgagatctcctcttgaaaaatcgtctgaacccagcctcttcgaaatgataagtgttggtggtatttataggcttaggataaagatcctaaggtcagttgctacaactgatgggttgttaagttagttacgacataacagacttaacaatctcctcgtaacagaatctccacgtcaacacaatgaaaagttcttccagatgagacatatgattatgggacaaaggactgaatcatatgctgaaaggactttccgaataggaaaggagctagccaaagtcgactatccgaatctcccttccaggaggaacaactagccatccagaactcccttttagaggaggactagctttcctaaagacgacacctggaatggacatgatagttatatgggaactcccttctggatggaaactatcttccacgagtcttctttcagatggaaagttagctatcgaggaacttacttttgggagacaactaactttccattataagaataatcttatggagatctttttctttggaggaactgtaccataaattcgacctagttacttcatattagaatattaatggtaatgaggaaataatgaagccatcatggttggtgttctagaaatctcagtttactaacttttgagattgatcaagtccaagcaatgctttaacttgtttactattaagaccttagtcctacatcagcggtattatcttctattctgaccttctctaattcaatcaatcattcctctatcttctctctaatctagtacagtcatatgtctatatgtttgctattttcatgacaaattagattcttgcaaagatggatggatgactggctattcgagtacacagtcactcctcctatgaactgtttcaattcaaacaaaattctttgaagccataaattctgcttccatggtggaaagggcaaccacagactgtaactgggccttctagcatatacagttccagattgtcataaaaatacaggaagtggttaattttcttgtatctctattcgaagcatagtcagcgtccacgaaccctttcaactctagttatccttttgctttttcataggtcagaccataaccccaagttcccttcaagtaccttagtaaccatttaagggctttccaatattcaatgcccatattagacatgaaccaacttaggatgcttagagcatgagctatgtccggtttggtgctcaccatcacatacattaaacatcctaagaccactgcgcagggtacatccttcatttcgtctttctccttcaaaatgttcggacactcttccttcgataaaatgaattgccccctaacaaaacagattcactctttacatcttttatgttaaacttttgaatagcttttttgatgtacccggactgctttaggttgattgtcccttccttctggatccttaaaacttcaataccaagtatcttttaaactggtccaagctccttcatctcaaattctctattgagcttggcattgatacttttgattacaaatttgtcctttctcatgatgagcatctcatcaacacagagtaataagaacatagctgtagattgttccaaattcttaaaatataagcaatgatcatatgcagatcatttgaacccaattttttgcatataagtatcaaatatcttattccattgtcttggagactgtttcaaatcatacaaggacctgttaacctttaacattaattcaactcctttcccttccatctgaaacctaggtggttgcttcatgtagatctcttcatccaagaatccattcagaatggcaattttaacatcaagtttttcaacttcaaactccatttgagctgccaaatacaacatcaatattattttcttgtactttatcacaagtgagaagatatctgtctagtcaatttcttccacctgagtaaagcctttagccactaacctagctttaaaccgcactggttcattctcattgattctctctttcaccttgagaattcatttgcactccacaatctttttgttctttggctttggtacaataacacatgtcttgttctttcggagtgaatccatctcctcatccatggtctgaagctattttgatttgtttccacctaaattttccttttcgtagtttccaggctcttcaatttcaatttgttgtacttctgtcggtgcaaatgctgttaagtttgctcttgtgaacctttccgaaaggtgaatctctcttctagttctatcacacaccaattggtaactttccagacttgtctgtccatatccttctgaaacttctgtttggtcttcattatcttccaactcaacatcaacttccatttgcgtactttcttctggctccatgatagctttagtctatgaacctttttctggatgtttcattctgtcttccacttccatgcgtgtagtgttcttgtttcttattttttctacatcacacggagacacactaccctttttagatgtcaagtgaggatattccaactcattgaaaacaacatttctagcaatcacaacctttggtctacccttccaagaaatgtagatttcataccccttggtgcctaaggcataacttatgaaggttcccttactaatttaagttctaacttatcaatagattagtgtacataagttgtacactcaaaggttcttaagtgtgttaggtttggagttctgttgtaccacatttcataaggggttttcaagcctataactcagttcaggcttctatttataaggtaggttgcagtttttagagcttccccccaaaatggtttctctaattcaaaactgaacaacaatctaactttttacaatgggatttggctcatcctttcagcaacaccattttgccctagagtcatcactacggttctatgcctagtgatcccatactcttgacacaacatgtcgaattcaaagttaataaactcttacccattgtttgtcctaaggttcttaactttaaggttgatttggttttccacctgagttttccaaattctgaatttctagacactcattcttagttgctagcaaataggtccaaacacacctacggtaatcatcaactatagaaagaaaatatttcttatcggagtgagtaggaactttgtatggccctcaaagatcagcatgcatatattctaatatcttcttagttgtgtgccttgctggagtgaacttcagcttatgttgtttccctgaaacacaagcttcacaaaatggtaagacacgtgaattttaattttcaattataccttatttgtacagttatttgatgcattgttcactgatatgcccaagtctatgatgccacagttgcatatctgattcgagacctttcaccaaacctgcttttctgactggaacagtttctccttggagaacatgtaaaccaaccattgatctttttacctttcatcaccatcagcgaacctttggtgatcctcaagcttccatgcatagatttttatttgtatccttcatctttaagcgcacccagggatatgaggtttcgtcttaagtttggaatgttccttgtgttcgtcaacaccttaattttgctatcatactatctgatggcaaccttttcgattctaatgacctgcatgaatgatcatttcccattagaactttacctccatcaactgatctataatcaaaaaatgactctcgactcagacacatgtgataagtgcatccaaagttaagaatccactccatgcttgttaggtgtattttatgccattttttagagtccaatttagggtgtattttagtcttttagcttttatttgttttttaggagaaatggttggggatcttcaattttgataattttggtattctgcaagcttttttgagcaaaaatgagaaaatctaataaagaaaggaaacttcttttagtttggagtaatttcttattgactaaaatgggtcaaaaatggcatttttagctcttaaattcgtggctagagtcaagagtgatcactttctaaaactaaattgaaaaattctaagttttggatgttgaaaatgttctgtttgtgactgaaaataaagtctgaaactttaagctaatttttgactatgatcaattcacttctagaaaaaactttatgaataaaagttttatatctctctttcatctttccaaaacatcttgaatcgtccaattctaagttatatcgaaagagtcatggctaaaatactattagtcattgtagaaagcaactaaaaacaagaaactttaaaaatcagcgtagaaaagaggaaaactcttgtaaggccacgaccttgctgtttttttttttttggtaaacttttatgtttggctctatttaaagagggctgaggcaaagctttgataccattcaaaagtttagtgaatactgagcatagaaggaaggttaggaacagaagacaccattggaggactccattagtgttctatctcctctatttttatctcttatgttttaattaaatttctattattttagaatatattttcgtagctaatttcttttaagaattattttgtgaaccacttgagtttattttatagattaatgtgattgttaaattttttcttcttctctttattcagtttcatacaatatgttttaattttgcaattattgactgatgaactttaaatgttatttatgaattcaaatcaaaattaaaaaaaatgagatttgaatatgctttgactgatatggatacaaactgacttaggacaaaagttcctaggctatttgtatgattttattagttgttataacgatatctttgtgattagacttaacatataaatatagaaagttttcatatagattgagtttataagttttaaatagattataaacttcttaactcaacttaccaattgaatatgaataaaagaaattagataattacataatgaagtaaaataaaggatagttcgggatcataataatctttatttttattattgttatttctcaaaaaatttattattatttgttttatttaccatttatccaacaattattattcatcaaatagaactaaagaattaattaattggtaattgataatcaatcctcgtgggaacggtacttatttatcattttattacttgttttgattgcgtatacttgtgtattaattttaccgaatactattcattgaagattccgagatagagaatagttctccatccattgagcagtcgtcattatcttccgtgactacagttaaatcattcctatggtgatgcttcttgttgtccttcctatctccattatgagattttttgaatccttgttgctccttgtactttttgcaaaatctttgcaagtgtccggaccttccacataagtaacatttacgagtttccttcttcctggacttcaatcttgattgaaagtgatgatgtttactcttcgaactcactttcttgggtgattttcctcttgccaaatacacttcttctttcttagattctttatccaattataatttgaaatctttcaactttagtgcaacaagagcatcctctactgcaatcacatctatgccatacttgatagcagccttaatgtaatatctcaggattagtaaatggatgagcaactctaattaagatagatttattataattgagtaattatattattatattattaattatatgaaattatttgagaaatattatatttaagatcccatttatgagttagggatattttttataattctgacttgagaatggtaaaatcataattttaatatttattgttctgattagactatattattgtatagtatgtttatattatcttattgtaggtaatttttgataagttagcacgatttagtcataatcgggtaatttaggcctaaactagattcgaggtctaaaataattttattgtgtaattatgttatcacataatttatgtgagaatatctggatgtatgtatggaagtgaaatgattaaagtatccttaaatgagttatatgtggatttgttgccttgagggcaaaatggtcaattggcctattttacaagaaatgaactaagtaaagtattttacaagatatgaactaagtaaagtattatttccttcccaaccaacctccatctctctctttaaataaaaaaatttcttgaagttcttgagattttgggtgtaaaattggtgtttggagttaatttcttcagggaaattattgttaaagttgtggaaaaatacttgaggtagttttttcttaaatcctttgttgtctttagttttgaaatttgattatatctaattgttgcatgttgtgtgtttggatgaggatcataggtgaagattaagttttcattgtgtttatgctttgattcttggagctaaatttggatttgttaggattgtatttatgttgagctagagaatgaattttaggtcattagtgtatgttggtgttgctattgtgattttgaaattcttgctttgattagttcaattctgagttagagttgagcatgagtattgtgttcataacttcttaaagcatgtattggagtaattgaatcttgtttgtttatagtgtttgagcatgtattttggtgtttgtgatgcttaggatttgatttggtgtagaagtcaattgcttaagttgtaccaagtttaggtttgattggatgatgttcagattgggttaaatatgattttttaggcattttttagatttttaaacctagtagttgcgacctggcaccaaaccagagagggtgagcccctgtttaggcataatttttgactctgaatttcattttagacgttctatatattgttagaaagctcattttgagatctattatttggtctagtgttagagtcctaattgtgaatattatgaatgtgatttttaggggactaaccctagcttgtaaaacttgcaaattgtgattaggattactggaacttggtcagaatcactagtggatcgtgatttctccacatactttgaaaatcaggtaagatagagaactaagcacatagactatatcgcggtggtgcaattttatgatatttgattattgttatgaattcgcaacctagggttattaccctaagtgcatattgttataagtgtgtaataatctattaattgaatctctgtgtagagttatgcatgtaaggcataaccaagttagactcggtgattataatcaagacaaaccctagtaagaccttaaatgttaaaagacgtgtgatcgtaatacgtaggtctatgttacatagacatttattacagtgaaattattatggaaaaatgtaacataaagtgcggtggcacaatatctatactcagtgtcgtactgtatgaagtgtaattattattataattatcatattgtattattttctgttttgctgggccttggctcacgagtgctctattgtgcaagcaagggtaaagcaatgtcaggtcaggcatgagatcgaggactttgaggatgacttgtacatatttcagccaagctagaccacgagagttgggtccaataggaattgtgtagaaattccatttttccgcttatgtcggcttgtacaaaacatgtaacaccctaactatcnnnnnnnnnnnnnnnnnnnnnnnnnnnnnnnntgcagctcgttgctaaccaacgaggtttatggaaa

SEQ ID NO: 16691 - DNA, 4010 bp, Cannabis sativa
  modified_base (2076)..(2089): a, c, t, g, unknown or other
ttctttcaatctaacctgtgacctgtctctgaccctagaaatgaagggcctctgactttaaggcgttttgctccaatatctactgggtgtggttccctcgtgctcttacccaactctaactgaaacctatcctttttgggttgttctctcagtctgttactactaccctcattaaccacattcttgaattttatagagatcggaatggtaccccttcctttgacaaatctttctgtcgttgaaagagtgtcaatagctctatgattagtgagcgtagttgttagtttagaatttgatcccacaattctggtgcaacctgacgacccagatcttctgtcaggctgaaatttcttaagtcgtctgaacccctgtccattaaaaatttcagcaaccagaaaagttaatcatcaattgttaggacacaatactggtttatgaaactaagatctaaagtttacgtgtaaactaagtacctggtggtcagaatgcttcgataatatgttatcattcatgttcttcttttccatcttctgtgttgaacgacgtttaaccctgaatatctctgaatcagaactatcactatcttcatctagagtaggcctaaccagcttttcatgagaataatcttgatttacagtcaagtgttcatcacatgacggggaagacagagtagattcaagtgcactccgtgacaagtcttctgaaaactttctagagtcaagactcctcacatcaaagctagtgttcccatgtacctggagaaaataaatagatgcaacaaattagaatttcaaacacataagcactctaaattaattctgaaaggatgcatatcagaatacagaagtagccaactaaaggagatctgtatcttacattgctgggagtgattgcggcttccatagggtctacaggaagagaatgtagagtggatgtggtacaggacatagatgttcctaacatttcagaatttaaactcattgttccactacttgacacctgtgcactacacgaaacatgatcttgctcttttgattgatactgagtagtatcactaagttttgggatcgagtcaaatttgatcggacagtaaggaatgtatacctcctgcttaactttatgtgacatgtttgctaatggatctgaatacaagtcatgaaccctattagattgctgattaatcttcttttctggtactctatcctccatttcaaactttctagctgcatcttccatttctgatatatcctcccttaaacagagcgtacagtgtcttccacaggaaaaatttaaagacgtcatatctgcaacaagaaaagcaacaaacagatgaaaataagagtgtgtaagaatccaaggcagaaacatatagcattggtaaaatccccctgtgggctgctgttaagtaggaatggcaacccagtatcaaaagtcccattgggtagaggtcataattcaaaaagtttatatcccattaaaatggtgatgaatacacttctctctaatcaagtagagacagatcttttcaagataaataagcaattgaaatctcatataatccaaacacgcaaacactaggctggatagaagcataccatgacgaaggcagacaggatgcatgtaacagctacagttgacaaaagcaacataacagtcacgtttacataagctgcacaggatagttccatgctgatttgcagacacactagtacatatccctgatttcattagcaaccagcgagctcgatgcaagaaacggatcaacttcacaaaagaagttttaatggaacaatgagaggccaagtcagcagaagaatgatccaaatcttcaagctctaaactcgaatagagaagcattgcttctttgcaaagtagttcttcatgaggaagcaaaggcatcctactaagaagtgcatagcgttggctagcaacagcacccaagggaaaccagtcaccaattgcaaagttcactgcttcaccacaattgaagcctacagttccaaaaggaaaagtacaatttcttcaaataattacagtaaatatatatatatatatcgagagagagagagagagagnnnnnnnnnnnnnnagagagagagaaagagagaaattagcaacataaatgatgtttaccatgattaaatccagcatgatatgctctagggaacgtaactatgaactctccaggtttttgcactgccttgtacacagggacgtcatgatccaatagaatattaggaggaaataaagttgttttccccaataaaacatcaaaagccccatcctccccatcagcagaaaggatgtcatgagtatacacatgttccctaacaaccttttcaaactgcaaagcagcatgacctggaatgccataccaagtttttgaagcaccgcagtgatgataattaatactgcagtaagagtgagaaaattaatagagtggggagaatttgaataacacaaaattagcatgaaagttttatggcttcactgcctctcaagaataacatatacctgtatagataatgatcctcgacatgccaagcaaacatgctaaatagcattccaatatagagcataggatcagttactccctgtgaaaaaaaaataaacattagtaatttaagaaagcacatcatatatagatgatgaaaagattgtagataagttagtattgttacaggaattgctctttctagaagacgcaatactgactttgatagccttgacagtctctgaaacaaaataaaaaagaattgaaattgataagtttataaacatgcaaagcgatacataaaaaaatgtgaataaattaatctatacaaataaacaccaaaaaacacccttagatctagacaattttgtgttgagtaattataatttaccaaaaacttggaaaaatagtgcctataacataagaacctgaactaaataagggaagaccaaaaacaaaaacatatctacaaagaaatagaatgagattcgataacaccatacagcttctttctgtccttgcattgaacagaaaacgtatttttaaattatattcatctaaatgctataatgagatacaaatctgtagtcattatctcctctcattcttcacatcacaaaacatttatttattattaacataactcatatagagaaaagagaacgcatctcaaacagcagaatcattcaaaagaaatcattataatgattacattacggcagaacaagtgcagctagttttaactttgttgctttgcaattatcctcaaaaaaataattatccttcaactaaccaatataaatacgtacatacatatccaagtaaagattacggacagaaatcaaaatacagatcacaaacaagaataaaaaggagcattaagtagaattaacaccttcaagttccatttgctattcccaagctgatcactgggagaagctgagaaagcgctaccatcaacatcacaagcatactccaccgtttcggtctttccacaagcaatctcatgccaaaattccttttccagatatgaggcaggaagactaccagagctataatatcgtctagaaaaaaccttgtttgccattttctcaaaatcacggaatgtataatttctgaaaacatgcatccatattcaaaaaatgagaaaaaactaaaataaatcaaatcaagtatcatccttctatttagtatacacacttaccttccgctcatgaaaaatgtaactttatcatcagtgtcccactcagctagacggagaggttgcactcgggttgtgaacttaaatcccggttgctccttcatcaatacaaccccagctggaacagaagcagtcacaggtgaaacaatcttgatcatacctgaaattatcaagcaaaaaaaatcatagaacttacatgttagtattcattttgaatagacagctgcaacttaaggtttatgtattggaaccaataataataacaaaatgggacatgatgtgtgcgtgtatgtatgtgtgtgcgaaaaataaaac

SEQ ID NO: 16692 - DNA, 7506 bp, Cannabis sativa
tcattcacttaaaacttttttcattttctaattccatatatcttttttgatatgattccattgactgtttcttgtttcgaaagctctactccaggtaacatgcgtaacgcttgtaaatatacaaattgttgaatgggttttctttgtcaattcaaattactctgaattgctgaaattctttgtgttcacgtatgtaacatgataataatagaaaggaaaagataaagaccattgatttaaataatgctgtctatattgttttgaatttagattttatagtacatatatcttcaattgtttaattatgctcataatcaaattctattttcttttttcttacccccattccctttatattgtggtcagtttcctgccttgcgtgaatttgtcaaaatggggaagcctgtttgggggacatgtgcagggcttatcttcttggcagataaagctataggttggttttcttgttcgggattatgaatggtctatatgatttgtctattttcaagttgaattatcagtttttatgtaggaaatatgtgtgttttgaaaatgttctgtaattgaaatgagcacatatactttcagggcagaaagaaggaggacaggaactggttggaggcctagactgcacagtgcacaggaatttctttggtagtcaggtgataattgaattgcttgatttccattgtcaattgttacatctaccaaaataaatctttctatgctgcaaaattttgtgtgtttctgtatgtagtttctttggaattaaatttatgttttaatttaggatcaagtgtgcaaaattttgacatgttagattagttcagtactaactactagtgtttaagagtagactgggttgttgtgaatttgtttttgtttttctttttcaaatttgttattttaacatgcaggcatacacagaaagccaagtagagaaatccattggaccttatacaagttcttgaaattttttgtgattattctaatatcaattaattctatattcctctttcttgttaggttatagttgcagtgaaagaaggggaaaggggaaaatttattgacatgactatttaaaaaactactgtattgacaattgaattgttctatacatctaggccaacattcaatattgatatatttgttgataaaaattaacagatccaaagctttgaggcagagattgaggcaccagagctttcttctacggaagggggtcctgaaacatttcgtggagtttttatacgtgctcctgctattcttgaagtgggatcagaagttcaggtgctcgccaactatcctgtttcatcaaaacctactaaggggtcagattcaaattctgcggagggaggtcaagaggtttgtccttatctggctatacacatttttcctttctactatattaaaaagttctatatgcatttgcttttggtcttctaaaagattccactagtgttgctgcttacaatcaaacgtgtaattgatgtttatgtcaaattgctgtctgtctcaatactaaacaagacttggtctgaagggagtcatttgcttgaaatgtgattactgtgtttttatggtagacatctaacatggtactttccctgaggatttagtaatgttttctttgtttgggtatgtttttctcttctttcttttctttagtatattgaactattaaagaagtgacaatttagaaggtgggatgaacagagtctgctgactgtactctgtgttacaggttgttgaaagactctttcatataccacaggataagctttttctgtattcagtgaaattttctatataatcaaaatcagtttttgttgatttaatgtaagtgactgaaagtattagaatacacaacccacattgctggaataggaatatttaattatctgtttaattttgattttgtttatttatttctttatttttttatgaatcactctgtattcccatcacatgactttctagaagaggagtttagccagttttaatagtcctgaaaaataagagtacttggaaaacagtctatttgtatggttgctttgttaccctgttgagtttatctactcatattttaacaaaaaaaaaagtaacatcaacttcaccaaactccaattcatttttgtttgcatttacatctaaaagtttttgtgatgaaacctacaattcttcctaactgacagcaatggtgataaactataggatacatgtggaagttccatgggtgtaaatgagtacttttgacatcagtcctctttggatggaaacctctataatatccttgattattttatcaagaattttattttgtatgccagattttattctcccattttctaactttccaagaatgctttgtatgaaagttactcttgtacaaaataaatccaaaagctttatttacttactctctgaatggaaagagttgcataacaagttttgctgcatatgttgtgttttggggtgtttgaattactagcagacctcattttttgctgtattttgtactatgcacaagcatttattactatacaagatgtgggtacatttgttgaaactggccaaacaatatcactggagttgattattgaagtgaatcatattctttcaggggaataccagttctcaaacaagagtgattatagctgtaagacaggggaatttgctggctaccgcttttcatcctgaactgacagcagatactcgatggtacacgtctcttttgctgaacttctgttctcattgtttcacattcactgttctctgagttctaagtttttcttcttgttcaggcatagttactttttgaagatgatgggtgaaggatcatcgagtagtagtatcgactcggttggaactgattcacatataattcacccaccaccacgaattgactttcccatatatcagtaattgctgatcaacatagtactttttcgtaaccccaaggggtggtctagtggtaaggactgttggaaagtgcaaggtaagtctatgttccaaggtttgaatccccagactcaaaagccttggggccattaagaggtgtctccgtcgaactgccagggccaaaatttcaaacaaaaaaaaaaaccagtattttcttctcagatttgatctcattcaatttatatatttctactctgatcattgtggtagctgctgaaggttccctaatgattctttccatatggttcagtttgtatttcagatagtgatatgatttaaaagtgtaaacagattttgcaatgctgtctgtcgacttctactagtttgctcatttgtaagttgttcattttcgtagtttaaaattgttttatttgtttcacccccaaaagctacctcttagatctctgaactgcacttaccactaactaactagatcaaatcaaacccccaagctggtagatttagttggcaacatattatttggcttgctttagtaatctgattaatgagttagactttcatcagcggaggaacaatgttgataccaacaaaagataaactaataccttatgggtttgttgctcactagacaccaatgcaaaatattgatatctggagcaagtgatgtggtccctccatttctattagcagtctgtaagatagtcgacggtgctctagacaggcctcccagtattcagacaccgtcgtcgccactaattggtttgttgctgctgcatcgttatcactaatcagtttgaacaactcaacaaacacatgaagaatcattaatctctcttcaaccatcccttccaatcacccaaccgtcttctatttattttcactaaagagatacaatccaccaatattataatgaacaaaaaaataaaataaaaaaaataagagcaacattaaataatcccctgttttccccaatattctaaacgacactcaaatgatgatctatcagaaatatatatcatgtaaaacagccccaactatgggtcttttttgacattacatgaaaataagaagtgaggaattgtatagttgctatccccttttgggagtgtttggtataaggtttaacttgatgggaataaatttaggattccttggaaattgaagatgggaatgttgaagcttaggaaagcatcattattctatttggtgtatgcatgataattattaagattcttaagaatcttaaaattatcttgtttggttgtatataagaatgtggtttaattttatttttttatttgtaaaatacaaattattcagtttttttttttaaaaaaaattaattatttctttaagaatattattattaatgttgtatgtataaaaaaaccgtatcaatcacattcgtaagttgaaaacaaatcaaggtgattgggtaaagtgggacaatggcctgcagaagttggtggtgaattatttttctaatttattttcggcttctaatactaaccggcgggaggtggtttagtgtgtttcgattactcataattcggagtttctcaagcctgtgttggaagaagaagtgaagcatgctttgttccaaatgcacccagacaagagcccgggatcggatggcatgacttctgcttttttccaataacattgggagatagttggtcatgatatggtgaagatggtttgagatttttttgatcgtggtgttctcctggagggtattaatgaaactaatgtggttctcattcccaagaagaagaacccttctgtgttagggaacttgcaatctatttctttgtgtaatgtgttggtcaaagtaattactaaggtgattgctaatagaatgaaaaggtagttggatgttgctgtgtctgatactcaaagtgtgtttattccgggtcgtctaatctctgacaatatcatggtctcttttgaagtcatgcactacttaaaaagagaaatgagaggtcgagagggtagtatggctcttaagttggatatgagtaaggtgtatgacatggtggaatggggtcatcttcatgcaattttgcttcaaatgggattcacggagagatgggttgatttgattcttacttgtgtcacttcagtgtcttatactattgtacacggtggtagagagatggggcctatctttccaactcatggtattcgacaaagatatccattttctccatatttatttataatatgcgtcgagggtcttttctcattgattcgagtctatgaatcttgcaagtggattagaggaatcaaagtttgcaggcaagctcctgttatctctcatatattttttttattgatgatagttatatcttttgcaaagctttctctgaagatgctacgagagttttgcagttgcttcataagtttgaggaggcatcaagtcagcaagttaatttagaaaaatctaatgtcttttttagtgtgtggcggggacaagtcaattggatctttgcaatactctacaaatggcagaagcttctgaacacattacttatcttagtttacctaataccttgggtcggtctaagtctgtgattctgggtttcttgaaggatagaattcagaaaagggtttaagattaggatggaaagcttctttcttatgctgagaaagagattctgattaaaacggttactcagtcattgcctacatatgtcatgagtgttttcttgctctcaattgatgtgtctaaagatttgcaaagaattatgagtaagttttggtggcattcaaattcttcttatggtggcagtattcattggatgagttgggaaagaactaagtgccctccaccgcaaccaacataacataaagaaagaaggaatcggtccgccttcatggtcgccttcgttcgtaaggtaagaacgaataaaaattcttgtcttggaccaggttatgcacatgaacaaaagtgattcttttgtgatcttgcagagtagacataaaactatgggtggagtgggctttcgtaatcgtcgtgactttcatttgacaatgttggaaaagtaagggtgacgtaaactgacaaaaccaaactctttggtgagtaggttatataaggctcgttatttttccaggggtaattttctttcagcatcccttgggaataatccaaattttgtgtggaagagtgtcttcgaaatcgcagaagattttcatgtctggggtttgttgggcaataggttatagtgtgaagtttgatattttgcatcagccatgacttctagatgatatgtgtccttttgttactttagatgcccaatatttggtgggccataaagtgaggtcgttgatgtatactgataagagtgaatgaaatttagatattattaaagatcttttaatgagcacgatcaacaatatattttggcagttccattgagtccgaatgtagccgatgatcgttttgttttaatctaaggagcatcatggtttctactcggtgtgtagtacatacaagttgatacaagctcagaaagaaaattggattgtagctgagtgttctgggttctggcgcaagctatagaatttgaaggtaccaccaaaagctcttaatttagtatggcgggctgcttcaaattatttgcccaccttgactcaattaagtagtaaaagggtcttagttcaaattatgtgacctgtttgtcaaaaaagtgagaaaactatttttcatgtgcttatttcctgtttcatttgctgctcaatgctgggagaggcgtttggctgaagttaggttgattgttactgctaattttagcacgtggtttgattaaattttgcaaaggtggagtaaggacaagtgtggggaggctgttattttgtgttgggggttatggaaggctcgaaacaagttggtttagaaccaaaagtatgttgcggtagatggtgttctcatctcatctatgaattgtctcgtgcaataaaagttagcccaaaatagaggtttaaaagtttcttttttagtttttgaagttggtaatggagcagaatttcgagttaaactacataaaaatacaatcaaggtaactattgatggtgtcattttttgtgatcaagcagcgtttggttatgcaatagcatttgctcatttttaaaaacttaaaattctactttcaaaagaaaaggaaaaaagaaaaaagtacaaacctaagctaagagtacttgaaatttttatgtggatagaatcatttttaggaaaatctttttagagtattcacttataattatgtgttaaatagattagtagaggttatttagttgaacttctctaaaaataattagattacaacttctccatataccaataataaattgacactaccaataaaactcacatctaaatcttaaatctattatcatcacttcattttttccaattttatttgttgaaaactagtaaattattttccaagtgcggaaaaacagtgaatcagtctttaaagttgaaggctagcttttacatgtataataaatgaataaaagctattgaatattaaattattattgttgcatagtaggacgggtagttgtatagaaaataagatt

SEQ ID NO: 16693 - DNA, 2316 bp, Cannabis sativa
tcatatccaaacaacatacaaaaacaacatcacacatgcaactataaaaggacaaaaaaagacttacttgggtctgtttgggtactgatgagttccaaaacaacatttctaccaattttatcagttatggcatctaagtgcttaacaagggtctctttaaagtcttctttgttcttgtttctcacggtcaccacggctctgaccttgaagctgacaggtttcgattcaactggagactcaactggggaagaagaagaaggctggatagccttattccttaccaaatcttcactgatagccgccacgggacccctcacaaccttcctcaaatgtagtgtcctcctttgttccaaagggaccaaaacaggactcaccaaaaaccgggtttgattccggcgaaaattttgattcaaaaacacttttgagtaagaagcagaggaagaaaaagaagtactttcaattatagaaccacacataatttctttagccagtgccatgttcttgttcttttatctgatctcttctctacacacacaaataactctgctttgagcagtttataagttataaagctgttatttttttatgtgggtgtagagattagaaatggaaaaaacagagatgatccgatggatttgattagttttatgtgtttatgtatgtgtgtgtgtgttatatatagtggagagaaatgattaaggaaaggtctcatatgacttacagtctccccacaccgtccacacgtttttctaaattcaagtttgtgaatcatttgccctttacttttttgtatgtgttttttctttttttttttaaaaaaaaaataataaaaaaacatttttcatttgggatattaaaaccattacaatttagaataagaaaagtcaaaatagactttcagcttcggagtccgtagacgcggttcgggaagcgaaagagaaggtgccgttttcttagaatgatttttttctcttgtttttttttccttgagaaaaagacacttatctcctttctccgtcaataaaatgacaaatatacactaattagtaggtatgtggtaactggtaactggtaacacagtcctaaattttttgttttttcttacaatgatttctttagtaaatgtatgtagttgagattgtgtactataaatttgttataagaaaattactcaataaaaaaacattaaaatataattattttgatattagttgaaatatatgaactacactattaaattacgtgctgatagaattattattaattacacaagaatggatcgagattttgtctataattttgtttttgttttttactttcaatttttctgcacatgttgatctattgactttgtcgttttatagaatcataattcgcatagcaatctagttatatatatatagctcaatgtcatcagcgccagagaagctatgaaagttactttcattaattcaccaaacacaaacaaaaccgttattttccaaacacaagttatttttttttatttttttttttaaatcaagctcaaaatatatatatatatatatatatatgtttagttggttaactatatattcagagttaacagatatatattttttatttatcttaattctatcatctatgaaaaaaaaatacataattagaacatatattttttttatgattataataggaaactctttaaataaataaattaaataagagttgtgtcaccggacttattaaataatctaacggctcctcaaatataaatcttccaaagaaaaaaagtctctaaataattaatatcatcataaatctaagaatacaaagaggagaaggagactatatatataagggtgctatcataaaagaaaaaaaaaattcaaaaatgaaaagtcattgtgtctactagtatcttctaatatatcatacgactattaatacaattaaatattaaatttcttataatttatatattaatctttataaaatattaaataccacctttaaatagtgctagccttaagcaatatatatcctaaaaaaaattaatagtataaaaagagttactaaaagataccattggtacttaatacacttttcagtgtcataccgctactgtaattaagtatcgagtctcataaaacttaataaaatattttttaaagaatatatcactaaccaactacaaaatattatctataaaaaattctaaacaccactaattctctataacaatattctataataaaataagcttataaattatagaagccgaatattgtatacgaagttacgaactttttaagtttgacacttgtataaatacca

SEQ ID NO: 16694 - DNA, 7845 bp, Cannabis sativa
  modified_base (4978)..(4996): a, c, t, g, unknown or other
ttacatcaatcatttctatatcttgttcttctatctcgaaaatacttgttcttgcaatttctcaattggaaccaagttgaagttgtcatattcaaatttcgatgccaatttggccaaagagtcaatgttcgaattattttctcttgaaatttgctcaattttataataatcaaatattttcaagttttttaaatttttttctaaatatttggtcattttaattcttccaaacacttgattcacaatcaactaggaatcgctaaggcaatgtattgccttggaatttacaatttctgctaatcttaagtttcttaaaaacatttcgtattcggcctcattgtttgaagctagaaactcaaactttaatgcataatgaaatctatagttttcaagagacaccagaattatgcctgctctcaagccattatcatttgacgagccatcaacgaacaatttctactttttaatttgaaatttcttccatattttcttcaatatttattcgtttgatcaaaaaatctaacaaggcgtgccctttgatggccgctcgtgtgtgataagttatgtcaaattgtcccaactcgaacattttatcaaatagagtaaaagcacatgagctcggcattgactgttgactgttgagaaaggctgtcgaatatgaattaacagaatttcagtactactcacgactctctctctctcctctgctttcaaaaaatccctttctctctctaaatactccgaaccttcctttttctcctccttcttcttcttctcttgatcataaacctataatcgttttttatatgatcggtcatcagaccaagggattgtgattttcatttagcttttcagctatgccgttttccgacgatcaagattgtccacctgggtttaggttttatccgaccgacgaggaattagtgctttattatctgaaaggaaaaatttgtggtaagagattgagggtgaatgttattggcgagactgatgtctacaagttcgagccagaagaattaccaggtgtgtgattttttgcaatttgatttttttttatcgattaggtcttcaacggatactttccgattgacttttgtttagatcaaaattgcgacttgatcaaacggttatatttttaatttaggttcttcttctgtcgattggttgtgtgttttagggttttaactaaatttgtgagatcaattttgttaagtcccaagttcagttttttttttttttttttttattattgtttttaagaaaacgatatgagagcttcttattttgtaggggtatgttgttttgagttcttgttgtgaggtatgtgatagtacaatacttgtttagtacctatgtttaaaattttggatgataattgttctgtttgcttgttacaattttagattaattgattggtattctgagatgtgagaattcaattgatatgcaggaatgtcaatactgaaaactggagacaggcagtggttctttttcagcccacgagacaggaagcaccctaatggtgcaaggtcaaaccgaggaacgaaacacgggtattggaaagcaacagggaaaaatcgctccataacaagcactactcgatctgttggggtgaagaagactctagtcttttacaaaggacacgcacctaaaggtgagcgcacggattgggttatgcacgaatataccttggacgaggaggagcttaaaaggtgccagaatttacaggtattaatttgattgatttatttagtccttcatttttggttttgatacattttgtaatgagtattcacttgttttgtttttcggtaatgcaggactactatgcactttacaaagtgtttaaaaaaagtggtcttgggcctaaaaatggtgagcaatatggggctcctttcagggaagaagaatggaatgctgattgtccagattttaacaggtctgccattgtggaaactccggtggaaagagttgatgaggctctgtcaaatgttgagagtcaggagacaatagttgacagtcaaaaatctctctctgatgaaattgaagagcttttgcaacaaatgactgatgagcctttgcttgacctcccagaggtcaaagattatgctaacaacaccccaccacaatctcaggtttgttattgagctgacttccactaatgctatcccttattttttttttcttctattattgatattataataagagcaacaaaacaaaggataaggatttgttaacaaggaaaacaagagccaacagcaccataataaggaaaattagctcaagccaaggttgtagataaagaaaattttgaactggtatactgacacaataacttaatttattgaaatttaacttacttccactattgaggtttaataattgaattagttaattactttgagcataagaagctgcagtctgctagcttttttatatattcaggcactagtaaattttattttatttagcaggttttgagcaacaatgatatgcagagtaatttggtggactcactcagcagagaaatttcatttgaagaacctgttgattcattccatgtcagcggtgtacaaaataatgtgcaggccaactttgagcacacacattctgatatctctcaattgcaatttcatgtgccatctgaggttgcattttctcccaatatttatgaacaggaggtttacgtactacctgtggaagactttattgagatggatgacctttttggtcctgaacctactacaacagatgcggagaaaccactggagaactttcagtttgaggaggtagatggattatctgagttggacctgtttcatgatgccaccatgtttttgaatgatataggagctggtgatgatcagtcaaggatttcacatcaatacgttcattccctagagcaaaatgtggtaaactcgtatcagtatcgaagaagttctgaacaagttggcgaagacgaggttgttagtcagctactttttgaagttgctgaccaaaatactaatctttattatttacaaggctcagaccaacatacaagtctgttgcatttagaaggcacaggccaagtaaataatcacatgtatttagaaggcacagacccaattaataatctgctgtatcaagatattgcaaaccagatgaaccatcagtatcagttccagccagataatcaagagagaagtgtctttacttctgcagagtttgatgctggctctcaccctaattcgtcttcaggtatataatctttgcagatattttctttgcacagcttcgaatgacttaacacgttaactgagctgtgtatttggttgttgaacaccattcctgtggcacaaaatctacgtggatttgggattttgggccagctttaaaagccctcttctaaaacaacttcccttctctcatgtatcattggtttcaatgattggaaccttttaagaaaaaaaaatggtattcaagagaatttctgttagctatatgattttgcattgcttaattttgttaatttttggtttattctttggtgtagtttgtgatacttccacactttcattgcaaccgactcaaaatcaaagtggcaatgataatagtggtaacaatagttggttctcttctactttatggtcatttgtggagtccatacctactactcctgcctctgctgccgaaaatgcattggtgaatcgggcttttgaacgaatgtccagctttagcaagttgagaatcaatgctgctgtgaatgcaacaaccgttcctgcaggtagtgattctgaaaccgtaaagagtccaccccgaaatagaggattcatcttctttcctattcttgtgatagtaattgccattttatgggttgtgctaggaactgtgaaactatggggaagtagtagtagcaacagtactagtattgcttcatgaaaatgtgtatattgggggggaacaattttggctgatattgatcttaaaattaatgggaaaagatcaaagaaagagagagggggggcagatttatatatgaattttggttgtaagggtcaacacgttcgtattgttaataggggttatatatgtatgatatataagggtgtttgagttagtcttatatgaaattatgaacaaatgcatgtttaatttttagtatattcatcactaacctattattcttttgtgcaaaagctctcttttttctctctttttgctatgctttgagtcagagtgtaatgatacttgcagacaagatatggtaaaacaatattacacacgatgacctgaccattgttttattctgtaactttgatttaatgttgtgttatgtcattctgtataatgttttagtgcatattttgttcaaagagtgagaagctgtttacgagccactggactctctgttgttgatcatcagagagtcagaaagattaggtatctgttcgtgcaagaattttaagtttttgtccgaagctgtttgttcgagccacttgactctctgttgttgatcatcagcttgcaaaggctgcagactaactgaagagtcatatggcaaattgtaattgaggttcaattttgttagaaagattaggtatctgttgagtttttgtacaatgactccgaggctgttcgttcgagccacttgactctctgttggtgatcgtcagcttgcaaaggctgctgcacactaactgaagagtcagtcgtatggcaaattctaattagtgttcatttgttttagaaatattaggcatttggattggtgcaacaatttttaacattttggatacaaatttctttattataaatatatatgtgttaatgttggtttataatataactaggtacatggaatctgatctgatttgtttttatttttagtattattattagacaaagtcattggtctctgaaatgtcataagaaagtgatgttaagatagtgagccatcaggtttgacttgccttttattattattattattatnnnnnnnnnnnnnnnnnnnattattattattattattcctttaaagcagggtactcaaaattccaattagaaaggaaaaaggaaattggatatcattttttagtgcttttgtttttttaattaattgaaatttattataaatataaagtaatctagcatacttgattaaaacatataatatgcatagtaattaatgttcactattatgtaataataatttgtagctttcaaaataataataataataataataataataatcatttataattttgatttaattgtattttttacttcttttaaattgagattatcacctttttaataactaaatttaaaaaattaattcaactcaatttgtaattgaattgggtgttgaatgtgattttaactagattggatagggactcgaaatagattttacttggattggattgaatttattggtgttgatatggactaaaaaagaacagaaaagcaaaattttcaagcttttaggtctttatagaagaattaagataaataacaaacaaaatttacttcttttacataagtttacctaaccttgtgtcaaaaaagcaaaggttttgttcaatttttgttaagaagaaaagtaatgtcatataaccaatggtttaatcatttggctttagcaagtattctttactagttaatcttagattatatcttaatgtatcagtttatagcgtatttaaatagataataaaaataatttgatagtacaagaaattgagaacaagatattcaagcgattttaaaatagaaaaaagtttgtctaaggatcaacttatgcatattaactgctttttcctaaagaaatacgagttatatgaacaagagcatcatcatacggtgtgatggattacatatgttgtcaaacaacgatggtctttgatttttttttgaagggttctcaatgatacctattgagagtgtttgttatgtgagtttgagtttttttttttaaagagtttatatgagtttgagttgaagagagtagagttgaagggagtagacttggaggtgttggaggaaattaacattaccattattttaatttaaaaagtgaaacccacttagaaacataaaatctctcacattgtgggtaaaagaatcacttgtggagaatatgaaactcaagtgtataaaaatatttatattatctactaaaaatctgtggcccaccacatttccacataaaaaatgtaccaaataagggattcatttcaaatgtcctcacatcccaacactatccttataacaaacgccactttagttattacaatttaatttaagtttatcattctcatcaagtctaaaccttataccaaacgttctaagtataatataaacgacacaaattactcacattaaccatgtaggggaatagtggtgttaaaagacgccatctccaactcaactgcaaatgttatatccaatgtgatttttttcacaaaatgctcttaccaaagtgcaaaacttatcccattttcatgagaatctacactgtcctactaataataatgggaacggtagagcgctacatttcttttctttttgtttttctactttttaataattaagtaataccttttgggttataattagaaaaaatttagtgctaaaataattaaatatttttttaaagcaaaaaataattaaataaattaatataataataaggaatactttttagtataatttataatactgaggttagatttgaaactttttttagtgctaagagcttctcaaatgagattgtaaaattatgaaaacagtagagttttgacataatattactctaaataaatactaaatactaccctacatatgtgggagtacaatgtcccattaataatagtggaacactctacactgcatttttttttttacttttcaataatttaataaccactttatacaataaaactaataattaaataatttatttataatcaaaacttatattatattaataaaataatataataattagtaatacgttttagtgttgtaattggaatgtaaaacatatagtgttaaaatattacattttgagactcgttcgtattatgtattgtactagtggagtctcacgtgctacgcacgtgtggctcgtaaaaatatttaagcacaactatataaaaagaataattaatattttatctacgaaatttataacactattaaattgtatcctctaaaatatacatcatgttgacaaatttttgtgaacttttttatttatagaaatatagtacttttgttcttttttatcgtttcacagttcatgtgtcattataaattaattaattttctcatgaacattgaccactactaaattatgccttttcttaaaaaaattaattaaatattaatccaactaaaatatattattgttgatttagataaaaaatttacattttcatttcttatgttttgagaatagcaatttagtatgtaaagaatatgaaaatgattaatggtaaatatgaagaaacttaaatctgatttgtttaagtgaacttaattttttaaagaaggaattttaaatattttttttttaagatttattgaattttcaattaaaaaaattaagaattaatacaaagattaaaaaatatatataaagagacataatatgataatagttatagttcaagacaaaaaccctaattattcgatattttaatagtaaaaataagtaaaatttaacataaagattatgattatgtaaggagaattttttaatcatccatatagaatgataaaaatactaattattctatttaaataaatcttaaataagttgtattctttattttgaatttaagtttttctttt

SEQ ID NO: 16695 - DNA, 3623 bp, Cannabis sativa
tatcgctagtcaatcgcaacgcaatatgtcaagaaagtgctaggcaccatcctaatagcaatgctcttatttttttttacttcagaaaacaattataattactgttctagaaaaatgtgctacgtaattaatctcacaaataaatatttcctcaagaatttcaaacaaattttggtgttatatttcgtttccgaaaggaggagaatatatatatgtcacaacaaatcgattggatgtatggatttatgtaaacgaaaataacaaacctgatctttctccaagagtctatcccagtcattatcttccaacaaaaccctagcttcgtcatagctcaaagatacacgataattcaaatctccaagccaaattattcggctgcatgaagtttattgtgaagataataacatattaattaataatatacataacgaaattgaatatatatatgtacatgtgtaatgtgtatagatactactacgaatattgaaattaataaattaaccaaaaaaagttaaaatattgaaacaaattaagatgcgcatacgtactcgtgatcaattattttctcaggggcccggttatttggcttcctgcaaatctttggaaactgtgtgcttttaagaatctcgctcacatcagcatttcttttaatctcatctccctccttctctcccgaagctaagtgactacaaatgaagcaaaagcttgtttggtgcactgacatgcttatcgatatacatccctgaaaatatattttaaatgtggtcatgttttaagagcattctttgaatttttcataggttttcaaatagtcatgtaatgtaccttgtttccgaggcaacccatgattcctcttccaacagaggaaattctgaggtgggcaatgtgtgggattaagtcacttcgagcccacaccgataagaaaagcccaaccatttgcttacttgctattagtctataacttttatttgctggcgaagatgagagaggagaagatggaatctcagcaatggcaaagaattcatcgacgcagcttccataacttgggcaacgcccagattctgattccgatttagtactcgcacgatcacgatgatcatcgtggaacagccgtttcctcagcctcctccgcggctgtctttctggcgacaacgaaaactccccatcttcggggcagttgcaagacttgagaagtctactatcggctctcaaactcttactaagaacttttagtgaaggcttttggaagaagtgaagaccggtattactgttattaggcttattatttgagtacttattattcatgttgttcaacactattttggagttgatatttgtccctgagtctgaatacaccgagtcatggttcggtttattgagagcttggtttataaggcttagccatttggctgctggctcactgtcttctatcacaagaacgtttccagcacttaggggaacaatttcttgaaaccttgaaaaacaaaattaataataacaaagatgttactttcatataaaatttgatacttaaacaaaaaaaaaaattaacattattattattaccctaaaacataaatgtctgatgagccttctacttgtaagaaatcttcaaggttgagaccattgtttggagtttttcctccaacattccaggttgccacaaacatcctgaaaccacccattttaacgtaaaattagattattaatttgttttattcagtaaaaaatttcctcatgtataaatatatatatatatatatatatattatgtaccgcaattctttcatctctgttggtggcgtcatagaataattacgttcaaagtaggacaagtttaagccttcgatattgcccgaagtcctctcatgtctttctgagaaattaaaataaattataccatcacatattatagatatataccgtaatatattttatttggttgtcccaaagtctagctaaggtgacattttttttttcaccaaatgattagccctgtacgatcggtctatgtgaacacatttcctaatctcattaatttctctgctttgaaattatgcagattatatttatggagggggaaaaatcaacacagattcttgttaggtaagctaccaaaacacaagaagggataaggagaagacttataattatcgacctactacgtggccataacatatatgatcaaaactgagctattgattatgtaacataatagttttatcagcaatggttaacgccaatattttagtattataatattgttattggtgtaattaatatatttattacagaattttaaaatttcttatattgtgcacatattactagggatgaaaattccagaaagcaaagtatgcaccaaataaacatttcttgatgtaatcattttgtcacgatctaaaataaataaataataaaattcacaaaggataaaaaaataccaagatcatccagtagtgcctctgcatctaggctttctccattatttctctttgaaccgaaaagcctagggattatagactttattcatccgaaaaagcgaaagaaaagctaatcaatcccacgaaaacccataatttttttttatataatttaacacaaaattaaaattcccctatatataaatcatattattataattacaagagaaacgtcaaaaaaaaaaaaataatgcataccttcttcttcttctgatcactctttgtggatccgtcaggggtggtgggggaggaaggagatgtagttgtgagcgtcaatgggctgtcgctggtggtggtggcggcagctgcggcagccatggcatcagctttggccattgaaaatggataagcactcgatccaggaacacattcaatatggtgtggaaaaatatgtgattattttatggattttcggttgtttgtttgtacgtttgtacgtttaattaaggcaaaggttaaggatttgtgcgtttaattactcttttgattgatgattatatggaatttggattatgttatcaactaattaaatcaaaattgtttgtttgttttttttttcatcggtttcttctctttgtactaataatgtatttcttttctttcttgtgtttccgttttaagaatgagatattggtgccaaatctttcgggaacagaaacggtttagtcacagttcacaacttataattacaacccaaccatattacaaaaataaatctcatcctttcccatatataaccgaaatatttatgacattattaaataaaatatagtttacttttttaagaacgaaaatgtttttttttaaactaaaaaaataagatcatataacgatcgagggagggtcatcatgatcgtgatgacagttttgttgaattgtcatcctcatcatcataagttaattacaacataatatagcgcacttactaatcggttgtattatatacaaaaatagtaggagagaacatactatagactgatatactttgtgacacttaatttcacaaatcaattttatccaattctcacatttattatactatttacccttccaatagttaattgcttttgaatgtcaagaatcattgtctatgtatacctatgtatatactagcaaaaaactacgtgcgagtcacgtata

SEQ ID NO: 16696 - DNA, 2030 bp, Cannabis sativa
  modified_base (1294)..(1302): a, c, t, g, unknown or other
  modified_base (1975)..(1979): a, c, t, g, unknown or other
actagtcattgttacttctaacatctttgatatgaaaccaataattatgaaaccttggagctcaacaatagattacaagaagaaaaatattttttttctgtcccaacatgaattcaattacatgatttggatctcaaatattggagaaagaaaatatttttcaaaatagtaagccaacttggggagcctcttcaaattgataagataactgagcagaaggaacgacttgcttatgcaagaattctcatggaagtgaagattgatcaagaattcccaaatacattatcctttactaataaactaaataaggaaatgacagtcaatataatatatgaatggattccttataaatgcaacaaatgtttggaaattggccacacattgcttgattgcaagaagcctgaagctataaagaaacaagaatgagtaccaaagaaaaaaaaaaagaaaattggggaagagactaataataaaagacaagaacacaggagaggttgatgaagatggtttccaactagttaaagatgggaagaaagacatggtggaaatatattctgctactataacaaccaatgccttttcgatactcaaggaagtaggagaacatctagagtttgaaaaagagagcaccaagcgggggtggagaacctcctacgatccatgaatagaattatgagttggaatgttaggagatcaacaaaccacataaatagactggggttaagaaattaacctcgatacttgaagttataatttggttagtcttattgagacaaaaataaaagctttgaaacttggagcgatttatttgtctatatttattagtttgtgtgtatctacaaataatatgtggcatccaaaaaggagaattttattatgatggaatccattcatgttcaatgttaatattctctactgctctagtcagttaatgcatctagaggcggaggctattgcgagaaaggaagttttctttgttacttttatctatgctttcaatgagaaagcacgaagagaaactttatggaaggatatgatgacattggctagggggatcaaaagccctaggctagtgttgggaggcttcaacgatattcttagcctcgaagagagggtaagggatagagttagaagaacaaggttgaccacttttaaggagtgtatttaagaatgcaagctttaagatgttaaattttagggctatttttccacatagagcaataagcaaagtaatggtgatcggatattgtaaagaccacatagttttaattttaaaattagcagataattaggnnnnnnnnntgaaaattatttattagtattgaattaattatttatgatgatttattcgaattcagaatgcattttatatgtattttatagaaatttcataattttgcatgttttgtgtccggcaacattggaacgcggtgtatggctatccgaatcacatcctagtacttttagtatagcgtgactatattgttagacattgagaatgtcgggaatagacaaaattttagaatttcctaaaatacccctaagtgcctttttatccatttagtgtgggaggggcaaaatggtcatttttcgccataagtattttgtcctttagtggaattcttaattgttttaatcagatttttaggttaatattaagctgattatttagtagataaaatcaattctttttcccattattcaaaaatagaaaaaaatcaagaaaagggttctctctctttgtctctctctttcgaaaccccatagaagcagctagggttgctgcattttttcttcatttcaagcttgatgcagcaaggatagagtgtctttgatccctaggtaaacttcttgtaccttctcctttagtttcttaaagtgtaagaaaatggtttatgcatgaatttgagatatttgttactgttgttgctgtagtacgtttaaaatcacgctaacacgcctatgctagttaggnnnnnacaatttggtatcagagccaccaggttatcttccgaagatcgtcacgacat

SEQ ID NO: 16697 - DNA, 3667 bp, Cannabis sativa
gtatgcggtgatcaggttgaggggtgatcaggttgaggggaagacaaagaccgagtctcagttgtgtttttaattttaattttctcttataaagggcaatgacacactcagtgagttaggcaataatataactcagcaactggccatcacattctctttaggtcggttctctcttcttttatagtccaaaaaatgcgttttcttttttttttcctaaatgattttgggaagtgggaactaaaaaatctgcatatacgagacgagagagagaaagcaaacaactatttttttttcttttttttttgtacggttgattcccatttattttatttttctatcatttatcatttattttataataatttttttaattatttaaataattataatgaggtggactaataaaaaattatggcgtgtataatgtgtacacagtggcaatctacctaggcatttaatagattaaagcaacgtaatagtagacagcacatcagaaacatagtttggacgggtttacccaaaaattttagtacatggagttgatcgtgccaatttccaaaccttaaaattcagacagtttagccgcaaactaacttttattttttaatagagatatttgcaacaaaaaaattctatgaagtttactttgctgcacttaaatacttatgtacatttttttggcggcaaaaatttttgtatagtttatcttgttgtacttaaattcctttgtaaattttttagcagtaaaaattcttatatagttcatatttgacagcaaaaatctcaatcattatacttttgatgcaacattaatccttgagttggtagcaataaagggactaatattataccaaaatgagtacatagggagttttaccgctaaaaatttaagtgcaacaaagtgaccacatatggatttttgtcgcaaatttctcttgataaaataaagacaataagtaccttgaagcaattgtaaattaagtgtataaaggtcatttaagtaggacgtgaataacgaatatacataagaaagagttatttgtgatgtaaatacctaagtttatttcttggttgttatttactgagattttcaaaaactaaattaagtaagagctaaaaaattaaatgaatgtataagtaaaatgagacagatatttttacgttggttaggcgttaatgatccctagtccatgagtatatgtattggccttaagaggctttgaatgtattacagatgaatcattacagcttgaagaaccctggttcttgttatagtatttccccttaggtttttcttagtgaagaggaaagcttagagaagatcccttttactcctttcataaagggataatgggatttatataggcctagaccagggtctgggcatacccacaacccactagggtctcttatgcaaaataagcccactattggggtaaatgcattaaatacacgactgtgaggccaacggtagtattctggcttgtgggacagacctgcccgtacgaaagagtagtcgtgcaatctagacaagtgtcacacgtgggtaaaactactgtagacaagaatgtcagaggcgtcattggacaaaaggaatatatttccacttccagtacgcgcactatcatgtcctaacataggggacaagatttgatttggtaggcccaggcgttagagagcagccacgtcatcatataagggcttccagatgcacctttggggcttcccgtccagatatgcttcattaatcgtctagaggacaccattcactccatttcttggaaggctagatgggctctcgagaataggaggatcctatttctggaggcgaggctcttagagatgtgatgggctagggcccatcttcggattggaatgggcctttgtatgctggaaggcctatgctagatattatgcggaccaaacactcctctaaaatgccacatgtcactcgtgcagaaacatagttaacatttaccaccaagctttcaaaacttgggagtggtggaagcttgaagtctcacctccgaataactttgagcacttcggacacgtggattgttttgaagaagcaatttgttcatcttctagataacaaaatgtgaaaggttggggatttttaagggttatttcttgcactgcatacgtgtcatcgttttactaattcgtgaatttcacacgttcctaagaagcatgagaggcctgagatgtcaaaatgacaactatttgatgtcagcatgtgcctcgaggagaatattaatgatgaggaatacctcgagtattgtaaggtacatttaatgttgctcttctagttgcccattcgttggattaatattgtgtttctctaggtgagatatgagcctgtaatttaagagcacacggattgccaaaccctcatgtaaatacaggtgagggaaaaattctcaccacttttacccttttggcaatttgaattcaatttcaagagaaaaatccagagaagaaccagagaacctcattctgcaactttagtgaatgttcgatctcttctacattgcaatccatcatcttctacgaattagagcagaggagtaccctgatgcacccccattgagtctaatagtaacccacccctagtcactagaacctctaaacattcaagcaaacatcaagagaatccttgactggcattcgcttgttgcgtcggtcactgccacccttatctaccctcacttcctccaacaagtaagttccctctattcttttaacaccataactttatgtttctgtagagatttgtgttagaactttaatctagaataactattttcatgggaatatggggtttgatcatatcaggtttgggtagtctagagatgacagggtcattttagcatgaatgtaggtaggattctaggtgtcttatctcttaatctatttttctgaactgggttgatgtggatcatacctaagtgaaactaggttcccatcctcttgtctagagtcattagggctccagatgatacgcttaggtttatgatgtttactctttgtgttcccgactggtcgtgtagaagtgtggcttccataaggactaaaatgtgaggacctctccaagcagtttgtaggggaggccttcccaatgcctgtgctattctccttgagtttagggtattaacttcttgggtttacctttctttcagctacaattagtatgtccaaggacaacttcgatcttaaagcagtggattttgtcgagaagaaactacaattgggctgcaagaggtggttctgaaagaggaggagggaactctggaacctccattgaataggaaaggaaagaagaaggttgttcccataatctacaactcgtccatttgggagatggaccaaattgacaacaaattctggagcttaggaatgctccagaaatacgatgagttttggggcgtcaacaacattctgggactatactggcataggctttcccttgtcagagagtctactgttaagtgtgccaatatcttcagagcatagagctaggcacacataatgtgtggggccacttacctctgtgaagttattttgccaacttccgtgcgcatataaggatcatgcccttctagctcatcatgtagtggtataagcttctggctagatggtgttgggttttatgccctaaagaaaa

SEQ ID NO: 16698 - DNA, 9481 bp, Cannabis sativa
atacaataagagggagtctatttatacataagtcaattactttatatgtttgagatctatgtaacgaatcttatccctgagcgtggccccgtgcactagtaaaaatctgtaaagattattgataacacgtacaaaaaccttatgtatttttatttttttacactgtttgttttctaaatttattctacaattacagagttgtgttttgtatctatagaataactatttcagtaccatatttattattctgcatttaattatttattaattaattaataaattagtaatactaaaatacaaaattttagttttgtattttttttctctaatagataatatgtgttatctcaaatttttggttgggtgacacctatccttacctcgaggcctgagcggataaaagagtctcatggattggctgcccaagatgtattcaaggtcgatagaagtaatagacggattaagtgtaactagccgcacatcattagcacaaaaacacctaatcagagagaagtggaccgacccgcgtacgatctgaccaaggggaaaacacatgacataattatttttaatgaagtttcctattttatgtgtaatcaagacccaattaaaggggaatcccatttatacttctagtattttaagaagatcagtttattccctgaattggtggattgacagcttgagaaaactaaattttattttgaatattccctataaatagtggatcaattctactgtaaagggatcccaaaatcatttgtttgagagaggccatactgctcattttaactgtaaagctttgtaaagctttcgagagagatcaatctatttttgcttctctactcctaagtttatatgttttgcaaagattacatgctttgcacacaccgtagaatttcttatttgaaacaggtatactacatttggatagagccattgtgacaattctagcagcagggtggccaagcctgctatgccacaaagaaaacaaagagttatttacatttgtttcatgagtattacattgagaaatgagggatggagaagacacagatgagatagaatttggctaagacttgggtacagaattgagttgagtgccttgttcaaggttcccagccaacaagatcttctaggttgcaatgtctttaacacaacaagaaaatgggtaaaacttaaagaaaactacattatcttgagtaaactgagaaacattaagtaaattcttggtgatagaaggaacatgcaacatattatgaatgctcaattgtttagatgtaaagggagataggatggaggaattaccaatgtttttgatgctcaagccagtgccattaccaacatagacttgttcattacctgagtacaggttgctggtgttcaaatttgcaggatctggtgtgagatggtatgttgctccagtatctgggtactagctttcatcattgacaaattttggagtggaatacaattcttgcttgtcagctaaattggccatgggagagaagtttatgaaagactcaggtcctgtaaatgatttgtcaaagcggtaaaaacactgcttgatagtgtgacctattttatggaaaatctagcattgtatctcttgtccccaattgttggtctgaccacgaccatacgaagcaggaccacctcaagttggtgtgttgtgtgtgggaccactgctattggatggaccacctcgtgccactgaggtatagtatgaaccactattgttgttgaaggagggaccactagagccacgtcctggcccagaagtaaagcctggtggtacagcgggagcagaataaagagtatgactttaggtgttagggctaggggttctggtttgagacaagttaacctcagctttggagatatcaagatttttggcatttttctttattcaaactgactgagccattaaccaggattccagttttgcaacagtataggcctcttttcttgtggtgatcaaggtgacaaatacatcatattcagatgttaatccattgattatagcctctatatgatcttgaggagtttgaggaggtccaatagtagctagcagatccacaatgcctttgatcttgagaaggcaatcattaagagaccctgttagctttgtgtttcgaagataagttttgtagagacctatgttagctgcatttttagtgttgtgtaatactcagtgagattctccaagatttgtgaagtaggatcacatccaatcgttcgattggtagtctttttggacatggaggagagaaatcaggaaataagaagattgtcttgttgttcccagtcttcaaactctggattgacagtgtttaatctttcatcagctattgtcaagaactttgctctagcacgagtagattaaagaaatttttgaagtcggctacctttgattgaggctagaacttggtgtttccagggaataaaattgtgctcattgagttttatcgacagagaatggttgaaggagatagggtatgatctaggtagagtaacttgttgattaataagtggtgagcattgttcaattttgatgctctccaccagtcgcggaactaggaatcttcattgatgaacgattggagctctaataccatgtgagtgtttaatctttgagagagaaaaaaggaagaaaatagagttgttcattattgatcaagaaatagtgtacataggattatatacaagagctacaacaactactctaaccaatacactgcataactaactaataacagaattagttaaaacaattaactaacaactagctaggtgacatcatccttgacaatgtttaatctatatattgggaacaaaactattataattggatccagaataaaacaaaaccaatacgtgcatatatttgaagtgaatataccaattgcaagaaaatagtctcatgaaagatgaatactaccatagattcttaaaaattaatttagagatattcttgatactacatgttagaacactgtaaatttaaatttagccctaattaattcttgagaaatttaacaatagatttaaagattagcggaagcataccggagtttatagaatcaactttagaatagtatgatcttttaattttgcaccaaaactttctctagaaccttaatctcttgataatggagattcaagagtgaaaatatacgatgcaaattggggattattacctgttattaacaattgacaaaacagtaactaatctttatttactatttctagtttagcctttcatcaaattagaaattatctttatggtatttacatgttaaaatcatgacaatgatgcccataagtcgtaaactttattttaaaatagaccacataaatttaactcatttatatgaaaacccaacacatattttatatatacaattgtaactctaattaaataaatttctaaggttttgatcgctacaagaaggctaataataaaagtcacagtttatctaaggtgggtaatggttgtactgatgtggttaaataaagaaagcctcgcctcgtggtaatttggtaaaagtcaattgtgatgttgctcttaattaatattgataagcaaagatatgggattggtgttgtagtgagaaatagccttggtgaggttcatgcttctgctaccttaggtgttggtgtttcggtccagccagttattgctgaagctttagctattactctagtctgacaatgtgttctcaactgggatatacttgtgttcttcttgagtctgactgctttaatgttatcaatgctatcaataatcgctcgattggtcattcttaccttgggtgtgtattattattatgcaactagtttgttgatctctcttttgtctattgtcctaggattgtcaatagtattgctcaggctttagaaaaacttttctcaactgattccacaataatagcctcttaatatctctattttcattggatttgatttaatgtaacagaattgtttcaaaaaaaaatgtaacagaatgagaaaattatgggattcacatttaaacctttcccaatttatctcttattttttgggtaactaatgtattctatcttgatgccaattcactgtttagggacctttttacacactaaagaacataaagaacgcgaaaaatatttgtaatttttttgagagatattgaaaaactcacatgatcggaccttgtaatcttaatattctttatgaagcaaggccaaccctcaatgcagacataatgtcaacgttgaaataaaaaaaaaaaagagtaaattttaacaccaaatatggtattcgttggagattacctttaactaacaagtaacaactaagagaaaacaaaaatatgctatttcgtaaaagaaaaaagtgcatgcttcaagttacacttaaatatctaaatttttattttttctataataaaaagatcttcagttacacttttgaaatttccgtacttattattaagtgttaagttactctctttctctactctatcgatggtattcaacctatcagtcttaaaatgaatggaaattgttgagtggggcttggcaatgttattccctccaaaatgagaagaaaagagaaggaaaaaagtttcataattatataggaatatcaaactcccagattaccttttcctctaaattttgtattattaacataacgtttagtaattttataataatttctttccttcttacatatcaaacaactatgaataaaatagtaatacttccattccataggtgaaatgtgttgtttgaattatgatttcaaaaacctaaataatgctaaattttcatgtgttatctcctatatttatattatacgttgtcatataaaaaaaaatagatgatctataaattctctaaagcagaaccattttaatataatttatttttattttcaaaattttaattttaaaaaataaaaataaaaataattttactgaatatatatcttaaaaatatttttttcacttaaaaaatatatatttaaaaaattattaccaaaccatcattatttctttaatatttaataaatagatttatgtaattttaataaaacaatgtatatagtaataataattaaatagaaccggatgagaaagaaagaaaaatatgaacgccacccataattttatatattgagaaatattaagcatcaagcaccataagatcttattgttggtgtattttaatatcgagtcctacacattttaattaaataaatgatacaattacagagtgttacatcggtatagtgttgggcaccttaaaataccaaatatcaatactctaatttatttgacgcaagagaaacgtcaaagagggagtcactagcaatagttgacgatgggaatcaataatttagatgcattgttttattaaacgtgttgaccttgacctccttattctgtcacccgagatcaaagtcaacaccgacaaacatctcttgattcctcgcgattgagtcgacatggaatcaaactaccgtaccgaaagcttaccataaagccactccaaaccctttctattctctatatgaatgatcaattgaacaaggaaccctaataataggaaggatgccaacttagagcaagtagggtaagaaaatttcatgcattaggaatctaaggtttggtacgtcgtattatatcgtattatactctattgtattgtattgtattatattggattatatatcatatttttatataatattatgttaaattttaatttatactaaaatattatatttatatgcccataaaaattaatagtacgtataattttacataaaagtattatataaaatacaagtcaatctaatattatacaatataaatttttttcttctttttctctagtagatcttttatcaattgtagtggttaaagctttttaatccatcataaatatgatgacaaatatggaaattataaattttataacttttaatgagattatgtatataagattttgtatggttttttttatataagataaatatattataacttttttttctaagttatggatctaatttcctatgtttatatacaaaatttaatttaagccatagtcttaacattaattatattttggtaggtacttatctgaattaatctttatttttcatttttttggaaattttcccctaaaatttagaaatgactagggatgtgaaaatattaaagtaaatagaaatacattagaaaaataaaagtcaaaacgccaaaaagtattaaatataatatcaataacaataataaatctttaatactacatgataataaaattatttttagtaaatataatattttttttttatgtattacaatttagaataaaattattaactccacttaaataaattttcaaaatatatatttttcattatgatataattatattcttatatagaggtgtaagttcttaatattgagacttaaaaaatgtatggataactataatttagaaattattcttatttacaattaatcaatcaaaattataacttaattactatatggatctactgtatataaaaaattaaataataaaaaatttatctgttataccttctttataagaatatatcataataaaatgtagccataggtaaagtcttttccgcatgaaattaacaatacttatatatttactagtatcaacgttcatgaacgttgtaaggtaaaatagaaaagaacatcacagaaacacgtcctaagactcacataagagttttaaacaaaatcaccaagcccacttgcgtaaaaagccccaatatattttagccgttttacttcaaataataataaaggccaagaaaataataaacctcgtaaatagacagcccaagcattcgattaagacacgcagagaaaaagaaaaaaaaaacaattatggacatacaacccaattagcagatgtaatagtccatactccatatagctccggccgacgacacgttaaaacctaaaacaataaattcctcccaaaacccaaaatacaaaggtcaaataataattgtaataataacaataattatataataacacatccccactatgcgaagaaaacaaaccaaaggattgaaaaatacaaccccagttgttagaccaccacctaaaacaaagttaaaccaaggcgatgctactctcaccacccgggggtttgcgtacgccaccaaggtagtctcgagactctaccttcccatcagcaaagatatcatttccactaatttcccgcagttttgccacgcttagtgatttttcagcagacgatggggcagcatcccccttgaatatgtcattccctgagagctcattaaatttcttgtcgtatatcttcttcgccgttttcagtggttcatcagcagaaactacagtgctctgacctccagcgggctacagtaagaattgaagtgtttcgacccagttagaggtttaaaggatggtataaaagcactcccacatgtaagtcaaaattggagagagcccaagtgaaaaaaaatctcaaattaagatgattataatgtcatgtgtaagaagtgaatctgtacgtgaatcagcaattgatctatggtgatgattactaatataatatgcatgcattcacacaaattcagtagaactagaaattttgactgaagtacttacatcaggtgaagcagattctccaatatctatgtgtcctctcaaatccagggtgcgcgcagtagtaggcctcggcaaaatttcaggagggggtgcaaagatgtcgtgtccactaagctccttgcatttagcatctgaaagctgcttcttcaaatttgcatcctcactttccaaggttccactcagctcgcgctgcttggccacctcaggaagtgatacaggctttttgggagaaacattatcatcttcagcgaatgaaatgtgactaattccagccatcgcttgctggaattttaaaccattaaaatacaaaattacctcataggtttcgccaaaatgatattaccatagaaataggcaatgctattaaaatgcaacaattgttcgtacctggtacatacgtattccagttttgttatttggggtagcactggcattaccagcttctgcttcctcatcttctccatcgcctacaaatattccactaccagtcatctctttcattttataccctgaacaaggtttcctgaataatgcaaaagttcactgtcagagccacggacatgggatatttggtgtgaagtgaatcaaagaaatttacagaaatattctatttgaaaagcctatcatagattcaaatgcatttacatttgtgataaagcaaaagacaacggatgaaaatgcaccaaggaacattatgcctctttgggatcatttctgcttaaaattcttcatatcttacacctcgctcttaggtaataacatgcattaaggagaaacaatggctagtgaagatggaaaatgatcactccatttgatgaaaaatgtccaagcatgcttttagatggaacaaaatatatatatacatatataatatatgattgacacagaagcctacaacaacattttctgaaagaacagctcactccaagtctccaactacatgtttaaggtgaaactttaaagcatcaacgagttgcagctacataggaattggtgtagatatgtccaaactaggctcctgcctaactatggggaacagaaaataaaaacaattgctatttaagtgcctaagggagactggaaactcaaactttgtggagctaattgtatgcctaaccatcgagcagtgtgaacatgtagttcaatagtcacaatatttagttaatccgccatctttataatgttagctgtaaacgtaaatacgtgtcttcagaaccaaacacaaaagaacaggttctagccctagaaatccaatttaggataatgggttacagacgccttatggcacgttctacaactacatttcgtataagttaaattaactctttaaaaacgttcaattagagctaaattaggtaaaattaaatattaatgcacgaaaaaccaatagacgcttgcttatatttctaaatctgggtcaaaccaccccagccccaagagacaattttagattgttacttgacacgtttcgaaaactttggatttttgatttctgtacaaataagatgaagagactgggattcatatgccggaaatacagatcgatgacagatcaaaaacttttaactaagatattttaatccgtaaatgcctcaaaacgttacgcattcatttaggtcaacctagtgaagaatttttaaaaagacgagagaaagacaaaaaagaacacgcagaaaacggaaaccgagaacttagcataacaacgaaaaagagtagaaaaatttaaaacaaaactaaaatcttcaagagaaaaacgatgagaaccaaattcaaataacagaaatatttttttttttttttaaa

SEQ ID NO: 16699 - DNA, 7917 bp, Cannabis sativa
ttcttatcttttattaattagtaaatctgattatattgaaatgtatttagggcacaaaactcaataaaagtaacatagatagagtaacaacttacacgagaatacctaaatccagatttaaataaaataggagaaggatccaaacatcaaaatgaactaactcaaaaaaaaaaaaaaaaaatactagcacgattataatttatgatatatatatttttaagcaaattttgaacttttttggtgtcagttttgaactgacacttaagagggtcaacctcttaagtgttagtttagaaacgacaccaaagagggtgttttttttaagtgtcaaattttcttttagtgtttttttttttactaatcgacaccattgagtactctttggtgtcagtttataattgacacttaagagataggctgatcattggtgttggttttttaaattgactctcgaaccgacaccaaaagtgacttttgtagtagtgaatttttaagttttttttttattaaaaagaactttaatattccaccccttgacatgaacccaacccaccccaacctcatcacagacttcggatgtgggtcctagacccagactccaaatacagaccttggacctagaccccactatggacttggacatgtattctggaccaagacccgaacctgaatctgaaccccaaacttggagccgaaccctagccccaaaccttgggcccaactccaaacctgggcatatgtgagagaaaatgtaagaaaaaatggtagagaaaacaagaaaaattatttttgaaataaaaacaatattttgatgttttctaattttttattttttgtttgtttttataaaactgtttgtacaaaaatgggccaaacacatcctattgatttttaaaagaaattttatgtttttaaaaagtgaaatattttttatattatgaagttgaacatccctttaaatttggaacattctctttgtgagaactactacgctagagctactttagacatgagtgaaaggtaaagtacagaattttcaatggacaacgaataatggattatgaaaatggctccgttggtagagtctgcttactacatgtaagatttttaaaagttctgcttttaattagtgtatttgctgtgtcttttactttagttttttttcctgtatcttttcttaagtctggtcttttgcctcgggggtgtgagttctttgctgatttctcaatgggggataagggaaaagagattcaagttgattttattgatgttgagaaagatgagctgatgaaaagagatagtaatcttgagatggaaatgctggagctttttgaagatattactttggaagatgttgttgttagcaaggcctgtgtaggcaaggttgtgggttgtaaggatatgccggtttcagtggtaaaatagattcttggaggagtttggaggaggctgggtttctggcgaatgaagaagtgtgaagatggagttcttggttttttctttgatgatgaagatgactaccactttgtgatggagaagagaccttggattattcatggggttctcttaaatctcaaaccctggccggttgaaggagaagtcagggttggtgagtttgaagtggctcagttttgggttcaattccatgggcttcctactaggtttttatcaaatgaaaatgtgccaatcctggcaaaaaaggttggtaacctcgttaagatggaggaaaagcgaaaagaagaacttgttaggaggggttatctgaggtgttggattgaagtatggttgtctcatcccttcccttcgggtttttttctcaaggcggacgacaaacctgattcttgggtccaattcaagtatgaaaagcttccacacttgtgctttaactgcgggaaacttgcacattgggataaaatttgttctgcccagaccacgatggtgattccaacgggtggctctgcgattccaatgtatggaacatggatcaaaaatgatgcaggaaggtctaattgttttaatacgagatggaaaggaactaccaggtctcttatggtaagagaagagatactagaatgggattttgcgaagtcactccggaggcatacctggaaacgaaacaagaattcggaggtgtctacggctaaactggtgaacggtgtttcgtcggatgttcaggtggtgggaaaggaggtcgttgctacaaaggacaaggagagtggacagaaacgtaaaatcgtacatggaggcacgtccactactcctcattctgagttgcaagtacggaagaagctcatgcgaaggtggcagatggaatttcaaatgaatcagatattgttgtgcaaaatatggaaaatgtggggaatagacagttggaagtgggtattaatgaagttgggccaaattatttggacttaccaacccctgacttctctttgaggcttgaaggtattgatatgattccagacattgggcctactattgctcaaagtctggatattccccattcttggttatgtagatctcaaaggccccatgactttccggagcccacccctatcaaatggcctaatgatgatcttgaggcccaaaagatgttctttcagatttatgggcctgattttacagatatgtacaaggcccaggcatctctcatttgtaatcctccagacctatcaatgatgatagtccaactattgggaactaagaaaaggaagccacatacgtggtatcatccctatcccgctataacaaatttcccgttgtcagtttgccctgtttcggtggagaaggaagatggaagtaaccttacggaagaaggttcggtggaaacaaaaaagtttaatatgggtgctaatgataattctggtagccgcacaaggaagagctcacgaaggaatgcttggagatctaactcaggggcaatggcatcaaacagagggtcgggtgtcaagactcgacgaggaaggaaaaatgttgagaatcagagttgcgagattaaggaatttctaggtgatttggaggtggttttacaaggttgtaatgttagggaagttcaatcggttcaaaattttggcgatggcgaggaggcggcctcaagcatgcccccaccatcatcatgaggtgtttatcttggaattgtcgtgggattcgtaggcccacgacggagagaacccttcggggtttaatccatgatacgaatgcggaagtggtctttcttgcagaaacgaaggttggttttgaggatatgtatgcttttatgaaccggttaggctttctaaatgtgattggtattccttctgtgggaattggtggtggcttggagacaggatcgtttgatagatgttcaaaaagtttatgactcggggtttcatgttgttatcccggagatgcacggttttacaaagtggcatttgttatgtatttatggaactccttatgcggagaaaaaggaggatatttggaagtggttgactgatatgtttacggactgcagggagccgtgggtggtgttgggtgatctaaatgttatattggatgaatctgagaagagggggggaaggagatttcagagtcaagaaggggctttcttgcgaaatttcttagatgataccgggggtgtggatctgggttttcaagtggtcagatgtacatggaaaaacgctagaaaaggagtaaagaatgtccggaaacgccttgataggggcttagcggatgcgtcttagtgtataaaatttcccaatgctaaagttctaaatttacctattctgggatcgaatcactctccaattctgttgacgaatagaggagaccagaggaaacttaattatccatttcgctttcttgaagtgtggacttcgagctctgattgcgagaaggttgtggattcggcttggaaatatgatgttagaggaaggaaggatgaaatattactaaagaaattggggaacacaaaacgagagcttaagagatggaatcaaagctcttttggcttttgtgatcaaaggctcaggagactcaagcaggagctaggagaaatccaaaacaaagtgccttctagagagaatttggagaaagaagctagtgttcagttgagtattatggagatggaagctaacatggaacgaattttgagggaaaaatctaggcagaattggattcacaatggagatgggaatacaaaattcttccacgcgtctattgtcataaggagaagaaggaattcaattgaaagtgtggaaaaggaagggtgtggctacatcaacgtgaggagattgggagctatttcagagaaaattttatgcaagtgtatgaatctcagaacccgattattgatgttgatcttgattttctcttctcggagagtgtctcggatgaggaaaatgcaagtattagtaaatgtccgactgctgaagaaattaaaagtgtggtgtacgatatgcatcctcttaaatcccctgggccagatggcttttcgggcatcttctacagaaaatattggaggattgttggggctgaagtctgcaagatggtgcaaggtttttgtgaagaacaaacggtttgtcccaatctaaaccacacttttctgtgtttaattcctaaggttactaatgcctctcggtttgatcaattccggcctattagcttgtgtaacttttgctataaaattatatctcgcattcttacggatagattgaaaaggctcatcgataggttagtatcccctttccaatctgccttcatccctggcagatggatagcggaatgttctatcatggctcaagaggttcttcacagttttaagagaaagaagggaaaacagggggtgatggcgataaaaaccgacatgagcaaagcgtatgatcgattggaatggagttttcttcttcgggttttgaaagcaaacggtttcagcgatcatgtgtgctctatcattatgacctgtgtgacctctgtcacgtattcggtgcttcttaatggggctccgttggccccttcaatcctaaacggggtctccgtcaaggggatctgctatctccgtttctcttcatactgtgcagcgaggttttatcgaagttagttctcagagccgaaaacagaggggagctgaatggggtaaaggtgtctcggaatgcaatgcttattacccatcttttctatgccgatgatgcaattttcttttgcaaggcgaacggtacgaatgcgaatgctcttttacagtgtatttctaaatacgaacaatggtctggccaaaaggtgaataaacaaaagagtggggttgttttctctcctaacacccctcaaaggtgtaaggatgagataaagaatatgcttggtatgagtagtcttggtcatgacgagaagtacttgggcaatccttttttcttctctgctaagaagaggagggacttaaactttctgaaagagaaaattgtgactcagctagaaggttggagggcaaagaatttgtctcaggcgggtagaaccactttggttagttcggtccttcaaagcattccggggtatttcatgtcgacggctttggttccaaagactctctgcgaggaattggataggatcgtagctagaatctggtgggtgggaaactcggataaacaaagatatcgagcttttaagagttggaatgagatatgtcaaccgaagcgatgtggtggtcgtgggttaagaagcttcagtgacataaataaggctttgttagcaaagctttgtttgatggttctaattggagtggagaaagcttgggtaagattgttggagacaagatattgttagtttatagacgcttggagagtggagaaaaaagctggtgactcgagagcttggcttggaattttagaggctagacacatatgtactgcgggggctggagtcttgattggaggtggggagtcggatctttgggagagaccttgggttccagggaagtctatggaggaggtccgaaatagcttccattactctaggagacatgcttttgtgagggtctcggatcttttcctggaaggctctagagtgtggaatgaagagcttataaaagcaagttttgatgaagaagtggccatgtccattttgcgtattaggcccttggcgacaagtgaagatatcacattttggaaagagacaaagtcagggaagtatacagttaaaagcgggtactaggtaagtcaacaaagcagattcaagaatccacataaagtttgggaaaagctatggcaatctaagattcatcatcgattaaagcttgtcctctggaaagtgtggtctgatattttacctacgaaacaacgattgggtctggtagagaatgtttgctctctctgtcatgttgaaacagaatccgttttgcatctgtttggttcctgcagtgttgttcgagctgtttggtttcaaagtcgctggggaatccgattggaagactttcaatgcgataacattatgaattttggggaatggtggcttcaagtgagggatgaggagcttcaattatttgtggcgtgcctttgtgaaacggtttggcattggaggaacaaggtaatttttaaaggctgccttttttctttaatgggactgataaaagacattcgagccagagttagggagatggagatgcggtctgttcctttggaagtgattgatcgggttgatatcctcggtcctgacttgcagaatttggatggcttgcaatgctatcacactgatgcatctattcttaatgaggctgctggtgtggcggttgtggaagctgctgagtcaaatgtgggtgactcatgggtggcatctaactttcatctggtttctgggattcttgaaggggaattactggctattttattagctttgcaagtggcgcaggagaggggtgcaaagaagatcaaagtcctgtcggattctatggtggcaattatggccttgaataatggttgtttgccgtatgcctaaggcacttatcctatttttgaatcttgtctatgtatttgtaagtgttttgatcttgttgtctttgttcattgccctcggtctctgaactgtgtggctgatgctgttgcgggctgggcgagatgtgccaagtcctgcactatgggtctgcttaaagacattgctccttcggtagctttgagttttgtactagtttgtttctttcttcaataaagtttttcctactaacaaaaaaaaaaaaaaagaaaggtaaagtacagtatcagagttagtcccacattgctaatgtgtggagataaattgtcatatataagatgaatgggctactcctcccattgccaattagtttcgagatggaacctcattcatcttatcccagattctaacatggtatcgaaaccacttgtgatccgttgtgagcccaaattgccaccggtctaaaaagtcgtgtgtgatccgttgtgagccaaagtgtcgtcggtacaaacagatacttctgctgtctcccaattaacctccatttgggaccttttggccaatgtgtgccaatttctagtgttggggtctttgacctgtttcaaaaatccataaataatgtacacccacaaatttctcgatatttggccttgtgggattctttcaaatgtcatgtttggccctgtggtcccttaaaggtcgttcttccaggtccaaacatgaggagggtgtataagagtagttagtcccacattgctaatgtgtggagataaattgtcatatataagatgaatgggctactcctcccttaaatttcccaatatttagccttgtgagattctttcaaatgtcatgttcggccttgtggtcccttaaaggtcgtgcttccaggtccaaacttgaggagggtgtattagagttagtcccacattgctattgtgtggagataaattttcatatataagatgaatgggctactcctcccat

SEQ ID NO: 16700 - DNA, 7808 bp, Cannabis sativa
  modified_base (1718)..(1742): a, c, t, g, unknown or other
aaaaaaaaaagagcttggacagtaaaaaagaaattattgaactattaacaaatttaagatgctatccagttaactatcgaaaattaactattgaactatcttattaagattatatttggctaaatttttactcttttgaaataaaattaacttctgttaaaagagtttttccattaaaggataaaactcactcgttataacaatcaacacagaaaataattttagagattgagaatcttgaaaacatttctaaaaagcatacctaacctagatccaaatacatattaacctcgtatcttaaacaacatcttacattatacatgtgttatgttttgtcttagttgttatttctccatctctctcttttataattctacctttcatacatgtattttcttgattttttcccttatgattaacttgacaaaccttactacaccttgatgatgtattgctttcgtttttgtttatatgtgcacaacagttcgatcgtctcgataaatttcgatagtattttgtatttagttattttgtttagatcaccgaatacatctcactggatctctatagttcaactcgatagattttgatgatattttgttttatttcaaaatgtgtacaactcactaaacctcaatacttcatttggataacctcactatacaaaatttgtatataatctatcaattaagtcttttttcataaatttttaaatctgaagcagtttatttatctgattatcaaaagtatataattataatgaaacaatacgtatttataaagttagtgtgtggacttagctatacataatcttagttgaattaggtcaggtcgtcaaaggcttcaattaactaaaaggtctcacacttctactttaactagattttacacatacaaatgctaaattcattaattattgaacactaacaatatgggttaacacaacaaaaaactatcaaatcaacctaaattttaataacattaataaaaattaatgtaaatccaaatacaatcttaagagatacacctcaccctcacctaacatacaaatatcccatcaaaacttaattagtttcatgcatcaaagttcaaactaatgaacttgcaaagtatattgtacatatttacaaactcatatatacaattttaccataatcaatattcccaaacaaagttgaataagcctataaaaacatattcttattcttattcttcttcttttttttttttttggaaaatgtaaataaaagtaatgatattccaatctctatattgctaggattgtaacaccacaagcattattagcatgaatgccttctttgtagacaagatttcctctcacaaaagttgatgaaatttttccatacaacttttttcccatataagctgaaatttcctatacatacacaaacaaaaccaaaataaataaattgtgtcaataaataaataaatttaagaaggtttagcataaatactttgttatttaatcactaacaaaacaatcgtgtgtttgaattctataacaataacaataataaagtcatcataaatatttaagtttaattttcggttgcagataaaaatttaagtaatttttgacggtaataatacataagatacattttttgaactttcgtaggtaccaagtcattaaatgtcaagtcaatgaccatgtgacagttcttaattagtctagatcattaaatttttattttttnnnnnnnnnnnnnnnnnnnnnnnnnaataagaaaataacatgtggataataacttcacacttaattgttgaatacttacgaaagtttcaaaaatgcaatcgagagttaaacttagttatttacactgcaaatttactaacattattattattaatgttttttattttttatatgcaatttattatttttatttaatttattataactgagtgaaatttcattgagtattaagaaagattagataaacatactggatgtttaatgaaaataggatgatcttgagtgaggtcaaagtcaacttcaggttcccaaacaacaatatctgcaaagtttccaactttaatggctccctgcaacaagagagtgaaaaattcatttgaatacttacattttttttataattattatgagagaaagataattaatggaaaaaaattcctaattatttcgaaactaagctctcaacttaattaatcctacattatatcagagatcaaaaaactataaattgatagagccagagatcaagacctagggtggctaaaatgaagaaataaaagaaattgggtctatgatgcaaataagttttagctatgatgcaaatcaaatattagaatatttaatgtggagtttgagtattattggacctattttataaaattttacgaaagtatattgtataaaaaatttggctcagggtttgaatggattctaagcacaaacctaacctgccttagcccatagtcgagcctggttaaatcatactaattgggtgagtaagtgtatgctatagaaataaatttacctttaattcaagtccagcaagctttgcaggcctctcactccaccatgaagccaattcctctaaagtaattccatatttttgcccatatgtccatgttataggaagcacaaactgtaaaatgtctccaaaaaatagaaaaattcagttagttttttcgtcaagtacaatacacaaatgtaatcacatatttacatgagaaaagaaaacaaaaactaacctgcaaagatgatattccaccccatgccctcaaaaagttaccatcttcgaggagcttaagttttggctcggttggtgaatggtcggaacttaacatgtcaatatgtccgtcctgcaaaacattatgactttcgagtatgaaaaagccaaatattttcgcatttaatttttttctatcgtcgtgtttcaaattttaaatgatgtgtcaataattctttaccattagggcttcccatagtttttgtttattagcttcattgcgaatggggggagcacacttgaagcgagtatctccattaggaatctcttctgccgagaaagctaagtagtgcgggcaagtctcaaccgtcacactatcacctctaaatttggcttgctatcaaatagagaaaaatatttacaacatgaagaaagatttactaatagtacatatcaaggctaagaggaatatcgatcgagacaaatgtttcacaaacgagctacacatagtgatgtaacatatttttttaaaacgaatcacattaatttaatccattatgttaataatgtcacgttattatatgtaatattttagtgtacatatcattactcttataaaaaaaaacgcattacttactttaataagacctagtgaagagctcgaatcggacaagtgaactatgtgaagatgagctccttctgcagagccaccaattcttgtgtccttagttactgtcaagagctcactaatagcttcctcctccctagttttaagtaaataacaaatcggtgttaaacttctcacttagccttataacatttgtaattaatcgttctgcaaagaagatggttgaaaaaatatcttacattgaaggtggtctagtcttgagataagtcgaataagagcgaggatcattagagccatcatcaaggtcggaagggttttcgagttctttttgaatctcagcatgtacaagtaaaggtcttttatattttgctagtatagataatccctcctagaaaaaataattgggatatttgtaagtgtaaccaaacaaacaaagaagaattaagacattattgtgtaaacattaatatattatgaaaacataccttaatatgactagcatttgtcattggaaaatcatcgattcctgaaggacacataaaagactacaaaaagatagaacaataattttcattagatgaagatttaatatcccaaaaatgctcataatgaaattggtaaatatttactactataaatattttgtttgtaaataagtaggttacttgtctaattctatagtatttgagaaattgaacattattataacaattgttacgtaagtatcaagaaaatgacttgaatcttaatttcgagagatattaaaatcacgtgcattgttataaggcaccagtggtgcctagcaccttctcgacatgtcacgttgcaattggctagcgatactctttaaaaactattttattaaactatatgggatccgatacttaattggaccaataacgatactgacacataggaggatgctaggcaccactagtgccctttagcatttctctaaaatcacatatctgactatttgagaaattgaacattattataacaattattatgtaagtatcgagaaaaggacttgaatcccaatttcgagagatattaaaatcacatatcttactatttgagctactaatggaagtattgaaaacatattttagaaaagaaaaaaatacaccttgttatggcatagactaattttttttcacttgcgtaaatagttgtttaccttcaaaccaagaacaccggcattcaaaagatctttaagaacaaacgggttaaatgcattttcgggaacaaggcctccccaaaaacctattgaacacaaagattagtcataaaactaatgtttccaaaacattattatgacaaacaaatgagtacaaaaacataccaacatcgacgaatattctcttttgcgctgctttaagctattgaaaggaaaaaaaaacacaaaagatttagataaaaataattaatgaactaaagagatcaataataggtttaacttgactccataattaggttaataccttaagtttgaaggtatctctagacacagttgaaggcatgctatttagaggcatgtcaaccaatgtagttagaccacctattgaaaaaaaatgtaaaattttcaataataaaaataataaacaaaactataaaataataataaaatgattattttttaattaattctcaagagagaaattatatttataatttgtgagtaaattagaattaaagggtattattaataagtaccagcagctgctgctttagttcccgatggaaatccttcccactcggcccttccaggatcatcgagatgtgaatgcctgttattaaaatcaaaatattttaatttcttatagttaaaactaaattaaatacaaatctttagtgacgagtagttttttgttatgattaaatgatagttaatcacaaaaagaaaagtctatgttgtgactaccattattcggcgtctgacataacaaaatacaaaatcttacacgtcgattaagccaggcataacaacagcatctccataatcgattatttgcaataattctgatttccaaagtttttccacttctgtaacaatggaggcaatcttcccatccttaatctcaactgtgctcattaaaagacaaaatttaaccaaaataattaatagatatattttatctgaagaaaaataataattagcaatttcaatggaattgtgtgtgacaacaattcaaacaagacttagctaagaaaaattttgtgttgtagtttcataaattcataactcgcattataattataatagatattttatccgttattttaatattctggattttttgtcttgaaaatagatttcaactaatcaatttaattcagaattttttcaaaaacatgtgaaatgtttgttatgattacaatacacaatattatatgtataaaaaactaagatataatttctctagttactaaaaataaaaaatgttcctaactaaaattctccccatatttatgtatagaagagtgctatcatcaacattttattactatctcttaattaatctttgtgccttaaaacacatgtcatggtattcgttatattcacaacatcatccctataaacttttaataatttttaaatagtttatagtgataaagataggttttaagttttttgaacacgagtggtaaactggaatataagaaactctgttttcgaaacagtaaattcttcaaaaaatttcaaaattttacaaggatgatagaaatggtgcaatgaggtttggattagattgaatacttccaaacatagtgttatcttgtggttagcaatgttaaacaaattgaaaacaaaagacagattgctcaagcatggattacaaatgaatgagctttgctgcccctgtgatgaacaagccgaatgtgcaacatctatttttcgaatgtactgtggctgtgaaatgtttgcaggaaatcaaacaatggctgacatggaatgtggtatcttcgaatcttcccaccttacttaggtggattgcaagggcaaagatattgaagtttcgaaaaaaggtctacactactgcagttgctggactggtttacaatatctggaagctgaggaacaatattacttggcaagggatatctattacctcaaactgagttactgaagaaacaaaatggggtatcaaaacaagaattgccttgtttacacctaagaagaccaaagaagtagacaaagaatggttcaatgaactataatgtagataagatgtaatgtatagattgtttggacccggtttgggtgcctatagcttgtaaatagtgttttgtgcaatataatgtcctgatttatcaaaaaaaaactataacgaatactgccattgaaaaaaattgaaaaaaaaaaattgccatgtgatttcggatgtgaatgttaactaagagattgtaattagcattcctcttatataataggttattgttacgtgcaatgcacgtatacttagtgatatttttaatttttatttttgttatgtgtatttttaaaattttataaattaaaaaaaaattacttattaatttattaaaataaatatattaatattgtatattgaacgtactctcaatattaaaataaaaataaaaaaaaaataatattgttacaaataattatattaatatttatatatatttaaattagtataaattcaattaacttaaaataaataatattaatatttattttttttaaaaaaattatttatatttaaatttatctaaaataaataatataaatatttataaatttataaaattaaatcctactaacacagttaatttaatagaatatttatctaatgaagtatttttatatttttaaaatattttgttaaattaaataaaagttaaacagtcacaatttatatataaaaatatatattatattatttgattatactttattaatgaaaattaattagaatataataaaatttattaatgagttgtgaatacatgcctgcaccagaaataattccttggggtgttacaatgcgtttactacttatccaaaaatgttgataagggaccaaactgcaattttcctgtggaagctataacaatacaattttatcaaataaatatattaatatcataataaaattattgtttaaatattgtgaaatgaaaatatatatatgtatatatatattattgaaatatagtattgtttcaaaatgttttggaacctctattaaataaaaaagacatgatttagcaatggtaaaagttggaaggacaaaaataatagtggttattactattagggaggtaaaattattaattatttaatgaaaaatctcatatttctctaatgttgagaggacatatttaatattaataataattcaaaaaaatcttatttttttgggctaaaattcaagatcaaaatacctatttattaaataataagataagtgatataaggttaaaatatataactt

SEQ ID NO: 16701 - DNA, 3317 bp, Cannabis sativa
tttttatgtggttatatccagaatacgcatccataaaggtcacgagttcatgccctgccattacatcaactaattggtcgattcttggtaaaggaaaacaatcttttaggcatgatttataatggcaagacaaatctatgcacattctccatgtgccatttggttttaggactaaaacaagaattgatatccaagttggataaaaaagcctctctaatgaagttgttggtcaaaatcttgtttatgttgagatggtgaaggtctatgttgagatggtgacaaattacattcggatcaatcctaaccatgcctaaatggctccaggaaaattggtcctggtttgcctttagaaagatgattaattactattttaattctacccctaatcccttaccaatttttacactttttggttgggcaccagggtctagaattaccttttccaaaccctctactggctctagttgtctatgttcctctttgattcttgggtccaagtcttctacattcttttcactatctcccttagttataacaaccaatgacagatgagcatccattcttcattttagctcaatactgtaacattatctcgccattagctggtctcctttcaaagtactagccccagtttgagttgcgaactttaaagataaatgtgttatcgagttgactatccccattccaatcagtgttgggcaacccattagcatattacaaaatgaaagaagatctaccatgaggaactcttgaatctgggttacagataatgggaattccccccattgtaagtaggagttcaatagttccaaggcttgctacactatcttctctaaacacacataaattttccatgcaaggttaaagctttacatcttccaaacccatctttctcaatttttccgtataaaggatgtttaccaagctcccactatctaccataaccctttttatccttttattggcgagataaaatgtgatgaccaagggatcagtatgtggaaattggacatgagatgcatcttcctcggtaaatgttattggtggatcctcatgtcttatacacttgagaagttcaggcgcaaaagccaagttttgattttttacctagtttatgtattttttttttttgcgcattgcttctggttctgacgacatttggccctcaaaaaatcaccaaaatatcctcgccatctattgggggaggttgcacattttaattttggttgttgggttgattttgctcatttcctctattttcgacatattatctgaaatagcctcaagaaataagacttttaatcttgtctttcagctatcgacatgtcctatgtctttatggaatcaataataatttttttagatcctgcttgttcctcgcatttctgattggttctagtttgggaaatgcaaccttgttttcgtttgcaaggaatattttttcatgaattttgtttaactttgtatacacagaataaatcggtatgtacttctcatgtttcttctatttttcttttcttttgacgaatcttttgactcatccttcctttttccattggcttgtttcccttgcttatgtcacctgttgtcactgttatagtgctattgttagctttacttgagctgagttttttgggccgaatcgtgttcggggcctaaaatacattttttgggattttattttggcattttataaataattgaataatctaaaatttatttaagtttggtgtgtgatgaaatgacaatttttcccttgttgtatgcatatgtggtttattagccctaggggcattttggtcatttgaccatttgactttattttcaacaaaatggatttttaggaaaatgaaaaacacatttctggttttattgcccataaccgaacccttactctctctctctctctccattttcatactttcctaatcttattcaaattgaatgttgatgattgttgcttggtgattgaaggttgtggtgctagaatttgtgaagaacttgaggtagtttttccatctctttactttgagttttgttgctgaatattatgatgattttaggtattttagtgtttttggtagttaaatacatgtttgtaagaattgaggtgatatgggtggtttttatgttgattaagcttgaaagttttgtgatttgcatctggattttcttgtgtgattattagtttgaaaattggggttttaaaatactgaaattgaagcttgattctttgagtaatattctgaaattttgagtttgtaattgagattttggtgtgagttttcatgcttgagaagtggaatttgatgcatgatgagttgtgtaattgcatatttggatgttgttcaaagcttcatttttgtgctttaatttttggatattgatggctttaacatgtgataatgagtttgcgtttgagcatgtttttgttgagtttggtatgtttgggcttgaatttcggttgttaaaaagtggtattttttaggtttggaacctaggtgtcgtggcccactctatgagcatcgcggccaacccacttaaaatcttgagattttcaacccatgttccacggcatgcctggggagtgtcgcggcccgcctaggggtttttgggaagttttgaatgttagatttgattattcacaacttttcaattcgaactccgtttagggtgtttcatatatcgttgaaaatctcgttccgagctctatatgtttatctgtatttggatgccaattgtatgattatgtgaaagtggatttaaggattaaccctatttgtgaattctggaaattgtgactatgattactggcacttgttcaggagcacctgggaatttggaatctccacacacttggaacatcaggtaagacatttgttagcacgtagagttaagcatggtggcgctcatgttcaatattataattgttattaattgagaattgggattagggttattaccctaaagtgagcggttatatggcctagggttattaccctagtgattaaatgatgttaaacgctatgccatgctatatatgttgaagtaaagaattatccgttcaaggaataatttagttagactcgataattagaaccgagataaactattttaaagccttaatgtaattagacatgtgagcataacatgtgggtttatgccacatagacataagtatacgtctgggcgtaacacgcaggtctatgtcaaataaaaaataagtgtaatggcattaatatatatgtgatatgctttatagtgtatattgatatttatactgttttactgggcttggctcacgggtgctctactgt

SEQ ID NO: 16702 - DNA, 7355 bp, Cannabis sativa
  modified_base (5750)..(5752): a, c, t, g, unknown or other
  modified_base (7324)..(7324): a, c, t, g, unknown or other
aactcacccccaaccccaatccaattcctaagggactttgtctctcaaaacaagccatgtataatctctaatgctatcaaccactggccagccctttcaaactggtccaatgattcctatcttataaaatccctttccagctcgtcttcttccgatccattggtgtctgtacacctcacccctaatggccgagctgatgctcttgcccctctaactaaggccaatgattctctctgttttgcctctgctcatgttcaacacatgcctttcccggaagctctaagccttatcagctccactggctccaattttgttgcttatgctcagcaacaaaatgattgctttcggttggagtactcagcgctatctcccgattgtgatgccaacattccttgggcatcggatgctcttggctgcctccctgaggctgttaatctctggattggtaatcatttgtctgagacatcattccacaaggaccattacgaaaatctatatgctgttgtgactggacgcaagcatttcctgcttcttcctcctacggatgttcatcgtatgtacattcgagattatcctgctgcccaatatttgtattctcaggtgttctttgctctattaactttttttttgtctgtctttgtttattagattgatcattcatcatcatatgaatttttttttttttgaaaattttgactgttcaggacactaaagatttcactttggaattggataaaccgcttagatatgtaccttggtgtagtgtgaatccctacccttctgggaaaaacaaagttgaggaaatggagaaatttcctttattttttcagggtcctaagccatttgaatgtaccatcaatcctggagagattctatacttgtatgtttttctttccttttataatgccattctaatttgaaccacaacttcctgttgtttgaaattctatgagacaaagtcctgggttgatttacatgcattgaagcaggtgagaattattttctgggcagcttaaattgggttatggtctaagatgtccattggagttagatggaacattgttgcctatcttctaaagaatccaagtgactcaggtttttctacagtgtggaaaactgaaccctttggttttattggctctttaaggcttatgttctaacttggaatgatttgtttgaactgtctattacattcaatatcattttccagcttattgtatgatgggttttgaaaggcttggtacttctgggatttatgcaggccaagcatgtggtttcatcatgttagacaaagtccagatgataatgggcgagttattgccgtaaattattgtatagttcaaactctcttttcaataatttttaacttttgactgtttaactaccaattatacaatgctgaggtatgaatctttatggcattggcagggtatgatatgcagtttgatatcaaatatgcttatttcaactttctgcaatcaattcattacccagtacttaagagtacagtgcttaagatcgagtgcgaggaccagctgaaaacaaattcaagtgaagatgaactctgtgctggtgtttcttagcaaattatatagccaccattgtgcttcttagagcagaagttgaggtaatagaacaattttgtagctgttaaaaacttaattgctcattcaaaactgtggttaagatatttcagttgagacatttagtttagaagctgtaattaatataggccaattttgttggtaaaagtttgagctaataagttatttgagatgctgtattctctactcattagattttgtctttttatctgtgcttaaatgaagtgttaagttttggtgcaactaaaattgcttaatttacatcagagaaggctagaaaaggtttgaaggtcattatgagtgctataaactcgattgcgttaagaatgaagaaaaccatctgatcacctgcaaaataaacaccattgaacataaacttgataagaaatagagtcgaaatactatagaaacttatatgaactattagacttattatcacataatcattttagagcatttttaaggctaaatcatctttaaggccaaacagaccatcttgttgaaccccaaaatccttaggaaataaaaacttaaaacaatggtgaggtgtttctttatgaagtttaaaaaaatagtaacaaggaatgatgaagctttggtttttggcttgtcatgaagcaaatatacatatctagggactttctttctatgttaatttgatttgaaattttgaatgattcctattttattagccccaatgtagttttaagaggattcctatatggtaagagtttcattgttctcattttagtggttgtttcctcatcatgctctatgattataattatgtgcaacactcacttcataaaaagaaaatcatataatatggtgagtttacagacaagaaaaataataataaaaaaatcaatgagatttagatcctgtaccagagagaaatgactcattttgatgattttgtgcccaagaaaatctgatcaaaccaaaggagaaaaaaggaattaacatcaacttgaatattaaaaacaaaaagagaaattattatttgccaaataaatcaccaaactaatattgttggctacaattcataatgatagatatagtaataaatcaaatatgaatgtgaaattataataatatgtctagtcaagtttctttctgagttttggtataaatttaatgcacctagattagtatcatcaaaaaacaagtacaaacaatttttctctcttttttttttttggaaaaatctctaattaatcatctgtaaatcataccattttttaatatgtaaatataacactttaaagaaccaagaaacataattgtcagttaatgttgagaatcatgaatcatgaacttgataaacttacaaggcacctccaccggccggaccggccgctttgaatagagacatgacagtcatggatatgccatttgcagcccctctttggctttgactctaaaaaaattggtataagaagtttatttgacaaaaaactaaggttactaactttgaaatcttaaaattaagtatacaaattacattaagtaagatagaacaattaccacagctctgttttgtagtagtaacattcctgtagtaatacatgcctaacaatgtatttaacaatgatgttaagtcaaaatatataataacataattgaaattataatttgtggatagatacttactgatattacaatatgtaacacagatgccagatcaattaatattgtgagtttgagtccagaaaactttgctataaaagggtaacatgataacacaactattatgatgacctttgcaataaaaaacaatgaaattagtataaatttcacaacacaatatgaatgccaaaactggttatagatgaagaatattagagacatactgctccaactctagataacagtacaggtccaaaggtcctctcaattgttgggtacaaaaataactgaaagagaagcattacaaatcctaggaaaaaaaataagattgttagtcttttgaggagaatcatatgcaacatgttaaatattgtgtgatctctttagagtcatgacatgggcactcataatacacatcaaaacattatatacacttacattgtaagttttttataaccaattatatttatttaagacaagtctctctagatttaaatgacttgttgcataagtgtattttttggtgtaaatattatgagcacatattattatcctacctctttatataggactaatctccacaaatctcctcaatcacagcactaaacaacttttttaaattaagaagtaattagagacaattcaacagtatcattcttttcttccaatggattctacaataattctaacatctctattttctcataataatagataaagatttgctgcaacaaaaaacattaactagtggaagaagtagaaaccttctcaacaatataactggggaggggtcagtcttagacaaagacttctttctctttttcaaaaaaaaaaaaaaaatacaaaaggtaaattatgttttaaaataaaataaatttttagatgattaacttgaaaatggttatattaaacattgtttgattatttccctaacttgaaggaaagtcctagccccgcccctgcaaacttacacgatggattaaaagcgatgatacagcggtgtacctgaaatggcaagaacttcaccaacttcttcacttgaatagctaagccctccatatttttgggactcacagcccataatggaaaaatctaagaaaatagattgcccaagaagtactatggttattagaaaaaaaaaaaaacctttatttatggaattaatgcaagatttgatctactacctctgcgtaagccatgtcatgaagttggaaaacactaaatactataatagatgacattaggggccagttcttaaaaagactttgttttggagaagggcttttttcctcgagttcttccaaattttctatcagatcacattcatttttggtatgaaagtgaagtgtttcctgtaatcaaccataagcatgaaaatcttcataattcaaattaagaagtataatattaaatttaaaataataatagacagtccaagtaggtgagaaaatagaaaaaaaaaagtttcactaactttatggaaaagctacaatttttctttttaagattaagatattaaactatgaaccaaaaaataaaaataaaattagtataatgaatatttgaacataccggcatccaacaacagaaaattgttacaaccaaagaaaatattgatatggtcaagcaaggtaacaagtatgggaacctgtcatttcataagatttatcataatttgttgtgagtctgcctagcctagtaagaaaaaaatcagtgaactatgaacaataataataaatacatagatatataaaattggaaagctattcttacctaccaaatagagactctttggaaaatatatttgggaacttctctgcaggctataattcaatttcaaatgcatcaaaactaaaaataatataaaaataatctcaactacaatttccaacttctatcattgaagtcatgcttggattcctctccaaaataagtaaatagataatgatttgttttcctagagaagtatcccaactagtgctataaatatggcaagaaactgacatgagtccgagtggcacgagcacgaaaaaatatgaaattaaacacaacacgacatgatgctacacattgacataacatgacacaaaaaatatgtgcttaagtatgacacgacacgtaagtacgaattaactagcccgaaagacatagtacgagacaagcttgaaaaacacgacacgacactttaaataataataataatgatatactaagcaaatatcatgtgtaaggtacgtatatacttaattatatgtttaggctttttttttaagttatgttctaatttttgaatgttagaataaaaatattatatataatttaattaaataaataatattattttagcagaacaatatttattttaaagctctataaaaagaaacataatagtatatatatatttttttaaaaaaaataaaaaaaaatacaaatgctcaaagtttttagaataatttatctaaaaaaaaaacttttagaataataatgatgatattttgtataataataataataatnnnaataataataatatattaatttttataatagaattcatgatgtaattgtaaaataaggtaactaaaaaattgtgatgataatgaggtaagatttttctcaaaaaaaaaaaaaataaataaataaataaaaagttgtgatcgaaacaaaaataaaattaacggtcataaataaaaaaaattgttaaaatatgaatacaatcaacctaaaatatatctgtatagaattgaaaaaaaaatgttaattaaacaaaataaaaactaaaacttatattcaattaagtgaactcaaaaatacaaaatcaaacttaaattaagaaattgtgaaaagtatccaccacattaaaagtatttaaatttaaatttatttatctaaaaatatttattttaattttttttagatatatatataataatataaaattaattaagaatattctattaaataatcgtatatcttgttaaggttaataggaaaattaaaaaataagattaaattaagaattatgttacataaccatattttatataaaaataaatataaatatttgttcattataaataagttaaaaataataataaaatttaaatataataacactgaatattataattggataattaaaaattttaaaaaacataaaattaaaactatatttttttggttatgaactgtatattaatttaattataaaatatgacacaaaaattgaatatttataagtaaatatttaaattataataattttttaatataattttttagtaaaatattatgagaaatatatatatatatatttatatatatatttatattagtaatggactcattaattattataaaaataaatgtgaaaaacaaaccacgaaatcgagtcagaatatgaaaatgggttggcccatttaaaaaaaaattggccaacacgagtaaagcacgacacaaatccgagtacggcacgagcacaccagactgtgttgggcctaccccttaaaaatattggcacgacacaacacgatccatatttattaatagtacgacatgacacaacctatatttaaataagtacggtataatatgtagggctgacaattcgtgttatcgtgtcgtgtttgtgttgacacgtttatgacacgatatgattaaggtaaacatgaacacaacatgtttattaaaagtatcgaaaccagctcacacacgaacgcaacacatttaatttattaaatgtgtcaaaacctcaaacacgaacacgacacgattaattaatagatcagacgacatgataacacgattatcattataaatacaagaactttaaattttttattttaaaatatatagaaattaatttgttattatatcaacatgattatgacacgtcacctgaatttatttattttgtgttgttttcaagctatgtcggcatgtcgtgacccatattgccaatcctgataatatgggttggaccagtaaacatccacgaatttaccatactaatcccaactaggtttgcaccctacccaatatctattctatataaagtgtgcgtatataatagaattcttggtttatgaganattcatgggtgattttttatttatattaaaa

SEQ ID NO: 16703 - DNA, 4449 bp, Cannabis sativa
ctctctctctctctctctccaagtagttagctggtgtcgtgtagcgactttatggctatcaaattgatggaataatgtgtaatcttaatttcctgtttaagaaattatcttcatcggctttctgattgaccaacttggcttggtgttttccttcggcattcaatacagttgctttttgttaatttcctgttttaattttttgaactctgattaatctgtttgaaacatgtttgtttaggatccaattgaagcattagaatctggagaagagacattctttcctgctttaaatgttggcttggaaaaaacatcatctgtggtgagcttccattgttatatgtactcggtcctccttgtgtagccggaggcaggttatttaatatttaagactttaagtaacttgctttgagaatgtgcccttgtgattaattttttttcctttggcgagaaaagaataagctacattaactctttgtagaccatattctgttcagaaccatgccaaagtcacacacacacttttttgttttaaacttgtttgtgagcctatatggataccagtacaatgccatctattcttctcaagtgttttttactttgtagtctttctggatggacaagcaaacaaggaaagagcagaacaaggaattcgttgaattggattgtaactctgtgcctctgtatgatcgtggttttgcattgggtttgacatcagatgatggtataaataacatcgaggggtaaacaccgtactacattgttactcattggaatcttacctgaataaatattatgtaaacttatcatacttttgtcaatatatatattggtatcttaccttagtaaaaaaatgtatagaagtttatatcttagtaaagaaaatgatatagaagattcatcttcaaatccttttacttcatacttgaatttacatgttcagtgatttatcaacaaaatatttcaactccataaaagttgaaaatcttgtttagaaaattgattcctctgattaaattggctgcttgtttgcatgtttgtgttattagttgctttttcatttattaagcaattgggtgggtggacgcaatccagtttcaagcttcctagaagaaaaaaaaaagaattacattttacttttatatgtattgtactttatagattctgttgttgctaattgaattaattttgttgaaattttttaagaggtgtggagattattgatgacgctgcccgttgtttcaattgtggttcctataatcattctttgaataaatgtccaaaacctcgtgatagagttgctgtcaacaatgctcgcaaacagctcaagtccaagcgtaaccaaaatagtgcttcacgcaaccaaactcgatactatcagaattctccagctggaaagtatgatggtttaaggccaggagctcttgatgctgaaacacggcagcttttgggtctctcggtaatttggccttttcttttcttggatggcaatctgttatttttcttggttgattttggtcacttaaaattaatgtcaagatataatctgagttcatgtcaaatatataatgcatgcttgaactcatacatctacaatctatcatgaacttaagtaataaggctttgggtttgaatttgtgcttttactggtcattcaaccatatgtttgatatcctgtacgttcgagatatatgctttagagaactgatcataaatttgagactagacattgttgctattgagtatcaaacttgttggtggacctatgaacttataatgataacatcattgaacgaacaaattggaaatgaggactttttctatttattaagttaaaaatgggaagggactgatcaatcattattatgcataatttctaaaaattgaccgctttctttattttgttttatttaaataaattataattattatgagtggtatttttttattgtatgaacatctcctgttaactgtaatattgttcttttgaggagattgctttttatacacattatatctacacacgccttgtctggtaattctgtttctttttgccttgaattgtggattatgcaggagcttgatccacccccttggctaagaagaatgcgcgaaattggataccctccaggataccttggtaattgaaatgatttttattttatatatagtcatcttgattttctcatgttagttttgagattacatgtaatttcttgttattatatacagaacatataattatttgcttatagatcacaacttgatcccattaacagaattcataattttcaaattttgttcaagaatcttctcttgcctatccatgcaatagtctattgggaaaattattttattatattacaatcattaacgatgagttcttactactgttactgtaagaaattattgattaattcatgtatgcacatggcctaaatttctaaattttggaaaaaattgtgacataatactatctttctccatactaactcatcttattgtacctttgcatttctcagatcctgatgacgaggatcaaccatcaggtattataatatttggtgatcttgatattgtgaaggacggccaggaggatggagaaattatcgaaacaccccgtgaaccacagaagaaaaagagtgtagagttcccagggataaacggacctattccagaaaatgctgatgagagactctgggcagcttcaccgtcatcttcagatatttctagaaaccgatcacaccgcaggcctagttatgtatcagaacaagtcagcagaggacatcagcgtgaggaaaggtggtcctccagggaacaaagagatgatgggccacccggtgttgacgatagttttagctcagcaacatattttcccagatatggtagctatgaatccaactacaactctcatccagtaggaaggtttgatccagacagaggtagacgaagccgttttgttgatgaaggatatttaaaccacggctcagttgcttcatcctatccaccacgtttgtcaccaatagattatggttccagtcgatatgaaaattgggttgacgaaagcaggaatggatacgatccggataatttgacaccatgggacaggcatcgccatcccagtagaaggtaaatggagttccgggatgtttgttgtagccacaaaagatctgtagaagaagagtttttcctcagttaagaactgaggaaaggtttgtacaaaagaattagaagcatctttgttagatggtttttgaccaattaagcagcttataatttttaggttagtatacagatcgcttgtactgacacattggaatgtagttgttatatttactacacattgtttgtgaccacctttggtgagactttgtccatgacagcataagagcatttagaccattatttctttaatcttgtttaatgtagttgtctggatttaatttgactatatctcacttgttaggatgatactatgtcacctagtagcaaatccaataacattatttaagctttttgactagtagggataccggtagggatattttaggaaattataattctagttaaaggaagcattttatccattttttaaaattttaaaatgatcttgaaaacagagtttaaaattcaattgcatgtgtattttttttttacaagcgtgcagctgaaataatataactacaatatacatagttatataagaaatttttaaacataatttctctaggcgttacaaattgagacgtctcaactacaaaagtgacagtacggcataattttatatattttatatatacaacaatggttatcttcatttggtcttcttaagaactacagtataggtagggatgattatatttcattttgtcatgagagacaaaaaaaaaaacttgagtcatatcagccgagacagtggaatacttaaattattttttgtcagaaataatataattactaattagacacgcttggttgggtgatgcattcgaaatcgtcaataatgattcattccttactactatgcaataacataatacatgaaattaattagataccaactaccaacgcaaactacgatccctcgaactaatcatagtcaacatcgtaaaaaatcattaagccatgtttggttgaaagagagataaatacatatttggtgcatattttcctttcctttcctttccttcgtttcctcgagattttaaaaaagatgtccttaatctggattattaaactcaaaagtagaaaggcgttgagaaaagatggaactacttgatcaattcaaatgacagtgacataaaccaaaacaaactgcctttttttcaaaatttgtaactttatctatagaataacatcatcaaccgcacccacacaaggagcgtccgtaactaataataaataataactgaataaaaaccaatgcttgctaaccacaagtcaatcacaact

SEQ ID NO: 16704 - DNA, 5103 bp, Cannabis sativa
agagtaagaagaatccctctatgcttcactctcacgcacccaattcttggaaatgcatctgttcacaaccaaaaaaaaactcagcaatggtatatgtatacatatataaatatatctataggctacaacaaaaaagaaagaaaagaaaaccgcccatgtgaaataaattcgtccgaatgattaaaataacattaacagaacattaccagatttagataactcgaaaagagaaccgttgatgtcaatccgaacatgaatgaactctttcttaactcctttttcagaacctttaaattcctccattatgattttctacaaacacaaaatcgtcattatagttacatttccattgatacagtcaaaacaatatttacgtagagctagtgataaaacttcgcataggtacatgagcccaaacagccgcctggtcgaagaaacgcaagtactctgtgggttgagagaagacgagtccagccaaagaataatcatcctccaataactcagcaaacctgaacacacacacagagaaaattcatcaaaatttcaccgaaaaaaaaaaaaatcactaacaaaaaatcattaagcttaaatttgggggttttacttactcaacgtaaagaggatagtgaagcttagaatcagttgagagagcaatagagcgaagttgatcagaatggcgccgtaaaaggaactgcgccaacgatttcacgtcggccgaagaatcactcatcgccggcgaattcaaacgaaagcgacgacgacgatgatgatgaaatatggagttttggcgggaactgcaaaaaatatatacataccccaccgagtttctttccttcctggttttatgaaatgacgattctgtccctaatgggaaaagctctgttcatccataatctagactttttaggtatttcactaccccttaccaccacgttttccctcccctacgcttcatatatgtatatatttccttcattcatacaccaaatgaagtaacagtttcttcttcaaaaatatttcgagggctctactctaatcgtaggtaaattttcttactccattcattacattaattcttcaatgcatttattattattattattatttccattaacatgaatttgagtagtttatttattttttttaatggaggaaagaaaatgatattataatgtttttgtgaacagaaaaaatgtgtaagatcccaatttttgttttgtatgatgggaaatgggatgaaaccacaaagaagtttgttgataacaagtgcacaggaatagtaattgagaagaatattaactacactgagttgcttgagaaattgtatagtgttttagagttgaatcccactcaaagcaaaatagttttgaagattgatacatcaatcccagtaccatgttcttctccatacatggatctttcgaatgataatgatattcagttcttcttgtccttgaacgaaaaggataacaatcgttgtcccttgtatgtcagcattgttggtccagaatattctaaaaaaaacccaccaccatctgtttcttcgggcggaagcaacaatcgcttttcgaggattcctttaaaggaaaagcaaaacattgaacaagaagtagaatctaagagcaaggttgtgttgggagataggtgtggtggtaatggttcaattaatggtaacacgtcttttgttaaagatggaaatgtagggaatggagccaaaagatttgaagatattaaggtgggtgacttgttttgggacaaagatacattgaagaagaagatatatcttattggtatggtagggaattttaagattagaattgtgaggtctactgctaagatactagaagttgggtgtttggatgagcaatgtatgtggagagtttatgcaggaaggttaagcattactgagttttttgaggtgagaacttatgataatgtgcatacttgtgatttggatgctgtaagaggaaaatatacaggattgtctggtaagagaaacaaaaagccaaggattcttctttttgatgatgaagatatcgtgaggaagtgtggtaaatgtgggaaacctggtcataatcgccgaaattgtaagcctctatttgttattcttaactttgattcacattttacattgttgttatcatttattagaaactccttaccctttaccacacactttcatctaacatagaacccaccaccaaaagctagcctgagattagggtgctcgagtagatatttagtacatactaatatcacacttagttgatgtgggatcccaacataagtgaggtttgtgatgtgattttgagtgtgttgtaaacacactgaatttttctctttctactgaaaaatccgaagcagcctgtggactcaagcacaaattgagtgcttatgttaatattgtgtgttgttttacagaactgttcacttaattaggttgagcatgaataattatttctggtttattcctaaatatttgagaaacattaaaatgtatatttttcacaaattgctcttactgcttttatacccataccctttactctcatagactcatctaaccaattgaattgcccttaagtccttattgatatatttgttattaatatttttaatgttgacaactatgatagttactgatgacaggtaggtcaagtagtcatatttgttttctcatcaaatattgcacaattttgcacaaataccagtgtacaaagaaaaggaaaaatggacacatttcttccttgtaaatgtttatcattatacaatcagtttatctacatatctattgactgttggaatacttattagtgggtcttaatgtgtaaacataatgctatctattgaataagcaatatgttttcttgtaaaagaagagagaatagttatagtgttcattagtacaatcttaattatgtttttgaatgaccaaacctcgtttttagaaagatatctatatattaattaattcaactttattctttgtttttaacatggttaggaattctagacgtagaaattgtctttaaaattttctacttgtgaacagattgtcctgcttgatttttatagcttagaatttaacgatgttcaaggccttataaaaatctgggaaccatgtttgtttggacacttctaatgacaggttatcatgattttgataattctagtggggaagagacagagtagttctgaaactccattagtgaaaatattaaggtaaaatgttcctaccataatttgacacaagtgtttgatatgtgtacttctacgaagcttgtaaactttctcagtataaaattctgtaagtgggaaattttcatttaaaagtaactgggtaccaattttgtagtttcaactagacaatgtttgcttattccttcatatgtcaggtgttggacaaagattagcctcaagtaaaagctgacttggaaaatcttgggctgtgacttaaagctttcatcataatgttggttataaatatgcattatattgacaatttatgttgtgttttaggaagttaagaccttttcttttttgcatatattgttcttgtgaatttcttgttttacatatttttctgttaatacaaagacaaggaatttgaattgatcatatgagtcattattaatgtcatatactgctatacgagacattgtttatgataaaagaagaaagaaatatggaagataaacatacttctttagtatggaagaaataagtttgaatcaactaaaaataaaatatatcagatttgtgacggtctggatgttcatattggtgtccagaaatctcactgtctcgttcttgtgcgtcgacaaaatgggaagaggaatccattgttggaggatatgttgtcatggacagaaatccagttcagtaatatacatgtattagagcctaagttgttgatttatttatgaaatatagttggaagttgtggataaaagacaatgaaattatcatattactgggttagttcctacagattttttgagtgaatttactggaagtggaaatcacctatttgaaggatgaattctttgttttaggacatgatctgcataattttgctacccacattaaaagtagaaagtgcattatgaaattgccaacaaattgaaagaggttaaaattgatagtgtactctaaggagatggatacacacaatgagtcagatacaaaaatggggaagtaatatgagagttatggtggaattagatctgggtgtatttagggctcgtttgataagttgtattatgtcgtttgatacaattagtcttgaaaaagatagaggctgaactgtcatgagtaaggcagctcacggaaataatattaaatttgaatttaggaacataaagaacatctttaagagttagaatatcattaattttgacagtaccacaatgattaacgacaagaacatcattgtttggcaatatcaaattagtagagctcacaaggcatatgtattgaaataactttgcattattacaaatgtgtcttgtagcacccgaatcaagtatccaagattgtttacaagctgaaattgtgttgcaagttagaaccatacctgagttacctgtcgaggaactcggatcagcaggtgtaatactcgattgttggtttgccaataggttgagaagttgctgatattgggcagcacttaattggggaagaagggtgttgttgtcttcagtattggtgttgttttccttgctggtttgcacctgattagcagcttcttccttttgtttattcttgttaaagcctggtggatatccatgtattttgtagcacctctcaatggtatgaccgagatgttacaatgggtgcaaaaaggcctggttttttttttttttttttgggtggatggttcttggttccttgattttctggtttagaattggctttgttgttttgaaaggcgaaagccatgtttgaagaagggtcggctgtaccagcagcagtactatttttctggttttcttcttgtgtcacaagatgaaaaacgcgattaactttgggaaggggatacatgagcagaatactaccacgcgcttgagaaaagtggttagataatcccatgagaaatgagat

SEQ ID NO: 16705 - DNA, 3474 bp, Cannabis sativa
  modified_base (40)..(52): a, c, t, g, unknown or other
ataattagtcacaactttttttatctttagtcacaaattnnnnnnnnnnnnnaagtaagattttttgtagtgatagcagcgccgtcgaacgtaaagtcaaagggaataagggagcaaaaaaaacatgaacagtgaaagagaatgagagagaggttgagagaggaagaagagtgggaattagggtttttaaattttaggttactaaaattagggttttttatttttaagtttttaatttaatttttttgttgattaattaaaattttaaattttaacaaaattcatatactttttattttatttttaaatatttatctacgtgggccaattaaattgtgctacgtgtatattgtgcccatatggacaatattctatgtacacgtggacaaccatttaattgccaaagatgaatgaaaatggctaaatgctaacaaaacataagttttgagagttttgccgctaaaatttaaattttgaaggttaattgctaacaaagtgaaagtagtaagagttttgccacaattaaccctaaaatatatgttgttttattttttcagcaaatgttaattatgccctgtgactactcgtataactacgcaaatattatcttctttaatttctttatttaagatacaaattgatcaaatgcacctagaagataattaattaagctaaattaaaagataaaacaaagaaaaagaaaccttcaaattggctttttttttttttatcagcggatcaaatgatcaaaaacacatagacgaaaaaggtcaaaaggcagcttgaataaaagtctagatatgtcaaagttatgcagttcgccatgcaagacttttaacaatatattgttacatacttaactttgacttgcttttatttcttggtctctgttaattgtgtgcttctcttaattattaatttctagtactgactatgaaaatttcaaaagaatgtttaaatatgaatccaaactatatacacatataatcatgcaaatagcatagacgacagtttcaattcacttttacaacttcgttacatattagtacatgtacctaattttcatatgacattttcaagatttaattcttttcctcaccatggtctctttaactaacttttttcttatccatctgtgtaagaaacttttgccaagaaaaatacattttcccactgcattgtacgtgcagaccgggaccacacaatttgtaaaagttagccatttaattgtatatgcattggtatatctttaacactacaatagaattcgatatatcatcaatatataattacaattaaacgagcacatgcaactactaattaatttgtaaaaaaatgatatattattattatgaaggaaaatattattatttggtgatgatttgaaaatcacaaacgatcgattactattattattagtatgttaattagctcatttgagaatttgtacaaaatttattaaattacttgttactacaagtatatattaatttcattaaagtttatttttggggccaattatttccatacctcgtgttttaaaaatataatgataatatgtccttatgaaaaccaaattaatataaaaaatgataatgacattttagtttagtcgtcgcaagcattcccatcagcttaatttactctctattcttcaaaatactagctactgcttgctaggaatctaatatcaaaacacaatgttaaaaccatcatgtataactatgtacaattaattttctcactaaccaacaaattactataacatcatgatatataatatattgaatataggttcacgtgcatggatttttcatacctccatatgtagattcgaggaggcaaggctggaccggcatttgaggaactctctaaaaagttgtttatatatattatgattttgggaccacatgtcctaattgattcattttggatggatataattcggaaccacctacaatgtgattggtaaatattattttaaactttgtgctttataaaaaaaagagtaatttgcgacaaaaatacctaagttttatgccgagtagcaaataaatacctaagtcgtatttttggcggtaaaaataccttccgtcacacttttggaacttccgtaggtacctctccgttttcttccaggtaagtgtccacgtgtcatccttttattagtccacatcattaatttttattttttattttaaaattcattaaaacttattttaaaaatcatttaaaaataaaaaatatataattaaaatgtataaaataaataaaaaaaaatattctgaaacctaagaaattattctaaacctaaataattaattttttttctttcatttttgttaaatggatttttcttttatttcttgttccattattttttctttgaattaaaaaaaatgctaacataaattaaattcagattttgaaacaaaactaaaatcaaaagtctaagcaaacttagattttgaacaaacaaaataaaaaagaataaaagaaacccaaatcttcaattatccatcaccaatacaaaatttctttgataccctaaaacaaaccaagaactttccaagaacagaaatcttatacaggatcctaaatcaaaatatattacaaataaaatacaaatgcaacaaatgaaactaaaacccaggtgaagaacaaaggtcagacctgtaaacaaacccagaattcaaaactcaaacccagaaatagaacaaagaccacaaatcgaaatgcccaaattcaagcttagacctgtaaatattgaggggttttttttttaacaaaggtcacattcagataaaggagaagaacgcacaaatgacatgctaactctaaaaattgctcaccctgtcgattcgcattccaatatggtggtcctcttcggcttgtcgatcctcattcccagcacgaaacttgttaaccctttcaaccccgcatgcttctgacttcgatctcgtggtcactcgccggtagatcttgatgagagatttggggttttttttaattttttacaatttggttatagagagaaaaaggaagaaaaagaggatgagatgtggtgaaataggactgttgatagtgagaaaccaaacaaagctagagaaaacgaaagagaaataaaatgtagtgagtatgtgtgtgtgggcctattacttaccagttggaggtggcaggttttagaaagagggattaaaaactcaaagaaccagaatccttggatagagtaggaaagtaaaaagggataatgccaagaggaaacccatttcataagaaggagacttgatgtattttaatagcttgacttgctccagtaacgtccatggggaatggctcacctggtacaaccttagcggggccttcaaggactcaggcgtagccacgtccaaatcccagaacgccgaatccatggtcgtcctcagcctcgccatgttttggaggagttggaagtttatgtgtattttaattttg

SEQ ID NO: 16706 - DNA, 4878 bp, Cannabis sativa
agaaaattcaacaaggtttgatctccacaggatatgtgaagaccggagaacaactaggacatatttttacaaaggctttgaatggggtgcgagttgattatcgttgtaacaagttgtgcataattaacatctatgctccagcttgaggggagtgttagaatattagttgtaagaaattagggtaacttgtattttagtagtttccctttgagtctcctagctttgtatataaatatgtactattctacgaaatacaatacacaattcgattcactattgtctacaatagaaaatcgagaaatcaaacgcctgacattttggttatctactttaatttattcaatgtatatctagtttcttaatttataggattggtattgttttttatttattgtattatataccctaatacctataaatgcattctgttatgttgacaaataaaatatatcaaaatattaaaaactcaaatatatcattatggtgtcaaacgtttcttatctctgaaagttctcaatcacccaacaccattttttccgacaatcattcaagaaatctcaggcaacactccaataacacgaagactagtcgcacgtctctgaccaggcacacggcagtcgactttccttatttctatcagacctatgacttggcgcagaaaaagctcaaggacccaatcacacacttaatgtcacacttcacgtttctctgttcttttttaggatgtcgaccagtgaagatacctcttccagcccagtgaagcaacaactcagtccccgacaactccaacactctctaaagtcatgacaatggttccatccagataacaactcataaacttgaagggaaaaattacttgcagtgggctcaatttgtcaaaattgtcgtatgtgtcgcgacaaactcggctacattatcgttgatcttcccacaccttctataactgatccactctataaggtatggcaggctgaaaattcaattgtacttgcttggcttattaattctatggattcaaaaatcagtcgcaagtatctgttttacaaaacggctaaagaagtgtggaatgttgctcgaaaaatgtattctgacattgggaatgcatcacaaatatttgagattcaaacaaaactcattgaaatcaaacagggtaatagtactgtcactcaatatttcttagacttacaagatttgtagcaagaactcttgtagcaagaactcgatttgtatctcgagacaatgcctctttgtcctagttgtagtattatacaccgaaaacagttggaaaaagaacgtgttttcaaatttcttactgggttaaataataatcttgatgaagtacgtggacatttggttggtcgcttaccatttcttgacaccgaggaagccttctttgaagttcgtcgtgaagaatctcgtcgccgacgccgtgttatgctcactaattcagaggctaaaaattctcaaatgtctgaaagtcagccctcgcttccaataagtacaaacatccatcgaataataagcctcatcttgaccctcggctaaattggaagggtaaaaatccacggtgtgatcactatcagcatcaaggacattctcgctctacttgttgggaaatacatggaaaaccagtcatctagactcctcgacgtcctaatgattgcaaggcatatcaagctcgggacacaaataaccctaaaattctaccacttaatgcatcatctcaattcaacaaggaacaacttcaccatttacatgctcttttgaatcaatcatcccgaaaatctttatctagtttgggatcacatagtgcatcttgctcagttgtacactctagtaatttttcttctacccaaaaagactctcaaacattatggattattgatccaggtgcttttgatcatatgacaagcttatattttgtgtgaatcataatactccgtctcctaagcgttctagtgtcagaatagcaaatagcacgctttcccctattgcaggaattggtaccattaaattgtccaatgattctcaaatcagcccttcatgtggccattatttctttgaaaatcgtcaataaataatacaacaacctagtttcccttattcgacttctaatttatctaataatctcttcctattttaaattctgtttctattgataaacttatgttatggcattttttacttggacatccaaattttttatatttaaaacatttgtttccatcgttatttgtcaatcatacatttgattcattacaatgtgatataggtcaattagctaagcatacacgggctatttttcctccaaaatggtatacaccaaccaaccctttctctttagaccacagtgacctatggagaccttcaaaggtaaccacctctcatgtatccctgatttgctggttcattgcatttattgatgatcacacacgtcttacttgggtctatctactcaaacacaaatctgatatcatgtgtttcaaacctttcatgtcatgatttagacacaatttcagacgtctattcgtgtgctaaaaatcaataatggcaccaaatattttattaggaccctacctgtctcaaaaatgtatcattcaccagagttcatgtgttgatactccccaacaaaatgctacttttgaatgcaagaatatcacaccacaattttgttggaaaaaaagtcttaaacccgaattcagtcaaaagctaataaattcatattacctcatacacagactgtgtcatagctctatattctgattcagcactggatctagacacaacattttgattcttactcttttaagagatcagattgctcccaacaaatacacaatatcctaaagtggatcgtctatctaccttggagcctgcccaatctacatcagagaaacactcaatctaggtatgtccatgatccttgtaaactatacctcgtcttggtgctccttttaagtaacataaaatttgctctagtgctgcccaatgatgaattgttggaaaagacataaattgactaatgacactaactgggatgcaatatctggacgagtcacaggtaaataattccactttcaaaccaatctacgatatttttcaagatcttcaaatggtttcccatcacgtgtaagatgcacagctggatttattggagcattacaaggttttgctcccaattttcctgtctcagttaacaaatcaagtacatacttcttttgagacagaaaaatacattatttactacaagtaacttcaataccctagaaatccttgagctcccctaaatccttcatgtgaaattgggtatgaatgaaagacttaaggaatgagatgccttgagtatcattgccagtaataacgatgtcatcaacatatacacttcttcctcaagatctccatgaagcaaagcatttttaatgtcaagttgatgcaaaggccaatgatgagtagctgccatggaaatgaacagtcgaacaaatgtgagtttagcaacaggagaaaaagtattacaataatccacgccataggtttgagcataacccttggcaacaagataggcttttaagtgagcaattgttccatcttgattgaatttaaccttaaacacccatttgcaccctatggtccgttttcctgaaagtaaattaaccaagttccaagtaccattggcaactaaagcattcctctcttgtatcattgcaggaagctaaccaacggtgcgttccgatgtgtgaagtgggagagaagggatttcataattggggttttgaataagacgacccttgcatttttcattttttttctttttcatagctaaaaaagaaagtaataagaatgagaggtgttaaccttttcatcatcctggcgttgagctatttttccgcaggacctcccctacagtatcgtcacccagtagagttcaaccaccaagttcgatgagacattgcatcacgaacagttttaggattagtgatagaatcaagaaaaacaatataagagcaagaagaagagcagagatgattataagaaacaaaaaaaaataataggaaaagtatatacatttacgtagtgcaatgggaagatcatctttgagttctggatctgatgacgaatatgcaggtgtaggacatgaaacaagaggtggaggatggggacgcttagtgtacactataggaggccgagggagtggtataggtggtggaggtgtaagcgttgtgggaggtatgaccgaggcaggtgaaggaactagaaactcgtcagaacatgtattaggcacagaggatatgatagaatataccaacaaataatcatccttcccctgacgagtagaagtagttgaaaatgaaaaataaagtgtatttgccacaaaagtaatattaatagaaataagatatttgttgagatcaggacaataacactcataccctttctgaagatgagaataactaaaaaagacacactttaatgccttagggtctaatttggtgacatgtagacaaacatcgcaagcaaaacaaacactgccaaatacccgaagagcaactagaaacaatgacttacgaggaaaaagaattttaaatggaatttcaccattaagtacagaggatggcatgcgattaataagaaagcatgatgtggaaactgtatcgacccaaaaaggtttagaaactttcatttgaaacaggagggcacgtgcaatttcaggaaaatgtttgtttttacgttctgctacaccactttgaggtgcaatatcaatacaagtttcatgaagcatgtcattagaggtcatgtaagattgaaattgagcagatgtgtactatttgacattatcacttctcaaagtacgaacagacactaggggtgttcgcggtgcgg

SEQ ID NO: 16707 - DNA, 5060 bp, Cannabis sativa
  modified_base (4237)..(4239): a, c, t, g, unknown or other
cttcgcaaacgacactgagaatttggcagaattaattggagcaattcatcactcgctgcaaatcaaacccttctctcgctttcttcaaatcctatcatcagaggtataaagtttacttttttcttcatttttttggtcattattgcatacccatttcatgtaatttcttttcgttttctttaattgcatacggtaagaatctttttcatgttcaatcgtatatatatatttatatatttgggataataatttgttaatatgagattgtatgtcaaaacatgatgaaattttgattatataaatttgatgtggtttttgtttaagattatttaattttgagcaattttgagagaagagaaaatgtttgattggctgaaattgtttatagtttaatcatatttgactgtttaggatttgttgagtggacaagtttatcttagtcgtttaggcgaaaaattaggttttactcttttaaagattccggatggaaccgatccaatccaatgatttattggttcggtttggttgagcctacagtattagattggatcggttggagaaatttaacatctaatgtataattggattggacctggatgggtctaaaaacattagaggtgatccaatgaacagtcctatttgttaccacggttttcctccaccataagcgagggtatctatatatatcgggggaaataatagttagaaatttcttatcgtaaaggggttctaaagtttgctccttttttcttaggtcaatatgaagacagtgtcagggactgcgatctcttcaaagccattatctctatcaaaagctacttcaattctgtccacatttgtctcttctgatactggcgcttctcaagctatggctgcatatcttcgacgctcgttggcatcattcaaggagctaaaacagcttcataaagacctcaagaccaacaaatcagaacgccagaggaagaggcatagagctgctgatgatgatgagggagagacaaatgttggagaaagtgcagctctagttttagacccaactcaagaagtagtgcaacacgagttggaacctgagcgtaaaaaacaacgcagatgagttcattgtttgatgattcttcttttaaagtttcccaatgttggctagatttttggatttctgattagtaggttaaccatcgtttcggtgtctttctataatcaatggctaagcctcaattttgtttaggttagtaccattttatgttaggttagaaattgagttttacatgctaaggttgtatctttattatcaagtttaattgttcagagctcgtctatataaatttgtgttgcgaactgtaatgtatttgttctgatatttgattagtatactaatgaaggttataaattgggcctttcatgctatggttgtgtctttatttttaacttttctaaccataataatgtcatttgttctgatattggactagtttacttctggtgaaactgttcttgctgttgatggataatccatttcggtcttataggaaatgccacattgagataaaggtttgaactttagaccacccttagtgagaacttatgtagatgtgaactggatcatggattatgcagagagattattaagtattgacattgtttagattagtcttgaccatagttgcattattgttaagtcacacatctgaaccaacaaattattcttttcttgatgggtcaagtgtgactttgtgtttgattctcattttgtctgcgaattttatgaacattctaagtacaactagctgaagactttgaactcgtcgtaacttcatgatgacttgtgtcgatagatagttcctttaagaacaaagagttcttctcacgtgatggagtagacaaagatttacttctaagtccaattatcgtcaacagcggggcttggagaaagtgtcagatttacttctacctaacggaaattgggacacactcaagcttcacagtctttttgaccagataattgttagtaacatcttaagaggcggtaacagtctttcaaaaaaaacaaagcatggaaaaagtgttgagagagttatggtttattctgcattaatggtagtgaaattaagatttatgcagcagcctttttggtctgtttctataagctttgtttgtgactctcttgagtcttgacacaccacaccaaagtcaaaccacccccttctcttcacattactattgttaatgttatgatgaatagttgataatagtagtatcactattaaatttcatgattccattatagaactttcacttgttgtttatcaaggctatgtaatgtttctattggccacaataccattagaatagaattatatgatgggtcattgagacaggttgggtttgcagagttcactagttttattttatacacataagaaaaagccaaaaggtactgttgtttgttgtgactgtacattgatagtgacaataccacctagcctccccctatatgcaatttgcttacttttggattcatttaaatcttatgtaattgttgggaaaattaagtattagattttatataaattagttaaataatttttaaaaaatattgctaaataattgtaaatatagtgtccaatagtaatgttcttttgaatttttatcttagttcttttatttaattacttactcacacttttgtttcttgttaagagtaaaataagcattgcacgttttttttttaatcaacaaaaaataaattatgtggtcaatatcttttcttcatactattggtagcttagagaattctagagaatacgtgtcaattataagaatcttatactttatttttctaaattgggtgatcggtatgcacttcgagagctcttatcccattaaagatgacaataccaaaacatgttagttttctaaagggccaagcataatccctcctataaagagttgtggtaaaattccaatcctttaagtgaagcaagaaagtatgacaataaagttataagcattatatgttattaaacaaaggcataacacattagacatagactaatagtgttttttcttggtttggtttggacaaaaaaagaagaagaagattatgatgatgaaaagtagggctgatttgagtttttgaattttacaagacaaacatgtgattgtaaaatataagtagactttatttttgtcagagacaagctaagctagtaaagtgagttaatagagattattaactattataggataaaaccaagagagatgttggaaaatcatgattttgagtagctcaccactgtccccaattatatatataattattaaaaaatgataataatctcgaccaaaattgtcatagttttactctgaaaaatcaacaacatgcatagtttacttactttaataagggtcaaagactaggttcttctagggaaaatacaatattcttttaaaggttgtttgaaaaactctctatctatttcattaggagaatttttagtctaattttttttttataattgtatgcattgtagctatttagtacaacatgtaaatttttaaaaaaatttaaataatttattatggcaaaaataaaatttacatattttgttattatttttcttttatatacgcgtgataagtaattatttaaacattattttcgacactgtaagttatttaaaattttttaaaaaaattacaagtaatcttaaatagttataacatatgcgaagatgaaaaaaaaataaacttcaaaattttcctgccgaaacagataaatggtctactagaatgatactttaaggtgatccattacataaatttttttcctatattatatataatatatgtgaaaaatgctaaaggggtacacgtggtgcctatcacctttctgaggtgtaatattattattggtgcaacttaactttagatctcacttattttattttaataaatattataaaaaattactaatcaattatatagtgacacttcatagtggtgggtgtctcatagtaatgttttatctatacacgagaagtgctacaaggcaataataattcttagtatttttttttagttcaattaagtatattgttattaattaaattaagtatcaaattatataatttaatataagctaattaggatttttgtcccctgaactttgacatgtaccaaatcatgtcccttaaaacttttaaggtcgttaaaaatactccttgaactattgagattgttnnntttaaggatttttttcccaattttagtaaaaaagtctaacatggatgaaagtctaaggattatgatttagtacatgttaaagttcgaggggtatgatttgatagatattaaagtctggggagcatgatttagtatataaacaatcattaaaatagtaaaattgaataaattagacaaaagtatttaaatccaacaatctcaataatttaaagagtatttttaacaatcttaaaaattcaaaaaatataatttaatacatataaaaatttaacaactaaaaatactaattaacctttgatataataattttaaaaaatattagtaaatcattcactttcaatatgtatatatatagatatagagtagagggtaaagagtagggggttaggtgtgtcatatgtatagtgtttttggtttttgtcagagtgagagagagataggggaatcacgggggattatttgtcttaccttcccaatttcaattctataataataataataatgtaattattattataataattaagcatgtaatattttgttatatataaattattaaagagaatgagaagtaaaaaaaggagaatttgggtggtgttgtgtgttctgatgatttctgactctattatataaaagaataaacacatagagaagtggacaaaagagaatggaagaattgagtgagtagtcatgatattgttattacttattagagtacttaatgcatgcaaattatagtgttgtctttttgtctttgaattttacaataatacaacttcatatagcatagtaaaaactccaattctattctattctattct

SEQ ID NO: 16708 - DNA, 2442 bp, Cannabis sativa
atgtggccattaaatgttcattatttacgtgttgttttcttattagtatatttaaattaatttttttaaaaaaaataaaaatttaataatctatattaaatgtgaaagtcactgcaaaagttctatttgcaacttaaaaaaaaaagtttgactaaaaaatcaatttttaaggggtagaattttcctaatacatattatgtataacaaaagtttgttaattttgcctctcttttaattagcattattacttaagttgagagttgagagagttagagagattgattgaatcatcaatggaagtcatcatcatcatcaccaccatcaccctccttctaatctctttcttcttcctcaaattcattaccagaagaagaaacccaactcttccaccgggaccctttgctcttcccatcatcggaaatctcttattcatccgaaaatccttctcccaactcgaacccatcctccgcaacctccacgccaactacggtcccatcgtctctctccacctcggctcacgccgcgccgtcttcatagccgaccgtgttttagcccaccaagcactagtccaaaacggcgccgtattcgccgaccgtccaccggctctacccaccgctaaaatcttcaacagtaatcagcacagtatcagctcagccaggtacggctcgacttggcggctcctgcgccgaaacatcagctccgaaatcctacacccttcaagggtcaagtgctattcacgcgctcgcaaatgggttttggatattctcttaaaacgactcgaattggattcacaaaacgctgccgttttggctcattttcagtacgctatgttttgtttattggttttgatgtgttttggggtaaataataagattgatgaaactaagattaaagagattgagaatgttcaacgtcgatcgttgttgactttttcaagattcaatatactcaatgtgttcccaaggttgactaagattgtgtttagaaaaaggtgggaggagttgttgaagctgagacaagaacaaactcagattctgttacctctcataaattctaggaacaaggttgatgatgatgatgattttgtggtttgttatgttgatactttgttgggtttagagttaggagaggaaatgaggaagcttgattcagatgaaatggttagtttgtgttctgagtttttgaatgctggtactgatacaacctcaactgcattgcaatggatcatggctaatttagtcaaatatcccaaaattcaacacaagatttatgatgagattaaaggggttgttacagccaagaccggttctaaggtatataatattttctctatatgttttcttattatttaatagtttatctatatgctaatatatatttttttttcttcataatttcggggcggtgagcgttcggttgaaggaggagaaagaggggtgattgaagaggaggatttggagaagatgagttatttgaagggtgtgattttggaagggttaaggagacaccctccagctcattttgtgttgccacatgcagtgagtgaggatgttgttttgggtggacatttggtgcctaagaatgggagtgttaatttcatggttgctgagatgggttgggatccaaaggtgtgggaggatcctatggagtttaaaccagagaggtttattaatggtgatggtagtaaggttgagtttgatgttagtgggaatagggagataaagatgatgccttttggtgttgggaggaggatatgtcctgctcatgctttggctatgcttcatttggagtattttgtggctaatttggtttggaaatttgagtggaataaggttaatgatgttgatgatgttgatttgtctgaggtacaagagttcacagttgttatgaagaatcctttgcattcatgcttgactctcaggaagcactaggagactatcttgttaaaagaactattatgtctatctactgttgttggtttaattgtcttaagttaattaagttgatcaataaagacattatttgttgtggttttcatatggctggcttgatgttaagacacatatatatgtagtagtcctagacaattaacaaagactaattgaaaactttataaaagaattgaagaagccttcatttgacagctgaggtaatccatcatccatcgagatcaattccattgtattttgttaagacactgtttcgattaaccaatctagtagcaaaacacacacaaaacagtagcaaatagcacaattgatatgtatattgaatatatgagtaaactatttacaattgatagaaacccttagccccctttgatgcaaaaattttactcacctatatatagtaattcctcactcaaagcatgagcatgagggattattgacttgaacagcatctgattctcatcatcataaaatgggtaaataccattttaga

SEQ ID NO: 16709 - DNA, 6654 bp, Cannabis sativa
cctgtgggatcgacctcactcctagtgagtctactacttgaaacgatacgtacacttgcgtgtgctaaatatcgcaacaatgacacagtacatataattattagtaactataaaatttatagcaatagccaattgttgatctattcttaggaaaaatccaaaaataaactaatcaacaagatcaaacaaaaacaagggtggtgggtatctgtacacaaatcacgtacaagcttgtggaacactattcaacttcaactcatgttttacaccatttttttttctttctgatttcaaaaataaaaatagattgcacttatgggatcctcctcacatacacaagacatcgaatcagacaaaagaataagccaataaaataatattaataattttatataagagaataagcccactaggaaaatggcaaaaaattcacactgctctttcctaatacctgttttttcttttttttggggaactcttcaattcagttatgctctcctagcattcactgaagggaaagaatttcttttgtatgtcatttgaaatggaagcaaaggaaacaaactctggatgttgatattgcttcaatctcactaatgtcacttctgtccagcagtagctgttctcttcgcttcaagacttgttccctccttgagtgctacatgtgcttcattctccattccaagtgcagaaagagctgcggcctgaagataggaagcaacatgccatactggagaaatcacctgagcttgcattgcatcgttaagagcttcttgatgcatgtcgctcatgagatacgataaactacgcctcgcaaaaagagtcggggagaccatggttccaacatcaatgaactgcaagagaaataagagcctgtcagcagattataaacagctaaagcattccaagcaggcaaaagggaatataatacgatattaacctgtgaataacactcgatagccattccaaaatccttttgcttaaatgcgacatcaccctttttctttgaatttaaagtttcctgcatttggtcagtccacatctggaatgacagctgcatcagaatatcaaggagaaaaaaacaggctcagtactcgagcgtaacagaaaaaattgcacagaaacaaggaatgaactaaggaacaatgcaatcagcataagaggcagcagaaacactaaatatctatggcatgtaagagacaactaaaggacctcatttgtgactccttcatcatccttatagccaattttttctaagatctcatgtatagcagtcaagtctcctctcgagcaagcctcaccaagcggtgacagaggagtgcaggaaccactgtgtggaatgcccatcaagagataggagagaacctgcaaagctcaacagaaaggaatttgatataaaccacagctaccaaaatatgagtttgaattccaataaaagcatgcaatgcaaactgaaacaatggcagggtttacacttcaaatgcagcctgccataggaactggcgagtcaatgtgcattcatgaggctgaatcatttatccaggcattacattaaacgcaacttaattgaaaaaagtttggaagttcctaaacttgaatttgaaggtaattatatgaacagttgttagatgaatatataaacaccgagaacatccgaaaatgctactagtgataaactcataaaacaagaaaccttattcacaaaccaaaaggtcaagaaccagagaaacattaaccaccagcaatcatgagaataaaagtcaactcagaagtagattttagtagattttagtggctatcttgattagagtctgcaaacttcaataagataatcttgaacgaagtcaaacaatattcaccaacttaagttagcaaagaaattttcaagaagaggggtaagtgacctctgtttccttctgaagaggagtcaatgctgtaactaatgacttcggatttggacgctctctaggttcatactgcaagcaccgtgatgccaagcgtaccaactctgtaccatcatcctcagaaaactgtccttctaagcaagaatctgttaacatctggatatttttgtcccgtataaggtcaagagcctggaaaattgtttagattgttaggtaagcatataattcaatcaagaaaaaccacatctaggatacatattaattcaacaaaactaatactgataatgttaatattttagttatatattacatttacaacttacatggcttgggggaatatgttttccgctaagaagatcaagcaaaagagtaccaaagctatatattacactctcgggtgtcactctccctgtacagcaagttaaaatagaaaaaacaaatttagtgatgcttttaacataagactttcaatatacgtccgactttaaatcatatataggcataattactaaacacatgtgaaaacttaaaaaagagaaagaaaagcatcatcatgtgattcataaataaaattatagtgccaacatatgacttttgaggaattttttggactggccacagagaaaccttgtaatcagcctagagtcctacacacttgacatagatcaataatacatgtcacttaatgtgtcatttatattttttgacaagcctgtaaagggccttgaccttgaagccctataatattttgtcaccatctactgctgtttaatagtgtaaccaataccttaatctcaaaactcagttccaaaaccaagagatttatcaggaggggtaggggttgcataccagttctcaagtattcaggaggagtaaaagccagatttgtactataacttttcccatccctactatttttcatcaagccaaaggttgaaagtctgggattggcatcctgcaaaaaaaattatttcaaagtttaagggttgcaaacagattacaccaagaatactctggttatgcaatatgaaagtaacgaacctcatcaaataaaactctataagcattaagatcatgatataaagcacgtcctttgcttgtgcagtattctaaagcctgtgcaagatgtagaacaacccttaatctcatcgcccatttcataggctgtttttcccctgcatcaagaaagtaatcaagtcaatttacagagaaattgaaaaattaaacactggcaatgcatctttaactgcactgggcaaagcaactttttttgggaaccaaaataaaaaggaaatcagaacaagttactgactgaaaaagtactaggaaaataaaaaaatcaataagaaataattgaatccaattggttttgttaaattaataaccacaagaaaattacgaaatgccagcaaagactgtcaaaattagaaagcagtccagtggccatcaaaataacatatgacaatgcttcaatatgattatctgaaaaactcttgttctgtactagagggtgatgcccgtagtctcctatttcaacttattaaatttctaatttgttgaagcgaaagttaaaggtaaggacacaatcagaataattagtttttcaatggttagaaacaaattaaatagatgcttttataaactgtagtgtatgcttaagtattaagccttacagtgaaaaagatgttttgcaagtgtttcattgggcatgaattcagccacgagtaatctctcatcattttcacagcagcagccaagcaaattcgccaatctctggtttcgtagtagaccgactgattttgcttcttcctatataattgtgcaaaagaaagtctatcatgatatctctgtaagtggagtgaaaataataatcaaaaaaaaaaaaaagaaactttagtatcactgacatgttaattatgtaaaactcaataagctaatatgtatatgtcaataaaatgagccataaagatatagaaagtaatcttggacagcaagaacaacacagtgcaaaattatatgagcactctctgcagctgatcatagagaaaaaggaaaataagaaaagtttttcaggatgatcacaaacagaacgtaatagctaaaagagcataaatcttcagcattatgcaccagcacatacagaggacatgtcatcaatggtactgttgctgagtcaaaaaactgcagaaaaccctgatgatccccacttgaaattatcacaggatggaaaaagatttgacaaaaaccatcagaaacaatgagtgagaaaaagtgtagtaattaccagaaattgccgggaatcaggccatgccattctattaaaccgcttaactgcaattctgcgttgattctccagtttccctttataaacaacattaggagctttctcaccatgctcagacacaatgttttccaccgcgaaaccagatgtggcattttttagttgctcaaatgtgaattcacgaaatgcaggtatgtcattaacctcagtgttcccctcattctctgcaaaaaaaggaaacaagaaaaccataaaatatattcattactttcttttcaaatttagtttatgtattgggaaaaaaatcttagtaaagtttatcttcaacttgaacctaccaacatctggagcttcaagcacagctgccttgaattgtgaattccagcagcaaggactcagtttggagcatttacaccccatttcaattatctgaaaagataaatgcttttttgattagttatccgattttcagcacagaaatttttgcagcttcaaagttcaaactctgtatttcattctatgatcagacagctgaactcctatttttaggatcaaaatgacaagaaactaatctgttttacatgagattcaaacaaattatgaaaaaaaattatctgcatacagcatatagtttcttatggattgacatattaagatatagataaattgaaaacccagctcaatgctgcaaatataaccaaagtgatcagctttccttcttcttgaagcaacattttggatagtctttactgggcatacgcaatttcctatacgctattaattagtaaccaactaaatcataagtcaaaactgaaactaatgaacacgaaacaataaatgctgaaaggcataatgaataagatagcaataacttaactgcatacatatatttatacctatttaaatttaattttcttagtgtttctctctctctcttttaaagcttctgaaccaatccaatctggtcaagctgaattcagaaccaaaagatacagacccagattccaaaacccaaaaaccagttagaaaaagcttccaaactgagtcaaccacaagtcaaaaccttaaaagcttcgtctcaagtctgcaaaaaccccttatctgggttttatcttcttttattttctctttttacaccttgagacaatcaataaactttctcgatccaattttagccccttcaaaagattgaagcttttcgtctcaaaatccggaaaattaaaaaaaaaaaaaaacgaaaaacaaaaacaaaaacaaaaaacaagcaaaacccaaatcagtaataccgtgaagcttgataatatcagagctcaagatctgcagaagaaaaaaatataaaaataaaaaataaagaagagcttgataagagttgttctaaaccatttgttttatttttgttttctcacactactatttttttagtattatcattatttttaagttttcctgtacaaatatttaaataaaccaattatttccgacatgtcacgaacatttattcaaagccaaagaatctgcataatattttaagaaactatttgtgttttctttttgtgcaaaaaagaaaaaaacttgataagcatgattacttgagaaattatcaaaaccattataataatattattatatataaatttggagtttatagggtggaatttgaggctgagttgtgttattttagaattaaggggccaaccaaagcaaagtcggagaaagaagactctctctttctcttccattcccatcattccttcctgtgccccatcactcccgccgtaatcatttccatttgcctcctttaattattgactatggggacacctttaaacgacaccgtttctatattaactcatttctgtctttctttggtaagaaataataattacaattttctaaatttgattacataaaatgcttagtactacttatcatgtgccttgcttgttaaagctggaatccacctcaggtgtgtacacaaaaaataaaaataaaaaatcccatgataatggtatttcataattatttggaaaattaaatcaggtaacgaaaaatatggcatccatgtcatgatactttgattctttgtattaatttatttttcaataagaataattgtaaaagagtaattgctttatttagatgaatcatttgtcaaacatactatttcaatgcagtttgacattattaggtgggtggggcaaagttgtcagtcaaaggatgaaacttcccctaaaaaaacactctcaaattactttaaccaaaacagtaatactttgaataattattacctttacctctctttttcaatacttattaaatttgttttcctcttaagaaaaaaacccttcattttttatattaaacagcattattttttattttagacttaattaaagatatttttataattttaaaatacaatttattaattatttttataatttaaaatcaatttttattattttaaat

SEQ ID NO: 16710 - DNA, 4720 bp, Cannabis sativa
agagtaactgagctggtgtggtttggcaggttggtgtaattggaaatttggttcactcatccccaaacattaagaaggaggttctcttagctggtgccttgcaaccagttattggactactcaggtaactatctcaattaatatttaagttttagcaataataggctgctgttgcacattagtattaagttatttgctttaaattaaaaaactcattattggatttttttcccttaataataataggtcttgttgctcggagagccaaagagaagccgctttattactcggtcaatttgctgctgctgattcagagtgcaaggtgagctaccatattgcttttgactgtctgttctctctgtgctatgagtaaattataattttatataagaattatgctttaaatgttgttatttatgaagtcttcatgtataaaggttcatattgtacaaagaggagctgtgcagccactgattgagatgcttcagtcttcagactctcaagttaaggagatgtcagcctttgctctagggaggttggcccaggttattacctttttattttcccatttcccttttgcgttttacatgctagaacaacagctggtaaccataatgtataattgtcagtgtgtctttctcatggaccatgtgcttgtgtatatataaatataaatatatatcagacacttgtgttgacactatcgatcagtcctcttccctttaataattgagtccagtgttttataatctttcctctactatatgatttactataagctcattgataacttttaaatattataaatatttctgtacaaatagcacaagactagtagttttggaaacaaattatacattcgatagaacttttttgttgcttaatagtttatgtttccaggatacgcacaatcaagctggcattgctcataatgggggtatattacctcttcttaagcttcttgattcaaaaaatggatctctgcaacacaatgccgcttttgctttatatggtctcgcagataatgaggtagcttgttattttgatttcttaaaattccgaatttaatgtattgtcatgcatgtcatttaatgcctagagggactaaacttgaagtttattctaggataatgttgcagaattttttaaagctggtggatttcaaaaacttcaagatggagaattcatggttcaagtatgtaaatcttaatttttgatttcttttttattagtttttggttctcattacctttctcacagttttgctttgtacattgttcgtgtagccaaccaaagattgtgtagcaaagacgttaaaaagactagaggaaaagattaatggacgggtgagttttcttatagttttggttctttctgcttgtgcatatttggcagtggcttttggattcaattagttgataatttattatatttttaatgatattttcctcaaatcataacttaattatcaaatgcaattgatatgatggtgtttttaaactagtttggtgctttgctcttaggtattaagccacctactttatctactacggtctgcggatagaacagtccaaagaagagtggccttagctcttgctcatctttgtgcacccgatgaccgaaagactattttcattgataacaatggtagcatatacttttcttgctgtttactatggtgatcagacattttttttagatttgtgccaatttaatgtcagaatttatagattttgatgcctttctttttacaatgtgaagcaatccacataatcagtcttgttctttagtttggaagtcctaaatagtactgcagaccctttaataagatgcactcatagtctcatacaaccaagcaaatcattagaaatagttgtaattctccacttatttctgaattgctcttttcttactgcaggcttagacatactaattgggcttcttgagtcagcgatcctgaagcaacagcgtgatgggtctatggccttgcacaagctggctacaaaatcttcctctctttctcctgtggatgcagcgccactatcaccaaccccacaggtattatttttgatgtctagttggttaatttcatgcgtaaaaattggataattggattttcgaacttattcttgtattcacacgatcttatgcttcttttgtttaggtgtatttgggtgagcaatatgttaataaccccaccctttctgatgtcaccttcttagttgaaggtaggaagcttaccatttttagataataaaacaatagtgcgtttttgttatgcagctgattcactcgaagttttgctgaccacaacttgctcacattttatttaattttcttatatcaggtaaacggttttatgctcatagaatatgtctgcttgcttcttcggacacatttcgtgcaatgtttgatggtggttatagggtgagtctttaactaaactctgttttttgctacgctaatggccctgcaaagatttgtttttgctgaaacacatgttttgcaggagagggatgctaatgatatagatattccaaacatcaaatgggatgtttttgagttgatgatgaggtacagtttgctatcatcagtttgaccgattacaagtttttaaaaaatcacccagtttgattcctgatcacgtgtacatattctggttgtgcgtctcagattcatatacacaggttctgtacatgtcgatttagatattgctcaggatgtactcagagccgcggatcagtatcttttggatggtctgaagcgtctgtgtgaatataccattgctcaggtggggctttaataagaattttcttttgaattaacatcacttttattagacctttactggcggcttttgttttttagtttcttaagaatgtttcactgactttcttgtttcgttcctaaaaggatatatctgtagataatgtttcgctcatgtacgacctatcagaggccttcaacgcttcatcattaaaacaagcttgcattcttttcatcttggctcagtatgacaaattgagcatcaaaccatggtatgtatggcagagcctgtgcttgtacatataaaataagtgttcttgagtttacctccaataatgagttgtttaaaatgaaataattgtaggtacgctcgtttgattcaactcatcgtaccagagatgcggagttccttcaccaaagcacttacaaagcctgcccaaactgatgtatggcaggactagatgaaggccaatcagaaattttgattttcatgtgacggagggcgaaatgtacataaaagattagattgtacacagattagatatgaaaactattttcatcaatgctctacttgatccagttaagtgaacccccatctcttctttgtgttcgcctagttgggaagataggtgagatgtgattttctgtattgacttttgatcactgattgatgaaaagaagctgaaatgtcaagagtagttttatggaacaagaaaatattttaggtgtttactgattagtttaaatctttcactttcttctttatatctgtagatatagttcaattagtttataataagttatcattgcaacaattttttgttcatacaccattttcgtgttcataaacaagtcaagagaaacatcaatagaagggaaaggaaattgcgaaatcatgcaggaaacaatataattaactagtatatgtgcagcacacattttgtaccaagaatacattatatgaagtaagcctttgtaatctagtgggactaattttaaatcaatgtgattgggatccttttttcattcttgtgatttgagataaacaactttttatcttaaaaattgatgggaaatctacaaatcaatcagttaatatattaaatgaaataattgatttcagctaagttgcaatatattcatccttgcatcttttcattgttacaattgctgactcgactagagatcttttagctttcagagcaacatttcagtactctcacaacttcaacccgaattttaattaaaataatgaaaaaaatggagcataaattgcttcaactgcgttagcataggtacgaatgcactgaccaaaatacaagtttacaaaataaaaaacaagatacatatgggacaccgtaagcaaatatctttcttttcttcattaaattccaaaacgtggcacaaattgaaacaagcgaacttaaaatctattttgtgatacatttaaatgccttgagcactttcttcttaattatctagcaattgtgggagcacaagtagaatcatctttgttcgaccaaccctctttaattccacaggctttgaaaggccttaacctttcaatttcaatctgtaattcttccacagcttctttctctaactgtgaacaatatttcccaaatgtctctatacttacttgaagcctgaaatcaatagtgaacaaaaacctcatttccaatctgtttaattcagatgtgcttactcctcccactttagcatagtaagcgttgttaaagaatctgcaagaaaccaagaaccatgtcaaaaatattaacaaaatatatacatatatattatgttgacgaaacttcaagagtattgggaaccaaacggaattcaagatttagtagttaaaaattttcattatgtaacttacgcatcatccataaacttcgctgccagcattacactagttattagcagcctgtgaacgttgagagatgttaagtga

SEQ ID NO: 16711 - DNA, 5844 bp, Cannabis sativa
aatcatgaccattcattaactaatagttatcactactataaaattcactatttacgtctgttttaagtgtcacttaaagaatttacgtcagtttataaaatcgacgtatataccgtagtcgcaaatagttttttattagcgtcattttcaaaacaacgcaaaaaaatttttttatgataattaataacgtatggtacatagtgtgtgatcctatataactattcatttgaattactgaacaatcaataatcatgaccattcattaactaattaatagttataggaataggatcagtatcactatatcgatagacactgaagtgagaaacatataagataattaaattaattaaattaccaatagacaagcaatagatctggtttggaaggaattgggtacatacgggaccatgcatataatagaggatatagaagagtgagatatgattggctgaaacagattagggactgtggcagtatattatatgtagccaaaatctctttactaaccttatctctctctttttaatcaatttctatatatataggccgtacgtgatacacgacacgacaggtcatgatcattttcatttttagtcaccatttcttttttccttttttgtgatagagacaaagaggagtaaatgaattatttggcatttcatgaaccacagccaaatcgatccccagccatatacattttaaaattatttttgaatgcattgctcaattgtgctaactcatcttttttcctttgatatatacgcactctatatatataatgtacatacatctacatatatactatatagctacttataataataatatcaataatgtctatttttgttcttttactactcttttttctttcactccaatggttttttatttctggctcccccaccacacatgatcagattcccaaggtacattctgaaatatatgatacattatatattatgattttaatttcaactctttccaaatctaaagtatatgtttctaaatataaaaggcctttattccccttattaaattttaaaaattaatttcttaaaatctataaacataaatgatcattataaatgtacttccagtgaaataaatacagcaacttattatcacaagtgagagtgtaactatctgtgttgtaactaattaatcgtaactgaaagcctaattattacaagacagtactgtaataacaactcgttagctgacaattaatattctctaacactatctaacactacttctattatttctcgatcttattatacattatgtaatgatatttaaccttctatatattaatttaaagaatatgtgtttatatatatatgttcatctcatgtacatgtcttgtaagtatagaaattgatattatatatacgtggagaagactacagctatatataacacatatatatatatattataataattaaacagcattatgtgatatatatgggagcaccaaaaacattatcaccaaatgtaagcaaagaagatgctaaagttgctgatgaattagctcatttgcagttactctcctccatcatcccaaggtacgttaatcattaattattatatatttacattaattcatatttaaatgttgtacaccatataaacttaaatttaaacatacattatgtaaaatatacacatatttatgcatatatactaaaatatttttggcagggaagagaaggaaagaatatctctaatccaccaataccaccatgcgattagaggattctctgctatgcttaccgataatgaagcttccattttatcaagtagtatttgtctctcttaattaattttaacaaaaatggttttgttagtactttagtttttatttaataatattaatttatatatatgccggttttgaaaatacaaaatagcaattcgatcattatatttttttaattttttttcatgatgatattgataaaacttataaaaacaaaattgaaaatgggagaacaggtcatagtgaagtggtatcggtcattgaggatgaaatggttcaaccacaaacaacacgttcatgggattttttagaagcaggaatggagtcaaaatggggtttggaaaagactgtcaccagtaacatgattattggggtaatagactcaggtacgtaagtatgtcaacatatacatcttgtcaaattatattactaactgcttacaatacagacggtacattgatagagtgttgagcacttcaaaatgcctaataataatgttaaaaaaattgtgtatactatttatatcattaaaaatagtaatatattatatggctgaaccaaccaaaatgatatataatttaattataattattgaaattgatatatatatatatatttatatatatatatgatcattagggatttggccggaggctgaaagttttagtgacaaaggaattgggccaataccttcaaaatggaagggaggttgtatgacggcatcagatttcacctcctccaactgtaacaggtagctcataacaaattatatatagcacatttttcaatttatatatacatttatacaaagaaactatatcattagctaatagtaataattatttaatgattgttgtaggaaattgataggtgcaaaatactaccttcctccatcggcaaacaaggaaaggtcaccaagggattcaactgggcatggaacacacgtggcctccattgcagctggttcagtagttcctaaagcttcagaaatgggtttaggcagtgggagtgcgagaggtggtgcaccatcagcaaggattgccagctataaggtgtgtcatggtggtggttgttcaaatgcagatgcattaaaagccattgatgatgcaatcaatgatggagttgacataatctctatctcaactgcctacaattctaaactcgccaacacctacttgaaagatcaaactgccatcggtgcttttcatgctgagcaaaatggtgtcttggtcgttctttccgccggtaacatcggccccgatccgtacacagttagccacactgcaccctggatgtttagtgtcggagcttcctccattgatagagatttcaggtctataattcatcttggaaatgggaaaactctcaatgtgagtccttataatttattgttttttttttctttttatgttaagggttgacatactgttatttgatgcgtatatcattttttttttctttctctttattaggcaattggcattaatcattcacaactttcacgatcagttatatatccagttgtaattggaaaggaggtagctattaatccttcggttgtatcaacagcagagtaagtgtgattttactcatgagttattatttctaaaatattactgcatgaaatggttgtacatcttaataatagccaaaatgtatatgataaaaaacactcatataggcaacctagctatagtttaaaatatagagattgtaaagaaatttataacaaatgtgcagaaagtgctacagaggatctttagacataaagaaagtggctggaagtattgtggtttgtcttgatggtggggatgctacacgtttagactttgagcctttaagagcaagcaaaggaataataatgtatacggaaaaaactgtacccatttctacacaaactttcccatgggtactactaaacaatattgcagagtatgacattcttataaactacatccactctaccgcgtaagtcattttttactttatacaaacttgttggaatttgaaacactatctagctaggaagtagcattcaagtttgtgtatattgtaataaacattcaggaatccaaaagcaacaatttatccaacagaagaagttccaaaattgtataaacctgcaccagtggtggctaacttttcagcgagaggtcctggacaatttacagaaaacattctaaaggtcactttctcactctctctcactctctctttgatctatgtgtatgtcctaatataataatgatgtgagtttaatataatgaaaaaaacacagcccgatataatggctcctggagtggcaattttagctgctgctatgaacacatcaacgttcaagtttgattctggaacctctatggcttgtccacatgtatctggagctgctgctttcatcaagtctgttcaccctacatggactccttctatgatcaaatcagcacttatgacaaccggtatatacacatacctatatatatttaactaaaagtattgcaattcggcagaactaatatttgtaaattaacataatttgtacactatgatctaaacttttgttttttatcttgcacaaaccagcaagtgcgtacgacaacacagggaaaccattaaaaaatgaacgaaacctaatggcaactcctcacgagattggatctggagaattaaaccatatgaaagctctagacccagggcttgtctttgaaacaaccacacaagacaatttcaatttcctctgttactacggttatacagaggacaacataaaatccgtaattaaggacgcaaacttgcaatgccccaaaaactcaaaaccagaactcatcacagatattaattacccatccatctctattggaaatctaaaacgacagcaatcaactcctacagtcgtcaaaaggactgtgaccaatgtgggaccctccacctcaacatacactgctcgagttaattcaccgaaaggcttagttgtaaaggttaatcctgataagattgtgttcagcaacaatttgaacaaggcttcctttcaggtgtcgtttgatggcaaaggggctgctgttggatataattttggagatattacttggtccgatggtcttaatcattctgtgcgtgttgtgtatgctgtcaaagtagtataattttacttgttgaaggaataaaataagtaaaattatatcatatatatatatatatgaataatagtaatatatcttaatcttatgtaataataaattaatgtaaacaatttatgcatgtcatgtcaggtatcatgcatgcatatatgttttcatttattatttggcaaaggtgtgtttgttcacacagagtggttatggaatacttctctatttgaattttgtagaatgtctacaaagtttgattttattatagtgtaataatataatattgaataaataaagagtttttttttcttttattatctccttttttttgcattattattatcctgttgtagcaatacttaaaggctataaacatcaacatgtatcctgttttcttcttcttctttttttttttttccttttttttttgttaattaaataatatcgtttaacaaaacgtctctaaaactaaagcaaatagaaagttcagaaaaacagcgatcagcgggaaaataaggaagttctagctagatatagtgagctatcctattagtagaatgtttaaccaaaactaagaaacaagtccttaactcgagtaattaacaacacttgacactcctcaacaatacaaccaaaataaggtagtctgtctctattgtagtatgctgccgggaattcattttgatccaactcaaggcttctttcacactaatgtggcttcgactagctcaggttgaagttagttaggtttggttaagcttaggctgctgttagtggttagttttcagtaagttggtgttgctctttcggttatgagttagttagtctcatttgttagctaagagcttggctctataaagcagattgtaaccaactgtattcattcaatggaatcaacacattcattcttttttctctataggtgtcgtttgttaacacttttttaatcagttt

SEQ ID NO: 16712 - DNA, 3980 bp, Cannabis sativa
  modified_base (2902)..(2910): a, c, t, g, unknown or other
  modified_base (2960)..(2966): a, c, t, g, unknown or other
  modified_base (3047)..(3051): a, c, t, g, unknown or other
tatatcaagaaacaaaaagttaaatataattatatatataaactgtatttattaaaaaaaaaagtgggaggggtagtaaaattagggaaacctctttacgcatcagagccttggggattattctgagaatatatgaagagattaaaaaattatatcaactcaatatatttatatataaatatatgtcataataacaatagttatatattaatataattagtacgtacccaagtacgtgtccaccactgcgatggacttcttgagatacaatgcccattagtccaatacttccccctccataaacgaggtctatcttttttgaaaccttttaattaaatttaaattaacaaagaaaaaacaatcaactatacataattaacccacttttgcatgacgcatgacaacaaagatatatatatttatatatataccagctcttggccaagctcaagggcagcatcacggtagcaatctcttttaccagaactacttccacagaaaacacaaacccttttgaactttgactcttctattatggatttgtgatcttccagttgatccatgtattttattttattaattatacataaatataatagctagttttgaaggcaagtaatataaataggaaaatcatgaatgaaagcatataaatagagaaaaaggatcaatgataataaggaaatcgtgttgtgccacgtgggaacatttcccattgtcaaattcgccgacatgattctgttatctccaccaatcctcatttttctattcttatccacttctagttttctaaatatttcaactatatattttcctaattaaatcttgatattttcagggttaacttaatactattttataaaatgatgaattggattctgtattttatgatataatgaatttgaattgaatcttttattttttaaaatagtacacaatagtactatgcgtttaagttttgataattttcttttaatataactattagtttgaagacaatttttagcatgaatatatatacagaatataaatataattttatcgagttattattaatttttattttaataaaaaaattagtttaattaagggtattattttgtaccattttagaaaatataaaatctaattgttttatttaacaaatcaaagagttcaatgacaatttttgaaacacacatgatttaaaatgttatttactttatttttagttagtttagactgtctcatttgaaaagagggagaaagtaatcattcatttacaagaatatatgaatcacgatgatattagatttttatttaggtttacattaatttttattggttttattaaaatttgggttgattgaatagttattagtaaagtaaagtgagtagacaatgtaattttctcattgttgtgttagccatattgttagtgatcaatagttaatgagctaaacatctgtgggtataaagtttagttgaaatataagtgtgaatttttttagttagcctttgatgagcagactcagttcaattaagattatgtaactaagtccctccctaactttataaatacatattatttcatgatcacaattgtatacttttgataatcaaataaataaaattgcttttgatttagagacttagggagaaaattttagttgataatattacactattaaattgtgataattgctataaattaatcaaatatacatatctaattattatatattattattgtgttttatattataaacgaattaatgttagttttattattaactaacagatgagtaataatattgatatatttatatatatatatatatgtatgcacttaaattacatgtattaaaattttatacactgatatatttgttaaataatgagattattgtgtgtaatagttaaacgttgtgattctcaattagtatagttaaattatatgagaacaacttacggataattttaaaagacattttgtgcttagaaaatctcactaattaattcaagtgtatacactacaggttatttattcctcgagtatacgcaagttagacctacataatttaggaccctcaatcaaagaaatccgaaaataaaaaaagaattgttattaacttctttttctatattagatctccaattgtaaattatggacttttttcagttataataaaaaataataataattttacaaaaaaattgtgagttggataaataaataattatacaatccaataaaaaaaattatacaaatacttcttacacacacttttaacccacatgattcacacttcttgggattgaaaccttcgtgtgatgcaataaggttagcaacgatgaaaaaactccagtaaagaaggaagcaccattaattctggcaacatcgcttgagaagaagaacaaacttaaatcgaaaagcaaccatatacaatcgacagagaaaaaatctacagaaaaactggtatgaaatataaatccaaccctaatttataataattcagattccataaaactaataatcttaaatttaatttacagatttataaaatatagatgtgtaagaaataaatctcaaattctcgatcaatccaaaaatcaggtataatgactaaatatatatcactacagtaggtaatattatgactgataccttaacctttttttttcttgaaatatttcaatactgaatttattcaattccgatcatattcattatttatctcacgttgcaaatctaaaacattatttttttatataggctaattaagatttttttctccagaactttgacatataccgaatcatgcctcctgaacttttttggccgttaaaaattctctctgaactattaagattgttagatttaaaaacttttgtctgattttagtaaaaaaattctaacatnnnnnnnnnttcagggggcatgatttagtagatatcaaagtttgaggggtatgatttgnnnnnnntcaaagtctggggagcatggtttactacataaacaatcactgaaacagtaaaattgattaaaattagacaaaagtccttannnnnaacaatctcaataatttaaggagaatttttaatggccaaaaaaattcaggtggcatgatttggtacatgtcaaagttcgcgggaaaaaaaatcctaattagtcttttatatatatgtagttgcattatagttggtcgtctgtaattaacgctccaataatagacgtatcaataattacgaatagatacaataatgttaattttatttgtaaatatttcatatcgataattaaaaaaatattttctaaaaaaacatttatggtatggtcagtatggtcagtataaataaataaagttgattatatatgaaagccaatttgcttatcataaataaataaaaatattatttataaactaaaagttttatgaacacaaaaaccgcctaaaacttaactcattaaaaataaacaaaattgtttatgaacataaaaatatctaaaccataaataattaattataaataaaaaaacacatgataaatcgttgtagattaattaataaacaaaatgtttattatatgcaagcccgtacaaaaacacaaaatattgtaaataaataaatcaatgtattcataaaagtccaatacaactgaaaaacatacaaataaaactcaaacaaaaaacaaatactatattaattctacaatattaatgttaaaatccaaggcaatagaattaagaaatgacacatgacattatatatcattaatctagcttaatattttgttaaggtaatagccataataaactcatttcaaaagctacaagaagagaaagtcgcccataaaaatctttataattatccttcaagtgtaataaggagagacttgtccccccccctaatgtgtcactcctaatattttacccttaatacttctttttataggagcaacaaaacaaaagaaattaccccaaagtcaccctaaaagta

SEQ ID NO: 16713 - DNA, 8108 bp, Cannabis sativa
tatatatatatataaattaatatgtaaaataaatacttgcatagacatcaaattttactagcctttttcagcaccccatctcgaacacgatcaagaattgcggggacagctgtcattagagtgggcgaaagcatagttgtatcaccttttgttcctttcttaatcttgcttgatgtatcagtaagtgtcaaaggggatccatatcctatggaacttcccacagcagcaatgacattctttaaaaaaaaacagaaaataatttaaaactaatagagagaaaacaatcaagtaataagtattatcttaagacacaaaattcgcacaatactactacagttattagctacaacaatttaacctgccacggcaatcttcatacctctgcagccagttcaagaatatgagccagaggcaaatatgccatatagacatcattgcttccaaggccaggaacaattgtcatgacagctgaaactgtagcaaggacattagcatgtgtcatcataacaccctgtacaaaatgaaaaaactgagtaagacttgttacttggatagaataaaccactgttttggccaaacatgtccattgtgaccaacaaagtccataaaagaagttgcagaagacgcagataaataaattaggcacacgcgcatatgtgtagacattcataaatataaatatgttgttatctattggacaaatataaaataaaacaatatataaggaggtgccatgttatttagaaaattacacacaagtagatgtaaattttagtaattggcataaaaaaatttgacaaaaatgaatttagatgtacatattgagattatgaacacatctaaacatattcagagaatttgacaattttgagacaatttggacaaccaaaataaaaaggatctaaattcagatggacctgcgttacaattacatcgcctattccagatgacactttgcaagtccaatgagacaacgttgccatacaagtggcaacgtgttgcacctaataggcgacacgttgcctaggtcacgtcaccattttcttgaaattttagcttcaaaagttgcattttttaaattgcaaccctgtgaaagttgtctaagtcgatgctaacactacttaaagggtcttagatggttaaaagggattgatcatagtttctctctctcactccaaaaattgcttgcttgaagatttaaaggctaattgtatcccaatttcattccttctttggataatccttaagcaatcatcctaatgggttagagtaaataatttggtagagagtgttattcattctgtcacttactctactgttgatttctaacccagtcctatgaaattattaggcatggaagttgtgcctataaaaatactttcattaaggtgattttgatgccaatattatattgcactatagtcttgcttgaaatgaaaatggaactaaaaatttcacgccaaagaaatgtttagagaaaaatgataactcaatctcaataacatgcattggtccaaggtctttttttctggagaataattttgcaaactacctatatcttagatgctccataccttaggtaatccagtactcccacttgtatacataataactgctacatcagcaggaagaggtaagtcagcatcaatggggttttctcggccaagtctctccacatcagcaaacaatgttatattccaggcactgctctgctcaacagacgaagcaacagaagggatttcatcatccatacagataatgcgcttgactgtgtcaagttgtccgctaatttccacaagtttcaccagctctttcttcccacagattacagttgtaacctctgtctggagggaaatgataaaagtaaacaagaataagaaccatgtgtgcagagttaaagtaaaaactggcgagttacgagcatataaacaataagaataagtacagccaccagccacacctgttaggctggtacctggttgcctaatctaattgatcagcatgtgaatgtgattaacaaccttatgctattttttccttgatagatattttcattttcatacatgggctcagtaactatacagaagatgtaaagtagtaactaaacacaaagatagttgatgttaaaagtcaacaaacattttaccagatactaaaaaatcacttgatgttagaagtcaacaaacattttacaagatactaaaatatcaaggaaacagaaaaaatgagatgaaaaactttcttttaataattttgttgaagaatattaccaagcatttttacagtatgcaggaattaaagactcttctacagctttctcataaaaacacgtgaccattctcagatatcggttagataattgccctaatacagattaatatcatattgtttctttcttttatggctttctgattaatcattacaactgacgtgagaaagtacttataataaggtgagataaaccagtagctaaagttacattcaccacacacaacacatacataaattttttgtaagctactaagtaaactttgaagatctgcttcaatgtaaaacacaaacaaagaaatgcaccaagtgtaacagacacaaactcatgttgcaaactgatactggattataatgtttacattacatgctgaaaaatacaattactagcaacattgtattcctaaaatttaatttgatagcccgtgcaagtagaagaagttacggcacttgacatgaaaagccaaaatgtggaagctagcatagttactatacggaatgttcataactttgaaagccctattcagaattgaaaactttgatatttctcatttgatctgttttcaaattatagatttcttatcttaaccttgcttaaaaatagtaaaataaaacaatatgttataatctctcatatattgttcatatttcaaaatatatattttcattatgtaatgttttatcatgaaattctaatcatttgactataatatatactgtttctttttcttaagcttattgtcacatgaaattatataattatataattaaatttttttgacatgctcagatgatgaaaatttcaaatctttgactagttcttttaaaacagactagtctatctaagtagtaactaaaaaacatttcttttgttacttttcttctacatttcaaagtaaaagtaaattctatgtcaagaggcatcatattagctagaaaagatttctgccttcaaaagacatgaggatttcaaggaatgcagatagaagagaaataaaatgtgaacatttttagcagatgtccttgggagaatgttggaaaaagcagtagaatcagaaaacttttcttgttttacggtgggaaaagaaaaaatacaagttagtcatctccaatttgctggtgacaccctgatatttgccaacaatgagaaatcattgctaaaaatggtgaggatagtggaggccttttgtgctatttctgactgaaagtaaatatgagtaaaagtcaattgttggggatttgtatgaatgaggaatcggtgtcacaatatgcatccatgatttggtgtgaggttggaagctggccaatgaaatattttgggatgcctttgggggactcgccaaggaaattgagtttttgggaaccaatattggataagtgtgctaaggctagatggttggaaaagtgctttcctttctaaaggaggaagcctaacgcttattcagtctgtcatatcttcccttccgacatattttttatcattattcaaagcaccaaaggttgtgatcaaaacattagaaaagatgatgagggattttttttgggaaggaagtgagtcatggggtggtgagcacttagtctcttgggatgaagtttgtaggtgtcgagaagagggggggttgggaattggaagtttgtaggtgtcgggaagaggggaggttgggaattggaagtttggaagcacggaacaaagggttgctcatgaaatggttgtggagatatcctttgtagccaaaagcattgtggcacaaggtagtggcaagtcgttatggtaaagtcgataatttttgggatacgaaaattaactcccgtttgtctcccaaaagtccgtggcgagatatctcaaatttgtacgaggagtatctgggttacaattcaaagttggtaggggtgacaagattcgattttgggaggacatatggttaggcgattcttcattaagtagtgaattccccgacttagcattaatatctaagttaagggaaacataaaggatcacatagtcgacgaaggtttaccaggggttgggtagaaagttgggacctgaattttagaaggaatctgttagatagagaagttccaaatatcacaatgctgatgcaaaaattggaacatgtaagagtgcttaatactgtcgaagataggcaaatttggaagcctgatacctcagggattttctcttgtaagtcagctctccgctggtttatttcggatccactcaatggtgaactgttttggacaaaaacactttggaaaagttgtgttccgcccaaagttaaattgtttggatggcttgtgtcacttggtaaagtaaatgttcatgaaaagttgcaaaaaaggaagccttttctttacatctctccgggctggtgcgtttgttgcaaagtcagcagcgagggagtgcaacatctatttctggaatacctgtttgttaggcaactttggtctaacatgctgaaagaatttgagttaagctaggtcatgctgagctctgtaacacaactaattgttagtaaaccgagtagcagtaaacaaagatcaaaattgtggagaacattagtactggcaattatttgggctgtttggctggaacgaaacgctagaatttttgaaggagtcgaaagttcggcatcaaatatatgggaaaaggtgaagttttggacaaccacttggactttcaaaaccaaaaattttgagaatctgtccttattagacctatgtagagattggaatgcttttttgaaggaattctgttctggtttagtttatgttgtctgctgcaatttatactgtctagttttgtatgcagatttagttttgtttttacctttgtaaccacggttttcctccgccacaagagagggttttatccatttcgggggtggggctaatctaagacaaaggcctcgttctccttttcaaaaaaaaaaaatgaaataaaatgtgaaccaagtagtactcctactccaagggagaaatatagaacctcatttagtgagtgacaaagagcttcctcccccaaagatgcatatatggtgacgacagtgacattacgcctaaagcaaccctgacaaaagaaaaccacgttagccataacccttataaaaatttaaaagaaaccagatacatgaatgctgccacctaaaagttacatacttcagcttacatgaaaatcatcacttacatgattacctatgattttataaatactgccacataaaatttctttaggaagtagcatagagtgtaggtgaaaattcaaacacatcatatgttaagcagaaaacattatttcaaaagaattttttttttttatcaaaaacatatcaaatgcagtcaacaaagcagaaaactaatatccatgaaacaagatgacatagcacctgcaacgctataagccactcctctcttgtgtctgcaaagattgctactcgttcttccttgttatgcccaagtcgagctaaaccagaagcaaaattgcacacagcttcaaatgttctcccgtatgtcatccattcatactcccccaaatgaagcttttcaaaggatcttccatcatctgcaacctcaacttccctcgaaatcaacttccgggttccaaggaagcacttctcctggtacttcttgcatgattgctcaaaaagttcagtaagagttgtgatgccttcccatgctgtctgtacagtataagtgaagcgacggtttcgaattgcataaccaggttcaacaccaacatcaacaggcaaacctcgtttcttctctgtcttggaattgcgaagaataagagagacaacaagaggaacaacaacaccaacaatgtagggattcatcctttcaggactgtatgtacccgtttgaaccctgcaaagtagaatttcacgtctgttattcaggtaatgtcaaactaaattctattctaccaaaagttgcaccacatttatctccaaattatatagcatctctgaacaaaattgtttggaaaaaaaatgggtacgctcttcgtgtgagaaaatctctagcatctaattcattcaaaggtgagtattttaaaaatgaaaacaaacaaacccagttagtgtagtaattatttctgcaagacccactttctaaaacgttcataagagacggtaaaggtgagttggagatgcatatagtaaccaagacaatatttattctaccattgagtttaagttgaaacttattcgagtacctaagagctcagaatcatgaaatggtagctgaaattaaattttacttatatgcacacaaatcaatgtaaagaagaaaaaaatgagcgagaatgcagattcaaaatgtgttatatatcaaagttgtaaaaaaaaaattgcaatcaacaatggaagttcatcatttagagcacaatgtcatgcccgcatttggtaggaaaagaaaatggaacaagaaagagggaggtttgagcgtaccttgaagttgaaaaggaaagacaatgaatcaggagatgaacatttgtggaagaagaagaagaagagtgagagataaggagcggagagaacgaggagaaatgaggttggagtctcagtagtattaacttggaacctggaaggaaattgaggcggctgtgctttctatatcattattattttttattttcatttttaattaaatgcacttgttttttaaaggaaaaaaaaccaatacaaagggtaatcggcgcttttcttttcaaaacatggtgcatattttcttgcaataaaggcaatttttcatatctttatatacctaaaacaaaatttacaaaattaaattactaaaaaaaaaagttacaaaattttacatgcttttaagaattccttcacttctttcaacctttttatatcttcttataaaatattatttatagatgtccaaaccaccaaattaattattaatattaatgctttattgtattttctttttattatattgatttaatttctcattcttttagttatacttagaataaacaactgagaaattctcattcagtttttctttctcttttcttcttcttttcttcttatttattttatattattctatattattttataacacgttatcaatatctaagtttcaaggtaaatattttgttgaagttcttgagttgttttaaggtcacgatacactgaaacaatttcaataactttttttttatttatctatatattatatatgcatgtatatatttttatatgtttatttttgaattaatatacatgtacatattgtatctcttattgtttatctatgatatgatagtgaaaatttatataaactatacatatatccagaagattatgtatcatcgataaaatattacatatatcttgaaaattatgcgtactcaataaaatcttgcatatatcatgaaaattatgtaaatataatattcatcatataactcactgaaatataatctataattataccacaaacaattatatacgacatctttaatgtggtgtgggtgtcatgattaacaaccctaatagctagaaattcttagttgaaaaatattttatttccatattttttgaaaaaataaaatattttcacgtacgtaaagtgggtaaattttacccacaagaagttggatcgaaaaaataaaatactttcacttacgtaaagtgtgaataataattataacttgggaaatttacggtaaaattctccaaaaaatttactttgatacaaattagtccctaatctcgagaaatatggacaatagtccctaatgtcaagtttcttgtaagtcatcattttcttttcttcgtcttcatcttcctcttcttcatctccaccccagcctcttcctcacc

SEQ ID NO: 16714 - DNA, 8832 bp, Cannabis sativa
aatactttttatcccactggcatacatcccggttttcattttagcgaaaactgggataaaaagccttaaaaaccgggataaaaggccgtttcttgtagtagtggatttaggcaatttttttgaatgtttgtgtctttcaaactatccttttgtagtttttatccttgtttatccctttgagctttgacttgttgtttaattgtctacctttatctctaactatactataactataagtggatcattagtttgggaagattgtaatgagggaaagtatgttttgttttatgaaagttaaagatattgttgagagacattcaatacagaaattatttgcaataacttgaaaaatagagaaaagaaaaaaaatagcaatgttgtgtcatagaaaaaaaaaagtgttgcaaaattatcaaagaaaaggttctctcatgtatttatgaaaaaatgggatattgagatcatttatgaaaattgtaaggtgattatggtataggtgagtctagataaaattttccatctaacccaattaagtccttttgattttaaagcacatgttgttgacagtagtggataaaactaagtattgcaagcttattagtaatcggtttgtggatatgttggattgattttgagcatgtatattaatttcttatggtttagatatttgcgagttatatttttcttttcaagtttgagtgctaattaagttagtattgggagcaattagattagaaacctggttttataacagttgaatcttatgagtagcggtagtgtggtagtaagccttgctttgtgttcgtttatctttattaattttagtgtcgatatttactcgaggtcgagtaaatgttaagtttggaagagttttgtaggcttgttttaggagcatatattttataaaatactttaaaggggtatttcaattggttattatatttattttgtacaaggacctacctaatttgtactctaaccttttattaaactcatatgtactttgcatgttacctcctacgtgatggttgcttcttatctagcttttaataaagatatattgttaagctcttctatatatatatatatatatataaatatatactaaggtgatgtttaattggaaagaataaaaacataagaataaaaataagtataggatggaaatagaatggaattaaaatgcatagaaataattgataaaaaaaattattaaattttttctcatgttcttgtatgtaatggttttttctttcattttaaaataaaatagtcattctattaaaatagtaaaaaaatactttaaaatgtaatgaaacaaaagaattacatgaaaattaatttattttcatttcattattctaacccaacaccacttaagtgttggtggataaaaaaaacaccacttaagtgttggtgagattgtgaattcttttcttggggagagtagactttagcaagaactattgaaaagttagacaacaaaatactcaaacttattattcattatcatcacaaatgtccaatccaactttggtcatacaaatgataaccttaattattacataattatgaaaaaaaaaaataattgtaagtatcttaaaataaaaattaagtacaaaaactgtaaatgtgatcaattgtttaaatttaggaccaaacttatctctatagtgttaatgatgatattgttgagcgcattgaacatgatgtttcctcaaccttctcaataggcaaatcctcttgtagatatagggatggcttgggaggcatttgtatacaatcaatttctccttcaagcatttctatgactttattcattgtaggtcgatcactcggttttaattgtatacaccataatgctactataatcatcttctttgtaattattgaatttgtctcatctatatctgttatctccacttttatattttttccttcacttaattgatcatgcacccatgaagcaaagtaaacttggctattacttcctgcaattgatttatagttttttcttctactagccatttccatcaataacattccaaaactgtacacatcagctttattagaaactcttccaatatttttgtaaaatagctctggagctatgtatcctaatgttcctcttgctgcagttaaagacgcaatattattatccaacggacataatcttgctaatccaaaatcagaaactttggggataaaatttgcatccaaaagaatattgtgaggtttgatatcaaagtgtaaaatttgcatgtagcatccttgatgcatatattcaattccacgtgcaacaccaagtgaaatttcaaaaatttgcttgcaacttaaggatgtaattccttcttgagagaaaatatatttttccaaagatccattgggcatgaaatcatatacaatagcatggtgtgaggaatggacacaaaatccaaccaaatgaactacattaacatggtgaattcttccaattgtagcgatttcattaatgaagtcttgaccatttcctttggatttactcagtatcttaatggctacaatacgaccactacgcaactttccctggaaaacagaaccatagcctccttgacctaatttaattttgaaattttgggtcatcttttttatctctttaaaagagtatcttataggagtgaaattattctgattttctagaaactcttcaatagtatcatataatgataaatgacgtattcgccatttatagattaaaaaggcgacaacaaatggggttcccaatataaatttcaatccagaaagtattactgcattgtaccaaaataaaaatttagctttagtgcacaatcattcttcaagttaaattcaagtaaaattctattgaaaatcatacgcgcaaaaataattatgttattatagttgaaaataaatctacggcaaatcaacttagcaacaaaaagaatttttttccctagtactgtttgagtaccttcaatagtagatcttttgctattgtccattaactcgataacaaataataggattgatttctttttttatataatttttattgaaagatttgaatgatagtcattgataggttgtcttggtcgcttttttaacagcttggttagcctattttagatgattttgctctatgagcattattttcatctactgaactatcttacacatctgggattcgatcttatgacccccacacactcagctctaatagcctttatgaccactttagctagcctaataattgtatcttatttttttttatctatttatttaataaaccatttgtgaataaatgtacagtatctaatccagttcaataggcccttaaacctgtattggttagatccaaggcttgcccaatgaagcattttctcaacacttttgactaaacccacatctgaaaaagagatggtcatgtatctctggttcaaggccacatatatatcaatttatggtattcaaaatgtcttgtttgtgacgcctatctccagttctcagtcaattcatgtcaccatgtacttgtggtttggtatacttttcattgcccaaatcttgtgtgcataccatattttcacttcaagctgcccaaacaacctgttgcagacttctttaactaagtacttgagtgattcaagttgactttttgtgtagatatctttaagcttgtattcccatcaattctcctttttcatatagacctacctatttcacccacatattgccctttctttgagctaggatacacacatgttttccaataacactaatattccattcttcaatgttttagaagcccaacccaactttttttttggcttacaaataaggttccatgctataagaccttgtttttgctagtcttctaaatcaatccaaagaaatgctctacatattttatcaatggacttaagcaatttctttggtaaaatcataacttgggcccaatatgagtgaattgccataagtacatagttcactaaaactgctcgacctgcatatgataaatgccttaaactccatactgtaattcttgctaccatcttctcaatcaaaatttcacattcagtggatagaatccttttagaacagatggaaactcctgaatacttgaaaggtagcttactttgaatgaacccagaagtatcaagaatctattgtacatttttctcagccattccatggaaataaatagcccttttttgtgttttcttggaggctagaggtaattgaaaaccttttaaaacatcttcgaagcaataaataaatggatttcacatcttcgtgacaaaacatcagtaagtcatcagcaaaacaaatgtaagttaatctcaaattttcacacctgtagttaaatctgaaattttctttgcaagtagctcttgctacagttcgggacaaattctccattcccaagacaactaagagaggagacatgaggtcccctagtcttagccctctttttgatgagaaatacccatgaagagttccatttaagaaggagaacttgagagtagaaatgcataactcaatcagcttgataaactgagcaagaaatctgagatctttcatcatctccattagaaatttccaatcgacaatatcatacgctttctttaaatccatcttgatcaaacaacaaagcttacaagtcttcctcgcataatgtttgaaaatatcttggcacaccattatgttatgtacaattgaatcttccatgaatgaagcccccttgatttttagaaatgaggtgtgttagtacttgtcttaatcgtgaggacaccgtctttatggctgttttgtaaagaacattgcatcaagctatgggtccaaaatcaaccactgaatctggacatttcactttcggcacaagggtcaaagttgtagaatttatctctcgcaatatttctccagagtgaagaaaggataatatttccaaagttacatccccacctattatatcccaagaaactttaaagaattttctattgaaactgtcagggcctgacactttcaagtcaggaatggaaaataatgccagattcacttcttctttagtatatagtttgaggagcatttgactttgcgcatcagtgactaaaggataatagataactttgttgagcttgcaaactaggtgaggagaatccttgtctacaaatccatgaggttacttcataaaaacctcttatgaagctctccattaaggaaagcattatttacatccagatatctaatgcaccaattatgagtgacagtaattgtgagtataatcgtaatggtttgaggcttcaccacaggactgaaagtgtcattataatcaaatccatatttctacaagattccttgagctaccagtctggctttatgtttatcaatgctaccatctaaattatatttttctttgaataaccacttacaaccaatatgagttcgacttttaggaaggggtacaaggactcaagtgttgtttcttactagagctaccatttcagaattcatagcattcagccatttgccattttgcattgctactttgtaagaggtaggtgttgaagtgtctaaaagaattatggccttagatatgccagatttggcacagttaccttattatgagcattgacatgtatggtaacagtgggcatagttggggaatttgaggaatatgaaggtgattcatcatggccaataggttggacattatcaacaattgttacggacattggagaagcagtaggtgcattgttaatcactggtgattgaacaggaagaagggagttaccattattagtagttgtcacagattgaggagtgttggatgatgaggatgtggatggttgagtattatgagtagggttattggtgagtggattaggatgggacacggtaggaatgacaaagatgatagtgtcataatgagaagtggaatcagtatttgctatctaagaaactaaatcatcaaagggaaatgagtgttcattaaagagcacatcccttgaaatatagattctcccagtaggagacaaatatttgtatcctttgtgttgaagactataacctaaaaatgtgcacttggttgatttaaactcaagtttgtttttattgtaaggtcttatatttgggtaacaagcatagccaaagacccttaattgactattattgggatccttgtgaaataatatttgcacaggtgtttgatttcctatgataggtgaggggtataggcagcagttttaaccccttcatcccaaaaagataagggtaaagatgcatgtgcaagaatagtgagggctgtttcaactaagtgcctatgtttttctcagcaactccattttgctgatgagttgtgggacaagatagtctatgctaaatgccataagacacgaagtatttttcaaatgattgatactctccccatagtcagattggacagctttgattgatgtttcaaattctttttccacctgggttttaaaattaataaaggtcttaagtgcttcaaacttagatgtgagtaaaaaaaacacaagtgtatctagaataggaatcaatgaagtgtatgtagtgactgaaaccatttgaagatagagtaggggaaggaccccaaaggtcagtgtcatctattcaagtggtttagtgtacacacttgtagacaaagaaaaaagaaatttatgtatttttcctttacagcaagcttcaaaaaaatcgtgagtagttttattattgcgaggtatattacaaattggcatatgtctcacagttttagccgcaggatgagctaatctgctataccaaagggaaaacatggaattgacattacaagaggaagcttgaatattattgaaagggggacttgtttggtgactgagtagcattggattgaacagactgcaattgagaggagggaatgacacaaagaccacgatcaagatggccttccatgacaacttctttcgaatgttgatccttaacaagacaatggttaggatagaattcaaagcaggcattattatcattcgagaattgagaaacattaatcaaaattttagtgatatttaggacatgaagcaaatgatcaagatgtaaagtttgtgaagtgaaaggtgtttggaaggttttcttattaacattttgaatagagagactagcaccatcttccatatggatcttctcataaccataatacggttctttttgagtgaagattgattcatcagcagtgtagtgattggttgcacctaaatcaggataccgagaggggtcactaacagtttcagaagtggctatatttattgtgagatgatccatgttagcagctccaatgcctggaaattccatattaaaatgctaataacagcgtgcagcaagatggtcaggttttgaccacaattgacaaattgggtgagaactagtgctatttaaagtagcaggcattgaaggattttgatttgtgcttctaccaacagcagaaggaggtggtgatgagaaagaaccaccacgaggagaaatggcatagggattccaaatagatcgaccatgcccaaaatcaggaggtatattgaggtaaattttggaatcggtaggagcagggtaagaaggcctactacgatggtttcgattcatggcaacattagaagagtcaagatcatgacgatgattgtcatacgatgttcttgagagagaagaagtgactcaatttcaccaactgtgtatggttgatttcttgagttcacaaagataacaaaggtgtcgtactcaattggtagacccttgaaaattgctacaatatattccttgacacgatgacctactgaattaagacgattcacaacaatcttgatacacaaaaagtagtcattgatggacaatgctcctttcttgatattccgcaattgattagtgaattgatcaattttagcagacgcttgatcgtggagaagtatacctaaagagtgttccatacttgagctgaggtttgacttataacgactcgagtaaggactccttctgtcgtcgaagagaggagccacgaatacaggagttgaccctattgttcacattgagtaaatagaggattaacaatatccaactgatgatcttaatcggagagaaactttgttggagggagctgatctgaaatatattcttgaagattatgaccacaaatggcataaatcacttgtggccgccagaggaggtagttgttgctgtcgagtttgacagaaagtttgtcagaaaagaacacgggatggaagattgcagctagagccgctagctctgcttatggatttacttgcaccatgaaaacaaaggaagaagacagagtggacgaaccacaaggaagaagaagatcaaagatagagagagagagagagagagagagagagagagaaggttactctgataccatgttagaaagaataacagattgagagaaaatgatcttcattaaaatgaggaaaagtgtttgagtacatgatatatacaattgagaaaataagtgaaagagctaactaacagtacagctgtcataacagaaagtaacaaccataactgaaaactataactaacttctaacagctaacattatctaacacagaggacacagaatcttggccatagtgttcaatccgcaatattttagatgtaaatccttgacttgaacccaaattgggatctcatcaattcatctttctgatatttccttgctgcggaccaagccttcattataattgttagaatttggggaataagatgaatgaagttccatctcaaaaccaattgacaatgggaggagtagctcatacctcttatatattctattat

SEQ ID NO: 16715 - DNA, 2934 bp, Cannabis sativa
tagcaagaggggctcttaagggtagagcattggaaaggatactccaccaatggaccttgtgtcgctccaaaatctttgagttccaaagtttgttccatagtgccggaacaatgttgcacaaaggagcacgatcaagggcttgaataagataggcagactttgttgaaaacaggccatttggttcttttgtccagacccatctatcccttccctggccactcggattaccgcctcttaagatgttactaaccgtttcctggtcaaaaaggtggtgtagctgggtgtgtcccaatttccgtcagtaaaagcaaatccgacactttcttcaagcccagctgttgacgataattgggcttaggataaaaatctgtaccatggataacccaagggtcatcccaaatacttgtctctttcccatcggatattatcttgcacgccccttttcttaaaatctccttagatcgcaccacatttctccaaaactaagaatcgaagctcttaacctcacagtcaaaaaactatttacccttaaggcaatcaccatgtcacaactcctttctttttttaatctatgttcacagataaatagttataatttttttattatgcataaaattatactttcaagatgaattaattaagtattggcacttggcagtggtacatacttttagatcaattttgtattttaggatatgttaagaaaaaaagttaagaaattaatttttcatgttagatataaaaaaggtttgttgaatcaattttatttttttcatacttccataccaaaatgagaaattgattttttttttttctatatttttcttacctctttcttttactaccaaaattcaacttccaaacatagcctgaaaaaaaatacaattatggtaaacctaatgtaaacaaattctctaacaaattataagtatagttatttgatcaacaaacccttatctcaaaaatcagaaatttttccaacccaatatgacatgtctctttatcctaatattgttctttgtaatgtaggatccttttccatttttaatgaactagaatttcaattgtctttctacatcattaatgggtggtcttgggaagattaggaagttcaaagacatcaatatagtaattttgtaattcaaaactttactagttattatattagtgtaagtagagaggtattttttgactttcaatataatttaatcccgtgataggattttaataattgaataaatattatatttggtgtaattttatcaacaacaaaaaaatacttttaataatttagcttaaatggtgggcatgtagggcaggatcaactcgggttaaaataagccaaacatatgccaagctatgtccacccaattccatggcaaaaaaaaaaaaaaaaatctttaaaaattacaatttttttttagaagtcttaaaatgctacatatccttagagcaaggacctaataattaaattactttcaaaatcggcccttgccctcgcccaatgcctccttagagcactcataataactcatgtatacaaagctaaaaatatagctaagagctaaaaaaagtgtcaaaataacttatacaatagatgagctattataactaaaaaatttaccttatgaatagtgtgtagctaaatgtagcaacaaaacttctaggttttaatacattgttattgttaacgcagattttcgttaattatatttgagcttaaattgtgatagatttgcacataaataaaaacagtaaagaaaaataagaacacaaaggtttttttacgtagttttgcagtcaaaattatgcatagtctacgagtcaatcttattagatttctgatacagttctaggaatttttctctaatgaatttcgtcccctttttttagtgtaacctgctcctatttataattacatacgagggaagttaattatagatttgactgatcttttacaacaataatctcctgaaatcgtgggattggattgcatcccacgtaaaataaaatgcggttaaaatttgaaaatcacacagctgtgattggtccgcttttactgggtcaatgtaaacgtgtattaaatacgttgtaacacattattctgggacgtctcgctggaaatatagcaacaataaccctggtagcgagctggaacttttcccatgtcttttcgagattgataatgtaaccctcaacgtttctgcgcttgaagacataacgctccatttgacaatcgcagttcttagtggcaaggtgaacttcagtagtcaacatcatttgaatgtcagcttctatctgaagaagctgactcgacggagttgtggatctcattgaaagatgactggagctaattagtaaaaataagacgagtgtgccttccaatagcgagatagatgcctcactattcgttatttggaattgctcgattgttatacttagtttgtataatgtgtattatacgctaagtgccttaacagtcatcatgcctcgcttatgtctcgccatgcatagcgaggttaatgcctcgtcttgcattactgatgtcacatggtttctcatcaatacgtgagttaatagttcgtacatccttgtctcgcttatgacttgatgttcagcgagttataaatatactctatcgattcagtatttaatgagttattccatttcaacatctacaaatataattaatattatatttgctggttcatattttccttagttgacatgtgtcctttcctgaagtgctagccaaattttaaatataatagttataatatttttattattttatagggtagttttgagtgtttaattaaaaaatacaggatcaaatatataatattttattatttatgtattataaataaaaaggatattggcggctaaactacctgaactttatggttcgtaatacttaaccacaaaaatcga

SEQ ID NO: 16716 - DNA, 3387 bp, Cannabis sativa
acaacaacccttaaggttaatagttattgagaatctataactaatcattaataatccataagtcattgaaaaaattctaataagtcatgttatttagtacccaatcctattctagcctggagtggatttcagctcaaagtaataactcacctcaaaaggttcgccaaccctgctcaacatacaaaacgaaaagcgttgataagtacttaatgctctttggtgtaatttgagttggacaaagcttgaaaaagttagctatgtccctaaaatatgggtgtagaggaagcactgtaccctgctccgcatggggatgaggccacactatccagttcgactgtggatggtgagctaggtggtctcaagtaggcctaatgcaccagacctgccaacaagtccattatcaatgatgttgtcaagcttggcactcaatagcgtagaaggagaagatacccacctatctccttcccccatttgaagaatccagggctcagcagtctcctccttaatatggtcaaccccaacctctgaaggttgacctctactttttataagatctccatcctttcaggagactagaggatttccctggaccatgccacacaccttagggtgtttcctagcagccctaggctcaacctgatttacatctagctcctccccttggctggccataggctcctctgcctgaccagcctcaggctactctgcctcctcaacctgacaaattctcactcttttcatgagctcggcaacatgggggtcggttagaggtgccttgcgataagtctactttttcagtgccagctttgaatactgctcagagtactgggcaacagtaacaacagtcgttgttgcaggaatatctctaagtgtaggagatgcctacccaacaggcgaggtatcaagaaaaccctggcagacaatgtaagtccacaatttaggcaagagctatctcaacccttgattcagttcccaaatgaatctcctgtagatctcaccccctattctctcaaaatagtggtgatgttgaactttgagttctagaaagtcattgctcgctttaaagtcactcaaacagctgcctgacaagctctcataagaagaaccagctgagcgatagtcttcatacaaaatgacggagcaagtccttgttgatctggttgtcacctccccaataattatgcaggttcatctgtgtagaaaaacaaagggaggtgaacaactcaagattacaaataaagacaaggatgaaaacatgggctaacagaccgatacctgtgggtactagccgaccagcccatgaggtctcagaccacatactggccagctcatagttttcccaccatggactgaccaacttcaagaaattcccccatgaacggactagcttcatggtcagcttgccatgaatcgaacagggtgaaattccgccctaaaagaatcagccaggattccttgaaaggaaccaagcaccgaccaatattctttgaaatggagcaagaactagctagggtcccaaatagacccaagtactggccagatccctaatcgaataaaaaaaatgtattttccaaagatttgaactatgttcttcgaaccccaaagattaagatatcaaaataaagctcaagattcagtcttttttatcaaggagttacccattatacatcctaaagatatctagtagattataatgcgtaaaaactatcctaaagcatgggattcaagaagttcataaaatcttgaaactcaataatgacagaagtttaaagaacgagaaagagagaaaaaggttcgaacttacccactgggaagacacaatgaggatcgagctagtccacgcaccaagtgtggatgtcagaaactcaaaaatctgcgaagaactcaagctcacaagaatttggctctaaggagtctttgagagaggttttgaagttcaaaagtgaaaagtgaataatgaagagaagaatgaggctattatagtttttggaaaattttccccaaaaaaaaacttaattgggagttaatgccacagaaataagcatgcatgggaaagagaaggccaagagttgcaatgtgggaaaatgtatagctgtcacacgacttcccacattgatcagcgtaaaaattaataactatcatgaagtcacgtaagtcgaagagtctaatatttggttgtgcatacctgcacggcaaaggaagttgcaatacaagatagaccaaaagtcccgttcggatagggacttgggggaaaatgttatcccaaattttatccacctgatgtggcttctccacgtggcaaaaagaaaaaagtatgtagaagacagctcaacactaacctgcaaggattaattcttttagacttagaaactatatgttgcacgacatatataggccaacaagagatcatgtacctgccaagaaggtcctggccggttaggagtgctagcttccatacattggccagccttcagcaaggctggctcgccaaaggtgcaagaacacactagcacttatgtttttctccaaagccctccaactcccccttaacaggcctacaactccggatcagttcaaactgcccacgaagataggactctccatcgacaaataataaatgtagtttttaggagatattctctttgtaattcaaatgtatgttgtaacctctttattttccagggacctctctatgtgcagctttgtaagccctaatactatataaatggcagtagtcatacgtgaaaggggatcacctcttgaccacgaccacctcttcttcacacttgctcataagctctaagtcctctcttttttcactcttctcacctacaaacttcattgtaatactaaagagagcctagccaagtgcttggtattatctcaatagtaaatacaattaaaaagggagtaggtcatttcttaattaaaagtggtcaaacttctataaaatttgtgtgtctctttacatttattgtctttccacacgtggcaactataagctacgatcctagttagactccgagtcggttgcctaaattcacagtcaacagttagtatagatttaagagaggaagaaaatttgaggtaattattttcatcaagaacataagaaagctcataaaagaagtcaaatttatttgaagttagttttctacacgttggagagggtgtatgtgtgagaggggttgaagaggagcagtgagtgagcttgatgatttgttgatattagtcataatgtaaaatagggactcgttgatgagtttatatttatcttataaatacgatcaatttatgtattaatattcttaaattgattctttaaattattgattagtgtaattttaatttgttaggctattttaaagactattcatgcatttagag

SEQ ID NO: 16717 - DNA, 3027 bp, Cannabis sativa
tcatatgtattaagcaagaagagagagtgaatataatatatattaccatgatggataatgatctgtacaacctcggcgggtactcagagcaatcgtcaatggcgccgcctcatgggatggtttctccggtggccgatgattataacttgttgaacagtactaatactactactactggtttcgacgatcaggatagggttcatcatgctttcggatccgactctatctttccagctccacagtcggcggattccgacgccgcttcaatggccccgacgtccgacgatttttcgtctgaaatcagagctaaaattgcctctcatcctctctaccccaagcttctagaagcttacatcgattgccgaaaggtctactaaataaataaataaatttttataaaagcattgaaaatgttagaaaataacagtaactaatttttaagatgattatccgcttattgcggaggaaaaaaaactgaaatacgattaaaacgtacatttctgtactttttctattttctctcatattttcccagtagccaaccacatctttttcgattcttaattttaaatgcaataacggtagagtttttttttttttgaattgtgtgtaattattaattacttacctaatttggtggatgatgatcaggtgggagcgccaccagaattggcaagttcgttagatgaaattcggcgagaaagtgaagtagtaaccaccgtttcgacttttgtcgtttcggatcccgagctcgatgagttcatggtcattattaattatcgtaatttcaatttatattgaatgataatgaaatgaaaccctagatgatacatagataatataaaattaaaaaaaattgaatatgataatttcaggaaagttactgtgatatactggtgaaatacaaatcggatctatcaaggccgtttgatgaagcaactagctttttgaacgagatgcaagcccagctcaactctctcagttgcagtactagtactactactacttcaaccagctatgtttcaggtctagtattaatctcattaatatatatatatttatatttttatggttgtggttataattgtgtgtgatagatgtgggtttgttattataaaatcttttaagaaaaatattgaggagagatagaaagagtcagatcacatgaagaacagtgttgttatagttcccaggctttggtttctgatgatggaaggaatattaaatgaatattgacacttattctcgctaagaaacaaaaggtcgtttcagtgattagtaataagttgagttttgtatctatttattaaatatattcatttatcatactaaatatcgctaaaccctaggttatatattatatagattgattttgtatatatatatgttttcttatataagaataataaagggtattggtattaagtattattttggctgagtattagtaatagtaagtagagagtttcatattaaattgtaccgaaggatattctgatactctttagtatttttccataataaagaataggggttaatttaagacattggaattttctattttaatttagtgcttcttatgtgtaaaatgtgagcttctcacattagatacagtttgtgggattatattgcatataagataaatgtgagagtcctcttcaaatatgtttctgtttttggggatgatttgacatcttggagtttagcttcgaaattatggtgtgattaaatatttacactattgaatggggagggatttgtaaagtaaattatttgcaatataaggttatatataatatgttagcatataagttatttgcaattaaatcctgcttattttattttcataaaaattatagagcattactaaaacgtcaatctcattgtaatgttaagaatgctatgtatatagtttcaaaagtaggaatgtaaattaaccacaagttgtttaaatcattcacttcattaatcatctatcatggtctgcacaaaatagattcccatcaactagaatctttgagagaacatgataaaaaatatatttattttaaaatagatgttcatattgtcagatggaagtacggttatgttagattttcaaaatatcatgtttgctcgtgctagctaggtaggtaatatataatagttttgatctgatcaatctcatgttcctaactactactttttgaggttatgttatttgtatatatcaatacttatatatttattttgtatatatcaacacttatatagtatggtaataacaccatttttagtatagaaggctatgctttttcatcatgcgatgtgtctacctagttgtgtgactttggaaattgattattttttatatgtatggatttggtttggtatggaaccaagtgccttaaaaggtgaaaagcaagtgatgagtagtattaatgaattaatatttatttagatttctgagacgttgttaggctaactacatataaaatatatagtttgatgatgaactacattgctttttttgatgtcaaatattatatcatatgtacatatatgtgtgtgctttgagggttctttgaattacttatgcacgtgggctctttgttattgattgagattatagacaacagaatcatgacagagaaatggttatggttttttgagctagccttaatatatataaatggtcttatggtgcaggctgtttttctgcattattaaataatacttataataaaatttgaacattgaaggctttttagttttctcgttgttttttcttttcattctctttttgtatcgtgttcctatgtcaagtttcttggtaacgtacctaaacatattagtatacactcacatattttacttgattgttcatttcgcaaaaattccctttgttaaaaatattagagttcatgattaattttttagttaatttttagattttttttttgttgttactagtgtttatagagtatatacgtttactaaaatatcttgagctttcatacgtatttagaagagttccttaagaagata

SEQ ID NO: 16718 - DNA, 6017 bp, Cannabis sativa
taaattttttctaaaggcctaaacattctcaaggcatgctcctttttattaaaaggaaacttacaaaaatactacaatttaggttaatttttaaaaaatactatcacacgaaaatcttttcaaaaatattatctttttataaaatagcagtagaacacaaaacagaacaactaaaaataatagtggaacaattaaaaaataacagtagaattacagtgaaaacttaacacagtataaaacttacacattatttttgaaaagaaaaaacacaatatttttgaaaaaaaattctgccccacagtataaaagtgaaaaaattaaaaatttttgtggtgtaattatcccttatcaaattcatctcaattattgttcgccatgttcaatgtttaagtcttgtgttacaaaaattgaagcgaatactaacaaagcagttagcagtcatataaaattgtatatcacatatttcttggaaattttaacaaattacttgaaaagaaatactataaggtatgagtaatatttagcactatatacacactacaatataccttgtagcaatgctcttatcttaattacctgttttatttatttaaaatgatataattttaactaatttatattagtacgttttcactttttttttcttctttataatgaacaactttctatatgacactcgattaatccattgaagatggtcttatcctctttaaagactctaactatgatgatgttaacgcggaaacgagtcattaaggacccttgactaatgaggagaagtgagcccaaaaccaaacaaatgttacgaaactaccaagtaaatcccccaaactatactaaagtcttgtactgaaagcgaaatgcgactccgtctcgttgaaaaccacacaaacaaacaaacaatttcttggaaaaataagcctaaaataattgtacccacaaataacgtctttcaataccatcgttccatccattcatacacaaattcttcaccttgctttagactattccaaaacccctttattgctttctttctctgttatggtatggtaaggtatgattcttgctctgttctcttgctgcaaaaatgggagacttcttttatcacagaaaactccttcgcattttgaaaagagattctgatgagtgcgatgaatctgcttgtgctaaacaactgtgtatttctcgtagttgtgagtatgactctgattctccgaaattgcttctaccaccaccacctccaccaattcagacccatctagatatagttcaaaaacgtatggttatggttagttgtgtggttgctggtgtttttcttatgtgtttcgctttcgtggctctgaagaggtatttcaagaggcgtaacgagtccagagagaggatggcaccgattctattcgaaacccaacaagactttattgatggggatcaaggacctatgcttgatcatcccatctggtatatcaacaccgttggtttgcctcagtctgttattgattccatcactgcctgcaagtataaaaaagatgatgggttaatagaaggaacagattgctctgtttgcttgagtgagtttgaagaagacgaaactctgcggctcttgcccaagtgtagtcatgcttttcacgttagctgtatagatacctggttgagatcgcataaaaactgcccactttgtcgggcaccaattgtttgtggaaatgtccctgttaatccagtaagtgattcggatcctaatttgaatgattcaaaccctacagaagaaacccagatggagaattctgagaatcctgatgcaaatcatcaggtggatgaagaaggtgaatctagtgaggttagattggaagatgaaaccaataatgaaaatggagtgaagggtttgtcgaattccgttgtgaggagctgtgattctcgtgttttaagtgatttggctatcaaacgacaagtcgttggtgaagaaatagagccaatgaggaggtcagtttcaatggatgcatcttcagccgtggcagtatatcgtgctgtggctaatgtagtttctgatcatggaggctcaaattcacagttagcagtaccagtgagaaattccagtttgccaattgtatcgaaacgggtgagtcaaaatttaagcttgtataaactaatgagaagttcttcaattgggttttctttgcagaaaggacccatttcaatgaaaaggtctagttcatctagcaggaagctttctttatctaaacatggcaggagtcagagctcaatcctaccatcttagaacatatacctaaagtttgaagtgagacacttaaattaagatgtctatactacaactgtgcccaaacaagcatggttataatcaaattatattatgaatatactgtaagctgctttctgctctagctaatctgaatgaagcatcttctattgtgatcaatgtttttttactcagaaaacagtaattttgatgcttgaaactcgacttgtcaagttgacatgataaattgcatcctgcaattagttttttcatgtcaacattgcttgtagtcctgaatgaaggcatatatgcctttaaatcttcatgagaacatatatatttgtatggaagataccttttccttttaatattgctgatatttctcagcgaaatggtgcttattagattttcagaagtattttattttattagtatgctagctcagtgattactatataatatccccatagtctagactgctgaaaaaaaataaaattatcaacttaaaacaatatgatggaatccgtgaatttgacttgttagatcttcggtgcttataatcttgagaacgatcttgcccgtcccgtatggtgacacgggatgcttaattagctagaatattaagttattagaaaattttatgatcttaatctctttcactattttggaaaaaaatttaatcattttttcttatagttgtgtagatattgtgtaaaattttaaaaaattcgaaaataatttaatttgctgaaaatagggcttaaatagtttgttgcacacgtaattcttttattttatacttgtgcgaaatagactgtttgaagtttgaacactgctttctatactataattactctaaatttttcaaaatttgcatgatatcttaaataattataacgtacattgaaaaaaacctaaaaatatttcttaaatcttgaaatactaggtaatgcatcagtgtactttttttgaaaagggtgtattgtagacgaactttaagttattttatgttgttgttttgcttatttttgtaatcttgtttattgctggcattttattattgctaagatgctctgattttatggaacttagaagaatgtaaaaatgaattagtggaactctctttttataagaaaggccatcatattataatattaataaaataaacaaaaaatacgaaaaaaaaaaaattactttggattgatcttggccatagatgatgatctaatggtgaaaattgactcttgatgtaaagcctcaattttcaaagcttgaatctcgtcttttagattgttttcgggtaatttactgaaaaaatcatacttgtattggggatgaaatttggacttgaaatattcaaaattgagatacggacgtgagacatgacttgaaagagattttaaagacgtttaaaaagcaagctaaataatgtcaattggatcaatattgagggagttatgttcgttttaataaaggttgtttaggactcaacgcttaggttgacacacaacgcccaagttaacatattgacgtcaacctagacactcgtaagtgaaaaaaaaagtcccatacttgcattttttttatatctaagtgatatgttgacatcacttaaccaatttcttagttttggtgaagttgttcacaagttcttggagatgtcgcttttttgtgaaattaggtagattcgaaacttcccgactttactgatattctaccttgtcgaaaaggtgaaatatgaaagtgtgaatttgacgtgtcacaagtcgtagctctcgtttactaccaaaaaaatagtcaaatgcacgagacagagtcaaaatcagataagcagaacccagcgcaccagcccacatttcaacatgggcgttgggtgcttctcggttggcttttcgaggctcattttgatactgatattcttttgaactcctgttagagtagggagtatataatcatgcaggctcctttcagcattagggtgagtgtaatctccttgcaaaactctaggaattatatcttcattaagcttcatcttctctgctttcttggcctccctttcgttctttctattctgcttacaagatttctcaatcacaggattcaaaggaacaaggctatctggacctcttctgttgcgcatacaaaaaaaattcacctgagatggaaaaattgacaaccaagctgtttagaaacaaaagaaaataaaatcaaaataaaataaaaattagttaaactaatattgataaattcaatctccacaatgatgccaaaacttgttcagtaaatttgatacggaagtatacataatcgaaacaaataatataatgatatataaagtatcttttcttcaaggatgaattatcaattaccaattaattaattctttagttatatttgatgaataataattgttggataaaggataaataaaacacacaataattaaaatttagagaagtaacaataataaaaataaggattattatgaaccgccactctcctttattatacttcataatacactttttcttctttctattcaattgataagttgaattaagaagtttataatctggttaagacttatgaacccaatttatgtgaaaactttttacatttctatggtacgtttaatcacaaaaatagcattaagcatatcaactaataaaatcatacaaataacctaggtactttcgacttaaattaatttacatccatgacaatcagagcatattcaaatctctcatttcagaattttaatttgaattcataaataacaattatagatggctagtaaataattacaaaattaaaaatagattgaatggaattgaagaagaagaagaagaagaagtcacatgcatccataaaataaactcaagtggttcacataataatccttaaaagaacttagctactaaaaggcattctaaaacaaaagaaattcagtgaaaaacataaaagatggaaatgaaagagaaaaaaatactatttggagtcctccattggcgccttttgctccttgctctccttctacactcaaaattcctcttaatttttgaatggtccaaaaagctagccatcagccccctttttatagtgaaatttttaagttgccaaaaaatcacaaaggtcgtggccttacaaatgagtttcccttttttttcgatctttgttgattcttcaattcacatttttttcggtgaacataggcaaggccgcaaccttgcttagcaagccgtagccttacaggtcagtttccatttttcttcaattttccaccttaaacttggaaagtgatcgttgttgactcttgaccacaaagttgagaggtgaaaatattatttttgacccattttttaagaaataggaaattactcaacgctaaagaagttttttttttcttcaataaatttgctcatcattgctcaaaaattcagatcaccaaaattattaaaattgaccccaaataattttcctaaacataaattaaaacaaaaattaagcataattatgtacaataaaataataaaaatactaaaacacaccctaaattagactataaaaattacataaaaaataaccctaacaccacacctgcttgctagattggtgagaatgaaatagttgttaactaattataagagagacacagcaaaaatatagtagttcactccctgtatcgcgatagtaatacaactacgtctacttcaattttttatttctcacgagatggtattacaaaataggctaagtgtcagaagct

SEQ ID NO: 16719 - DNA, 8973 bp, Cannabis sativa
tattgcttcatgaaaatgtgtatagggggggggtttggctgatattgatcttaaaattaatgggaaaatgtcaaaggataagagagagagaggccacagatttatatatgaattttgactgtaagggtcaacacgttcgtatcgtgaataggggttatatatgtttgatatataagaatatgaacgtgttgacccttagagccaaaattcatctataaatctgtgaccccccatctctctctcttattctttgaccttttttccattaattttaagatcaatatcagccaaaattgcccaccccccatatacacattttcatgaagcaatactactaatattgctactactacttccccatagtgtcacagctccaagcacaacccataaaatggcaattagtaccacaagaataggaaacaagatgaatactctatttcagggtgaactctttacggtttcagaatcactatctacgggaacggttgttgcattcacaacagcattgattctcaacctgctaaagctggacattcgttcaaaagctcgattcaccaatgcattttcggcagcagggcaggagtagtaggtatggattccacaaatgaccataaagtagaagagaatcaattattgttaccaatattttcattgccactttggttttgagtcgattgcaatgaaaatgtggaagtattacaaagaataaaccaaaaattaacaaaattaagcaatgcaaatatcatataactaacaaaagttctcttagatactatgttttttttccttaaaaggttccattcaatgatacatgtgaaaagggaagttgttttagaagagggcttttttaaagttggcccaaaatcccaattccacatagattttgtgccacaggaatggtgttcaacaaccaaatacacaattcagttaacgtgttaagtcatttgaagttgtgcaaagaaaatatctgcaaacattatacctgaagacgaattagggtaacagccagcatcaaactctgcagaagtataggcacttctctcttgattatctggcaggaactgatactgatggttcatctggtttgcaatatcttgatactatagattattcattgggctgcaccttctaaatacatatgattatttacttggcctgcgcgttctaaatgcaacagacttgtatgttggtctgagccttgtaaataataaagattactattttgatctgcaacttcaaaatgtagctgactaacagcctcgtcttcgcaaccttgttcagaatttcttcaatactgatatgagtttaccacattttgctatagggaatgaacgtattgatgtgaaatccttgatcaatcatcatcaactcccatatcattcaaaaacatggtggcatcatgaaacaggtccaactcagataatccatctacctcctcaattgaaagttctccagtggtttctccgcatctgttgtagtagtttcaagatggaaaaggtcatccatctcaataaagtcttccacaggtagcacgtaaacctcctgttcatgaatactgggagaaatgtgcaggccaactttgctgagtgagtccaccaaattactctgcatatcattgttgctcagaacctgcaaaataaaataaaatttatcagtgtctgaatatataaaaagctaacagactacaacttcttgtgctcaaagtaattaactagttcaatttattaaaccaatagtggaatagtaagttacatttcaataaattaagttcttgtgtcagtattcctgttcaaaattttctttatctacaaccttggcttgtgctaattttccttgttaacaaatccttatcctttgttttgttgctcttattataatatcaataaaagttaaatagccaataattcagaacaaacaattattttatcatttaagtagaagaaaaataaataagggatagcattagtggaagtcagctcaataacaaacctgagattgtggtggggtgttgttagcataatctatgacatctggaagtcaagcaaaggctcatcagtcatttgttgcgaaagttcttcaatttcatcagagagatttttgactgtcaactattgtctcctaactctcaacatttgacagagccccatcaactctttccactggagtttccacaatggcagacttgttaaaatctggacaatcaacattccattcttcttccgtgaaaggtgccccatattgctcaccatttttaggcccaagaccactttttttaaacactttgcaaagtgcatagtagtcatgcatcaccaaaaaacaaaacaagtgaatactcattacaaaatgtatgaaatacaaaaacaaaggactaaataaatcaatcaaattaatacctgtaaattctggcaccttttaagctcctccccaaggtatattcgtgcataacccagtccgtgcgctcaccttgagcctcaaggcttgaggtgcatgtcctttgtaaaagactagagtcttatttaataaaccccttgtcaaatttctttacacactttttttattttaattaagcactaaatttctcattaattaaaaaaagggaatttttagaaacacatttttcagttttatttacaatattacaacatcagtttttatttacaaaaatacactaactcaacaaaaagaaagaaaacaactgaaaaacaataaaaaatcaatctcgccacaaatataaatcaactataaaacaacaaaaaaaaattaatctcatgacagttataatacaactataaataaacaataaaacaaccaaaaaaataatttattatttttactacagtacgcaattttgtaaataaaaagttcagagcgtaaacatgaaattttttttgtataaacgtatttgtgtaattttttttttcaaatttttaatcaattatgtaaaaatttcttaaaaaaattgaagaaaaaaaatcatttctcaaacttatacttttgacaaattattatatatcttcaacaaacacaatgataacacacattgagaaacacaatcatagtttattttgtacgaatttaatttttttaaatagataccttaattttatatagtattatttctaaatgaatgaggagagttaagatataatgtttattattatgtgtgagagtgtgtatgccaataatatatatggaaataaacaattaattagaagtgactgaaaagaggaaaaacaattgtgccaatagaaccaccatttgacgaagcatacaaagttaatttccatctagtgaaagacaaccacgtgatgaagaagctatgcctactgcgccattgtaaacagtcattcttttacaatttgggtacagaacagaaattccatatgctactacagaaatctgatatatcagttagcgacaagtgtctaggtacaaggtttcagttgacaatgaatgagcaggtaggtatcattataaactaaatgtatacagctaagttctatgggtacctgatgagtgcgaccagtttctaatctccactcaaccaatgcagagccaccaccagctagtatttcaattactttatacctgcaaatgttcaatcagctctgaaaaatgtaacataacctgaaaatatttgacatccacaaatgacatctgagtagcacactttttttaatgaagtatgtggataacataaaatcttctgaaattgttaaatgaattcctgaatgaaaatacattcatttaatacatacaatacccactacccaggataaacaaacactttataatacaccaagaaaataatagaatgatggagaacataaatcacctactagcagcatgccgagcctgtttactattacttgctcctggtattgcagccattcgaattctgttatttgaatcacgaccaattggaacctcaatgcgtccagaaagttgggagggaactccagatgtaagactaatgtatactctctggatagtgtgtagcttgaattgatcagataaatgcgcatgagagtgttcgtcctgccatacaaagcataaagaataaaaagtaagtcacaaccgcaaaagttcatggcaggtttcacttaaaacaataggcatccatgacttggtttgctgaatcatcacctttgcaactacaagcaaaccactagtgcctttgtccaatctatgcacaattccaggacggaccgatgcttcagatgtggcgtgatccccagaggtgtttttaagctcatcatcatcatcagatagaaattcctggtttgaatattcaactattggaagcgagcaatgatgaagaattccattcactagtgtgcctgtaggattgcccggtgctggatgaacaacctaaaccataatgcagaaacgttattcaaaacttttattcacctaaaagtatatgagtttacgaaatttaatcaaatttgttagaaaaatgtaggttatgacaaaatcatttgattattttagctaattgaagcaaaccaaaattcagtttttgggtacatttttttaattctcaaatgatatattatatagagctatatcataacagaatttaaaacttctgtctccgagattaagaaaaggaaaatatagtcgaacttcaaaataaattttaacccgcaaaaattcttggcattttttttccctccaatcacacaaacctaggaattactatatgatctaaacattggatgagactgaacaaacttctaccatcatttatttttaaatccaaatatattgccatatttagtagtatatacgtaaatacacacacacatatatacatatcaaattatatatatataaagggaaatgcgtatattagaatgactgaaaactgaatactggcagaccataccatgtgtggaggtttgttaacaactagtacactatcgtcttcataaacaatatccagaggaatgttttcagcttcggccttcagaggtcgtaactcagaaatttcgcaattgatttcgtcgccagctttcacattgtaagaaacctaaaattactccggcgaacaaagaataagcgagagaaaacaaaaaagaagtgaatctcaacaaaagagcggagttaccttatcgacgacctgtccattaaccctaacaagccccaaccggatactagactggacacgagctctacttattccgctaacgcgtgaagagatccaggaatcgagcctaactttaacagaatcgatcggcaccgtctcctccaatcgcacaccggagaaattagagagaactccggcaaaagcgtcgtcgctggcgtgggatagtgaaggagcggaaaagctggaaaggagcctgagggtgatcggaaacctagaagcagagagagaagaagaagaagggaatgtgggtttaggagtagggaagatagaaaggagagaaggagaaatgagaaaaggttttgcagaagaagtaaaagcagtgagccactgcattttaacagatttaatttaaagagggaagttatttatcaacaaatcattctctcttttatattcgaaggaagatcactgcttgtgtaaagcctcatccatcttctcataccattctttaaaatgttaaaatttaaaaatataatatttcattttatcacttttctacattagctcaaatttttgcacatgtaaactattaaatttaaaatatcatcccattaactcaccttaaacgattgatttatgtgtacactattatacacataacacgtttatattagtacacttaatattattattttaaaattattttcaaaattcatttgaaaattaaataaaataataaaaataaaaaatattataaattttaaaataatttatattttttaaataataatattaggtatactaatataaatgtgacgtatgtaaaaaagtaaacgcataagcagtctatattggtagttaactgtaaaaaataaataatactttaaatttgctaacagtttaatagtttggagaattttatcgtcaagatttgagtttaagtacagtgataattgagaggatttagcagcaaaatactcttttggcacctttttataggggtgtacatcagtcagttttgtcgatttatgatatatttcattcaatccaatgtaaaagattgggttataaaaaatctaagtgcaacccgctcaattaaaaaaaataataacttgtccaatataattggtcggtttggtcgggttaacctgtccaaaccgaccactaatatttttttaaattttttttaatttttacattcaattgttatattttagttaattataatagtgagacaatatagattgaattcaaagttcaaatcaaccactataaaaaaaaatatattagtttaaattttatatacaataaaaacatataaatatatatattaaaccctcttaatcgagttagttggtattatttttaacatacccaatataaagattgggcaggttatatttcgtcgatttttcgattatatttttcgtcgggttatctcgatttagtttgggtgggttattctaattgaacagtttataaaagtttatgttcaagcccacttttttacttctaaaaatactctaatgatatagcacatttcaagaattataattttatttactataattttttattaagaaacagatagtatcaatgtcattgtattgtatgacattaatacaaatttttagaatgacattcatttctctccaataatatagcactatcatattttgccaattaacatgttcgcctcaacaaattcttcaaaatttaatcaaaatacgattagacggaattattttaaatatttttatagttttttatttacaaaatatacaaactattgatgtttttaagttattttattttaactatataatcttgttgtctttttgttattatatgctgttttaatggtttttttttaaaaaaataaaataaagaaaaacttttcattcaaaacaaccactgaacaatacacactgcacagcaattagtatatcattctcttttttttagttagcttgaagtattacaaaatgaaattctaactttaacaattattttaatttgcctacttgaactagtaacagaacaacaaaaactttcaaaaacagaacgattttaattaagccaaacacaatacacaacaacaaccggcaccattatataaatcgttggaacaattcctttgggcatcttaactaactaatactacaaatattcgaattcgcgacggtcttgaaaacgatttttttttgggaccgttgctaaaaaaattatgcaactgcttaaaaccattgggaaaaataagtattcccgacagttttgaacattagctacaacaataggcgacggttattattaaaacacgaaaattaaaaaaaatgggtatacccaatcgaggaacattgataattagttgaggaagctctcaggccaatcacaactaccaaaccaattgtgaacctcttgtaataacttcctcatgaaagtacaataaaaaaaatgtgagaatgagttcgtatatcaaattacaaaccaggcagagatatgaatccaaactcaaaaacttagcaaacttatcataggttaagagatagctatttatagctttccataaaataaaacaatatttaagaaatgccaaatcaatctatagtagctcaccttagcctcgagaatgagggacaaataaaaacctttcactgtaaatctccccgaactaccaaccactaatgaagcctacaaatcaattttgcttctcaatttgacaagttttttgaaatacctgctaaagtcattactagaagaaagctgccaaaaatccccatcttttatataaatatcattaccatcgaacctaagcacccactgtacaactggcatgcttgctccgttcgagatcccaaactcgtcgccaccctttgattgaaacttagaagctatttgagaacctgctatgcccagtccgcccaaagcttagtgccattgtcgcccaaagatctgcgttcagatctcgtcattgttgttagccccgccgctcgtcgtcgacgagatctaatcagatttgccacttttctctctccccgtaagatttattcgtctatagccatccccattgtcgaagcatcacctcgcaatgatttcgatctcagcattttcgaagtcagatgagtgagaggcggagaaggagagaagatgatgaaaaatattaaagtttttatttattttttaaattgttttaatttttaaataatttattttaggttttttataatttcaaattattttaaatgaaaaatatcataaggacaataatttatcgatacgttgtatttttaattagtaaacagatctgttaaaaaagaagattaacagacttacgaaaatagtgaatgtttgggggaaaaaatcaaatttggaaataaaaggcccacgttaaaaggcccatcaacataaatacatctaggcccaagattatatagggaggcccaactcggtataagcaagctattgatcctagttgccaatccataagggagcactacggacaaaaagaaggaaaacggtaaacaacaagaaacaagtaaagagagcgccgacggaaacagaaggaagaacgggagggaatacgtaatcgacggatcgaagatcaactataagtgaaataatagaccaaaacccgatgaggcacccagataccttgccgacggaggaagtacctgaaacacaacaaaagggggaccgaggtaacactaccgacggaataaaagcccccgacggaggagaactcggatcccctcagacgagaaccccgacaaaaatagggggcctagagcataaagtaagaaattgataatttcaagaatgtgatgccgatggacacgacaccgttggatttagggagaataatagcattaaaacccactaaa

SEQ ID NO: 16720 - DNA, 6458 bp, Cannabis sativa
  modified_base (531)..(543): a, c, t, g, unknown or other
accagttttttggtgattttttcagtgatttctctgacgacaatggcaattttgacgacttttctggcgttggtagcaactctattgactaatataccgacatctactccagtgactttttcagtaccgacagtaaactctgggaaattcgtcggaattggcattgtcgccggaaaaattaccgaaaaaatcaccaagaaattggttgtttttttcttcatcaaggaacaatttcttggtaatttttttttgtattttttttctttatttggttgatggatgaaactggtttcaattattttcagtgtatatcatttttgtttcttgatggaaaaaccactttcttggtgtgattttgctggagacaataccaattctgacgacttttttgacgccggtaataactctggcgattttttccgacaacgacaactactccagcgacttttctggcaccgacatcaaactccaaaatagtcgtcggacttggcattgtcaccggtaaaattactgaaaaaattaccaagaaannnnnnnnnnnnncaagaaactagtttcttggtgactttactagcgacaatgctaattctgacgactttttcagcgccgactctactttttatgccatatttatcataaccttaataatttttctcatatttttgaaaatagccctataagataagctatcagggccgactctgactattactattagagggcccaagattttttttttgtgttgtatctaaagataggttggaatatttttgacgtatgttgtaaaatttcacaaaattgtcattttttttcgttattttatatatgatataaaataataaataagtggatgtactattatattatctaaaaaaaatcctaaaaatatattgcgaggtgatataaatgtatttatatattatgtggtatgatttatcatttaagaagcaatagtggtagttttcaaaaagaccttacaaaacctttttggtctgagcttaattttttttttttccgtggattttttttcaaaatactgtatactgtgttaagtattcattattattttactgttactttttttagtttttccactattttttaattgttctgttattttattattttataaaaaatagtatttttgaaaaaatttctatttgacagtatttttgtaagaactaatccaaattccaatatttttgtaaattctcctttttggtttgggccaggcccataaatgagtcggcccaaatataaatatggtaatggtgctaagagcaaagattacagttgccgccggaagagaaaatggccgttgtgtttagctgagcttcagctaaaaccatggtgtaaactgtaaacgatgagaggaagtagaagccctagaacttcaacttcacttctctgacatggtggagttccccaaatatatctctcctaagcaacttctgaaactactcaaagccgaaaagaaccatcacacagcactcgcactcttctactcagcgagtcgcgacccgagtttcgctcactcctccaccatcttccaccacgtcctccgccgtttggttgacccgaggctcgtcagtcacgtgggtcgggtcgttgaactgattaaaacccagaaatgcaagtgccctgaagatgttgcattgacagtgattaaggcctatgctaaaagctccatggctgatcaagcagtggatgtgtttcagcgaatggaggagatatttgggtgtcaacctgaaataaggtcgtataactctttgcttaatgctttcgtcgagtcaaacgattgggatcgagctgagtcgtttttttcgtcgtttgaggcacatggggtaactcctgatttacgaacttataatattttagttaaaatttcttgtaagaaacggcagtttgagaaggctaagatgttgttgaattggttgtgggataatggtttcgaacccgatgtgttcagctatggtactttgatcaatgcgcttgcgaaaaatgggaacttgcatgatgctttggaggtgtttgatgaaatgtctcaaagagaggttgaccctgatgttatgtgttataatattttgattcatgggttgtttagaaaaggtgactatgagaaggctaatgagatttgggagaggttgttggaagcgtctacagtttatccaaatgcagctacttataatgttatgattaatggtttgtgcaaatgtgggaagttcaatgagagtttcgaaatatggaataggatgaagaagaacgagagggagcaggacttgtttacttacagttcaatgattcatgggttgtgcgaagctcattatgtagacggtgctgagaaagtttacaaagagatggttgagagtggtgtgttgcctgatgttgtgaccaataatgcaatgctcaacgggttttgtcgagcgggaaggattaaagagtgctttgagttgtgggaggttatgggtaggagtggttgtcgaaatgttgtgagttataacatattactcaaaggattgtttgagaatggaaatgtggaagaagctattttaatttgggaacatttgcttgagaagggtcgtgtcccagattccacaacttatggtgtattagttcatggattatgtagtaatgggtacttggataaggctttatgtatattgaaagaggcagaagacaggggacgtgatctagacatgtttgcatattcctcattgataaacgggctatgcaaacaaagaagattggatgaagcagccatagttgttgatcaaataggtcaacgtggctataaagtgaactcttatgtgtgtaattcattgattggtggatttgtccgagcatccaaactcgaagctgcaatttgctttttccaggaaatgagcaacaagggttgctctcctacagttgtctcatacaatattctcataaatggtttgtgcaaagcagaaagatttagtgatgcatacaatttcgttaaggaaatgcttgtaaaggggtgggaaccagatatggtcacgtatagcttgttgatggatggcctttgtcagggccaaaaaattgatatggctctcaacttgtggcagcaagttcgtgacaaaggtttgaagcctgatgtaactatgtacaacattataattcatggtctttgctctgcgggcaaggtggaaaatgctctggaactctattttcagatgagccagggtgactgcattccaaatcttgtgacacacaacaccctcatggagggttttttcaaagccagagattttaataaggcatcagggatatgggctcgcattttaaaacacgggctgcagccagatatcatatcatataatattactttcaaggggctttgctcttgcaatagactatcagatgctattatatatttggaagatgctttgagtcatggcattcttcctactgccataacatggaacattcttgtcagagcagtactcaacagtggtttatgacttaatcctagaactatcatggatgatctgttgttttgaatgcattcatgcagaaaagataacgtaggtgttataggtataatttattattccattcatatcttacatttgtaaatttacacatacttcatataggagcgcaatataaccagcgtttcatatcattagagaagttgttgctttagctttaatggtgataaaatttggccagcaattgtatacatctttttagcttctgtcaatagttttaatgctggaagaactgttgcttttgttacgagtaatgtctcacaagttaagatgaagaacataaaattgtcttcttatactcgataaaggtattatcttagcttattgttgttccctgtgttttctctttatattgttttgtgttggtttgtaatcattgcaaatttatcctggtgcagattggaaccttgaacacgaagaaatattggggttgaacattctgtcctccggaatcaagactaccaacctgacaaaaaaaaaagaaagaatcacttgttgggtaacctgaataccaatttcaaattattattggccaggtaattcaattcttagctagttacatttttgtggagcacgcccggaaaacctgcaagttgaaattttatgtatttgtgagtccaaaaaaaaaagataagctattggatgtcctttttcttttgagatgccaatgcaagggtgaaaaaaaattatgatgttttttctttttgatattcaaaagtattatccttttagctttagtcatgtcagctttatttggcagatttatttacatagattatatattgtaaatttaaataatttaaaaatttatctgcatctatcaagaaatttggacaagcatcagatagctactataagttacaatgattttggtgatttcagtcatatcgccatgatcagctatattgatgatgcaaaagcaaagggtcttgatatataggcctaagtaatgagtttttacttgggtttattagtcatgctatattcctctgaattgttggggctaaaacttacacttatccatagttgtattagcttagacttctcactaccaaatgataatagcttcatgttttatacttttgataatcaatacaggtaacagcttttcttactgttgtttcatttgttttctctatatattgtttcctggtgttctgtaataattgcgaaattctcctggtgcagttcggattcttgttctttctagacaaatatatgaagcactcctggaaagcgtttgttgggtaacctgaatgccaactttgaattattagtggcatagtaaattcaattctgggccatttacatttttgtggagcactcctggaaaacctggcaatagcattgtttggctgtagaaaactataaatatttgtgagtcataaaagaaaaagcaaaactattggatgtgctttttctgctgaaatgccaatgcaatggtgagatactttaatattgtatcttttttccctcttttctcttttgtgctttttgcttttttttgcctcattctaataactttttagatgtatcatgtatcattcttttgattttagtcctgttaggtgtaatgatatatctgcatctatcaacagttatattaatttgataactttaacagctacatgtatatattatatcaggatccattgatccagaaatatggacaagcatcggatgactactaactttaatggttttggtgatttcagtcatatcaccatgatcagctactaagatgatgcaaaagcaaaatagcttgatatattatgcctaagtaatgagttttttactcgggtttattagtcatgctacattcctcctaactgttgcggtcaaaacttataaacactgctccataagggatgtacggacgtaactttttattcatttatttatttctttttttatatattttgttggtcctgacaataaattgagctcatagatggcctaactatctttttcattggaagcttgttagcaataataggcagatttgtttacatacacatattatgtttcttcaatacaaaagaatataggtgcatgcattcattgactgtcaaagctatatttacaaagttcatgcaggagagatgaatatatgactatagatgcatgcatatggactgttcatgctatattaatttgatagctttacagtgatcacatagagaaatttggacaagcatcaaatggaactaatttacaaaggtttatggtgatttcagtcatatcaccatgaccagctattttgatgatgcaaaagcaaagtgtcttgatatatcaagcccaagtcattagttcttacttgggtctattaatcatgctatattcctcctaccacaattgggggcttaaacttaaaatttctgttttgggaagttacagttactttttcttttcctccgacttagtttttcctgtttcatttgtatctgacaatatactctgctcatagatgacttgtgaaatcaaacctgctaaaatagccgcaagaactgcggcttttcgccaatcagacgaagtagagatgatagaatcagcaattgcaatgcctaccaacccaatcaaaccgaggtaaatgtttctcctaatctttgactccgcactttgtttagtaacctgtttaatctttctcatttcctccttagcttccactttctgttcaggtgtcctctccctcaggttcttaaagaacaatccttcatttcggtcttcttctatctgaccttcaagcgctgctaactcgttttcactctcctcaatctccagtctgttctgctctgcagactcctcaaactcctgcattttgcccttgatattctccattatctgcttatccacaatgatcaaacaaaagggttgtcactaaaaagatattgcatgaaaccaagttcttatcattttgatacattgcatggacaaataggaacgtaa

SEQ ID NO: 16721 - DNA, 4004 bp, Cannabis sativa
agtaatggtcgttcgtcccactcctacgttgatggtgtcggcaagtgccgttccattacctgggagtggaacattcattgttccaacattgatcgatctagcgttgttatctctattcttctggtttccaaccatgatgattttcctccgaaatcaacagaatattttgttcccacagacgacaccaaatgttgttggaagaatttagacaacacaaaaataaataacaataaaaatataaacaaaaaatgtgcgagtactccacctagaatggcgagtattcaagctatgagcacacaaatgtactggaaatataaagaagacaagaaaatatagtagttcagtcagaacacggtctgcttagtccactgttgcaagggttttctgctctgtcccatttcatgttggatcactcttttatttataaagcaagtatcttttgatttgactgagattgaattcatgatcaatccgtttgtacatttatttttatttggctgtataattgatttaaagagaaatacattttttaacacacgtcttttttctatcactcttttgtgtcaacagagtcaacactgcaccttaaaagtttgagtggagggagctctagcgcaatacggcacaaatatcaacatcgataagtcaatttgcataaggggatcacaaaaattatgaaaactgaacataagtaaatggcaaaacaacatggatttaagctgagaagagtacaatcattttctatatgataatatatcaaacaaaatgcatcatcttccatatcagaagatctcacatattctcatacataaaattcaatatcaatagtagatatgttcagaaaaaaatggggtttcgaatgaaaaaaggagcaactgatgcaaatccaaatatacccttttaacataataagttaaaaaaataaaatcaactcaacattgaatccaatcccttcacaagaacaaggccagcccacctgaaacagccaaaaccatttggctcaaaactcccaagctgttgaccctgtgagaagcagacttcccttgtgaagtagaagatgatggggacttggcatcagttccctcatctcctggcgcatctgcaacaggagcaatatctggggatggtgctggagctggggttggagggatatcagttccaaaaatggcctcagggaggagaactttatcaacctggtaaagggcaacagggtcagttgaatgaacactgctgctgacctttgtgttggtccaacccgagccgatgtggacagtccctgaaacatcagtgaagttcaaagtgaatggaccaccagccatggtgttgattgggctgctttgactaagattggtgaactcagctaagctgtagtaatgtggcaaagcgtggaacagcaacagtgacttgagctgatcattggtgatgtttttcaaagagggcttctgcttaagggatgcgaaagcactgtcttttgggacaaagatggttacaccttcttcagtgttgttggcttggttttgcaaggtttcaatcactttggtggatacaaggtagtcaaggaaggtggagaatggaccggccacagtaagtaattcggtcagattcacgtaatcaggagctggggctggtgccggagttggagttaggattaggggaggtggtgaagcagctttttgagccattgctgatgagcacagaagcagcagcatactgctggcaatgaaaacatacttggacgccatttcggacaaactgtctttgaaaagtgcttattgtgagaaataccagactctccaaattcctataaaaacaacaatttcatatcccaattcagatctcagtattaataaaagaagggaattagtgttatgctccggtcaaatcataatgtgggttatcattcattctatgttttatttcgaaatggaaccttttttttaacactacacagtgagtactactgatttgaagaactagatcttggtcaactatacatacccattttctaataagatgaaattgttaggtggggaaagaagatctagtggaatataatagattaagaacagctgcaatgacacactgcacacgtaattctctcatctttcaaatatgatacagtatactttaaactgttcaatgagagatccaactcagtagaggacgctcaaaatttgaagagaagaagagccaaatcaaaatggcctttaaactgaaaacatctaaatcattttgaagaaccttacttttcagctcactaacaacatctagtgaaacccatttcaccaaatccgtcgaagtgccacaaacaattcccacattcacacaatgtacatcaataatggcaaagaagcagatctagatcagatcttactaaaagtaaaacacattgtgagattaaacaaaagaaagcaagaaagcattaagaattctcaaaatggaaacattaaaaaaaaaaaaattacaaacaaacaaatgtagctaaagaaatctgagaaaagaaggtacaatgagaagagcagaacagagtgttaaggaaacccacctcagactgagaacaagaggaggtcagagagaaatggcagtgaagaaatgagaagctgatgcaataaaaggtggaagtggggtgagattatataaaagatggagttattagttagataaaaacaaaaacacacaataaaaacagctagtaggtgaccttagtaaaaacaatttgtgtgtggtaaaagacatataaagtcttgagtaggtgtaggtggtttctttctttcttagttggacacaaaataaagtaataattaattggaatgagtttctaaaagaaaagaggccatttgagaaacaattttagtgtagggtgggctttctaaatcacctgcaacttattagtttaataaacattttaaacaccaatcttgcactccaccctaccaaatggcaagatctccattttatattcaaattctcttgtcatgagtgactcgtgagaaactctcaccaatttcaatttggttgatgaaactcatggaagtgctttgtgagttttagggtaggaaaaggatgagatgagtcactcactctaaactttaaaggcaatacaatactccactaccataataaaataaaataatcatattccttaatcaaggctgtcctttacaattctatggtagaaaaaaaaaatcttatttgttttgagtttcattttagaaaatttatctgaaaaaatattaagtttatattaggacatttagttagttagagttaatcttgaatagttataactatttttcagctcaggtaataactttgcctatataaggctctctgtaatcattttgtttcaaagagaaaattactctcatcactcaatttaaaattgtaataaaacaagaaagaaaagataatgttatcttttctcccaactgcaagttatagatgatatgtttacatagccttattagacaatatatatatatatatatatataatcatttttttttataattacaaaaatgtctaatgaaatgtttttgtaatgttttattaaatgctagataacatttcagtgtttttaaaacgagaatatatttttgtaataaaatagcacacaaatggaatacaagcaaaataacaataaagcggcttatatataattttcttttgctaaagaatatttctcttatattattccattgtagattattaggacatccattctcttagctcccccctcccctctctctcattttttcttttgctaaagaataatttttactctcactccactactaaacataattcatgcctacaaaagatgaaatgaatggcaatgatgacaataataatgagaacacaaaaaagtgtgcatataagcattgatattataatatagggtaagtttatattgttagactataatgtagtgtatgtaatatatcatatataaacgatatgaaatgcgaaaaaataaactgtaatcatatcaataatatatgcaa

SEQ ID NO: 16722 - DNA, 4379 bp, Cannabis sativa
  modified_base (27)..(29): a, c, t, g, unknown or other
  modified_base (71)..(73): a, c, t, g, unknown or other
aacaatttcaatagttcagggagaatnnntaacggccaaaaaaatttagggggcatgatttggtatatgtnnnagttcggggggaaaaattactaatatgtagtgcatgggttgtgcaacgaagctgcatttcttgcaacattttgaggttttatttacagtgcatggcatatatcgtatatgtactgtagtcactacatatatattttttataatttaattaatatttatatatttatattattgtatttataaaattaagaattgttttttggaaaattttataatgcacattttttaatttgatgtacgaatttacttctatttgtttcggcacccaacaaacttttttagtctattttttttatatagtagtgtatattatagttatttaagatatcctgcaaaattttgaaaaatttaatacgtcaaaaacaatgcacttatttaaaagtggcgcatggatatattcctacttatttcggcattcgaaagacttgtttaatctttttttttatggtcgtgtactttataattatataagacatcttacaaaattttgaaaaatttaaaaaaattaacatgccgaaatgaaaatttaaattttctgtcacgtgactcttatttagcgagatgcattgtaaaagtaccttataatattttttttgtataaatttaaatgtgaataccataaattatttttattttcaattatgatttaagtatttattttattaaaaattaatatagaaataaagaatatttttttaatgcaatttttagtgttgtagtttgagtgaaaatactttttgatgtcaaatttagtaatagtgtaacactgaattttgtgtatccttagagatgctcttgtaaatcattttaaaaataaaataatataaaagaataatgtcaaatatcattaacatttactcaccaataatctttacaagaacattctccgtccttaaagtgatggaatcgaactcgatcccttaccactatttctcgattaaatgcttttgaaacaaacttagtaaatgagtggcaatctctacaaactctcagattctttgttattctcaagcatgtcccaactggagttcttgagatcccaaaagcaatagctagtttctcactgtgatatgaaccatttccccaacagtacccttctccactaaaaccttttaaactcaccaaagacattgaatcttcttccacataaccaagcaaggtcacttcttggattacttctcttaacttcatgtagatttcattagtatcaggatgtgatatgtcgtttacaacaaatttatgaacttgaccattaatttccatccagctccaaccaggtgtggtctttattccttggctttttatcatttttctcattgcagaaaccccatctgcattgttcacttcaccatagattgtagctaaaagaacacaatcccctgcatttgaggccctaagctgtactagattcctcatggcgatttctcctatttcaacgtttttatgaatcttgcaagaaccaagcaaagttcgccagaggactggatcgttctgagatgggcaactgtttattatatccagcgctagtttgagttttccagctcggcctagtagatcaaccatgcagccataatgcttaatttcgggtttgatgttgtactttgagagcatcaagttgaaaaacttgacaccctcttgaactaaaccttggtgactacatccacataacaaaccaagaaatgtaatggagtttgggttgactccatccattaccattttcttaaagaactcgattgcttccaaccctcgaccatggacgccatagccaaccacgattgagttccaagtaaaaatatctcgcttcttcataccatcaaagacagaaagagcagcttccaaatttccacatttagcatacatatctataagagcatttcccacataaatatttctattcaaaaatccactttcacgagccaatctgtgcatttcgattccaagattcaaagcaccaacatgtgcacaagacgaaagcaagccaacgagtgtgaacccatcaacacccacattctcaattctcataagatcataagttttcaacgcctcatagtgaaaccccgcttgagcgtagcaagaaatcatagaattccaagtcaccaaatctctcgcaggcatttcatcaaacaccttccgcgcattctcaatcgaaccattcccagcataagacctcatcaaattcgtgcaaacaacaaaatccctatcgtacccagaacggattacagtgccgtgaacctctttccgtttgctatcggccaagggaaggatcactcgctcgcaagctctgaggacgaacgagaacgtgtacgtatctggacgagacctagtggggattgaaaccatctggttgtaaaaaaatatggattggataggagatgaactgcgggaaaaacccctgatgatggaattccaatgatcgatttgggggttgtgaatttgatagaagagaagacgagcatagagtaaggaaccggagacagagacagcgcagaagttgaggagcttggtggaaatggcggggtgattgagaaggccagctgtgataacgcaagcatggattttgtgaagctttttgagggtgttgcatccttgaaggagatttagtatggttttcgttttggtgtttgaagtttcggcgggagcctccaatggtggagattcctgtgataataacatggaacaacactataaaattacacaaataagtatatctattgacttgtttacgttacttaatcgaaataagagtaatttaagttacaaaaatattttttattttttttcttaaatgaaaatatattcattaaagaagaatttcagagtacaaaagagtaagaagctccattggaccaacatgtactagaaaaaaaaaatttgagaaaaaaaaaaaaattgagagcccctagcaacttagcagctactcaatttacagataacttgataaaaaaataattgaacattacataaaagagataataaacttgacagtctttaaccaacagcccaaaactagatgatcaactatcaatttcgatgactacatgttgccaaattagaagacatgagaacaaaaataccttttattttatatttttgtttgtattttttttttttaattttctttagtaaaaaaatatagaaaaatttaaaactggacctcgttaaaaggaatgtaccgatatatccatatttattttagtatttgaaataattttttaaaaagtgtgttgtaaaaatatataaaagatatatatatttttttaaaaaaataataatttatagcccaattgttaacaaatgcaagagaacttctaaatataaaattaacaaaacaaaattgaaacatgtcagtaagtttaaaattcgacaaataaatgaaagcttccaatcagccaagactctcttcttaatacgatattaagagaaaatgacaaaatcatgccaacccaaacatctagcccactctagcgccatttcaatagtcaccattttagcattgagaggggaaacaaccttactaactttagctcttaaataccagtttatgctgcaagtcgtccaccgccaacatagcgtaacccgacctcccttaaaggctagggttgttcattggatcatatgcaatgtttttagacccatccagatccaatacaattatacattagatgttggacttctccaaccgatccaatccaatactgtaagctcaatcgaatcgatctaaaaaatcattggattgaatgggttccatccaatggatgaatccctgtattggatcgaatccaatacttttgatccaatattttttagaccgaatcggatccatccaatatttttaatctaatattaattgaattgattggatccatctaatcaaatccaagagtaaaaactgatttttcacctaaacaatatattagttcaaaatattacaacccaatataagtctaatctaaattttagcataagtgtacaaagtaaaaagcttcaaatacatctaaaattgtgaagcctttagctttagagcactagttagatacacgaaaataagaaaaatttaggcagattcttcgggatctcattctgttcagcatttgggcagagtctttggtttgaagaacgcaccagaatgaaatttggggttggtttctgggtttgtttcaaccgatattgactgcaattttttctttttttttgaagaaggcagcaggaagaagatgagatttttttttttttttttttgaaagaaacttagttcggaagaagataagatttagggttgtttgtttcaaccctttagtattcccatt

SEQ ID NO: 16723 - DNA, 7304 bp, Cannabis sativa
ttgttgttgttgtttgatttctcctactactacacgactccattgttgcccagcttcatattcggttcatatagtctagatctagttttttagcaaggtttgacattcaatgttgtttgctgtgttatatgttagtgtgaatttgtttgtatttttttacgttgacttaattgagagtgaaaacccatttgaaagctgtttacagctttaattttgttaatctcgttaaaaattcatctgggtcgatgttaaattggacttttttgttttagcataatttgacactgtaattttaggaaaaaagtgataatctttttcaattttgttataattgagtactattagattgagctctgttgccaggtttgtgaggcatgactggtggtgataatcaaaaggttgatgatggtgataataagccaaatgttgaagttggagatttgccaaaggctgatttagttgaggaaaagtctggtgtggagaagaaaaaatctggtggagacaagcagaaaaagtctggtggagagaagcaaaaaactggtggtgataagaagaagaataatgctggtggtggtggaggtggtggtgagatttgttccccacattgctacttagttgatggctctatatggttacatatacttattattatgggattttgttggcttttacaggaggaaagaaaaaggaagttaagaaggagactggacttggacttacccacaagaaggatgagaactttggagagtggtactctgaggtatttttcttttgactaacaattagcattgtaggctgtgaagttgtagaaattgtaaaatttccatgtatgtagtctcaaactattagccttattacttgttgagttttcctattgagaaatgatgtattgtagtttgtagatagatagaagaggataaggtatcatattgaagatataacgaaatattaatacaagttttgtttaaaattaaacataaatttaatttgattttacttcttggtgctgtaggtagttgtcaatggagaaatgatcgagtactatgacatatcagggtgttatattctcaggccttggactatggcaatatgggagatcatgcaggtgagtctgagaaacttaaaaatattgccataacattcattttcttaaatgcatcattttttaaaaatggatgttgttcccattgatcatttatcattgaattcccacatttttcattttcaatattttgactttctaataatattgtcaatgatgtcatttggtaggcattttttgatggtgaaataaagaaaatgaaaataaagaactgctatttccccctttttgtatctcctactgtcttgcaaaaggagaaggatcatatagagggttttgcacctgaggtgagatttgtaaacgtttatcagaacaatgagaaaactttgacttatttttctgtgtgttgtttcttctttgaagtcattaatgacgttataccttgggattccttaggttgcttgggtgactaaatctggagagtctgatttggaggtgccaattgcaattcgtccaactagtgagacggtaatgtatccctattattcaaaatggataaggggacaccgagaccttcctttgagacttaaccagtggtgtaatgttgttcgatgggagttcagcaatcccacgcctttcatcaggtttattacttttgaatctcttcatttataatagtttagtttcttaaacaatgccgatgtcacaaatgaagaactacgcgtattgcgtacaacatttcatagttactcttgattttattttattttatttttctatttattctgcttttttctttttctgttttcttatatgatccgtaaaaaatttagaaatatgagaaaaagagaatgtaactgttgttgaattgaagcttgttctgtctgttaaccgccatgaattagataatcgctaactaactcttacatatatacttattccaggagtcgggagtttctttggcaagaagggcatactgcttttgcaacaaaacccgaagcagatgaagaggtatgaaacttaagcttgaataccattaagattatgaattcggatcttctattttaacttctccttatccttattttcattaatcaagtaaaatattttcactttatatagtttctttattttatggaagaagatccattgacaggatttatatgtgtagatttcatattttgacaaaaattttaactcatttcggtacaaagtattgatttaaggaccagttagaactcttcaaatacaaatttattctcactgctaatttaaagcagtttttttgttgttctggaacttaattaataatagcttgtttccgtcttctttcgcttaatttagcatcaaggcttttgttcatatttctttttagtttcatgtattcaagtgcttaggattgtctatgatattttctgtggtattgcgtattattgttcatgatgatagttttaatttcacatgaatgtgtaaaatatcaggttcttgagattttggagttgtacagacgcatctacgaagaattcttggctattcctgttgtgaagggcaagaagagtgagatggagaaattcgccggtggactttacaccacaagtgttgaggtgtagtgaaattacttgcttaatccattttctttgcctttgattttacgacacatttatttagtttgaactattgaatgcttatacttgtctgtcttcgtatactaggctttcgttccaaacaccggtcgtggtgtacaaggtgcaacttcacattgccttggtcaaaatttcgccaaaatgtttgagattaactttgaaaatgagaagggggagaaggctatggtctggcagaactcgtgggcctatagtactcgaacggtactctttctatctaacatcttgagaagaatagttccaacattttgaaaattgaccattttaaccttttgtcgatttccaaatatagattggagtaatggtgatggttcatggggacgacaaaggtttggtgttgccaccgaaagttgcatctgtccaagttatcgtagttcccgtgccatataaagatgccgatactcaagggatttatgatgcttgtactgctactgtaaatagcttgaacgaagctggtattcgtgctgaagccgacttccgagacaattactctcctggctggaagtactctcattgggaaatgaagggtgttcctcttaggattgaaataggaccaaaagacttggcaaacagtcaggtaagcgagtttctgttctgttcattaccctctttgatctagttcgggtttgatgttatagaaatgtttcacttaaaattgttgaaatacaggtgcgctgtgtccgccgtgacaatgcatcgaaaaaagatattccaatggcaaacttggtagagggagtaaaagaacttctggacaacattcaacagagcctattcgatgctgcaaaagtaaaacgagatgcgtgtgttcaaattgttaagacttgggaagagtttgtcgatgcactcgccaaaaggaaattgatcttagctccttggtgtgacgaagaggtaattttccttttctcatcgatatttttatggtttcgtgatctaaaagatgttctttgttcttactctataggaagtagaaaaggatgtgaaaacaaagacaaagggtgatatgggagcagccaagactttatgctccccgttcgaacagccagagctcccagaaggtaacccgaccgcgattgaaatctcgattatttaccttactggaatgctgttgttagttctaaatagaaatgatttgtttcgaatgtaggtactttgtgcttcgcctcggggaagccggcgaagaagtggacctattggggaaggagttactaagattatgagatattttagcatttgtttggtatttttgaatgtagctgagcttgttgtattggagtgtgatttgttataggaaaagaggtacttattgacctgaaaaaattgaacaaatcccactactttcaattttcaatctaatttataatttgcttacatttgttcattttacaaaattacataaaagaatgttttgaaggatttgatttgattttcttttattatatagttggatttgtctttccctatgcttagcatatggatatgcatgccttaagtaaattaataattacattacttgcttaatggattgacatggttggatatatatacatctacatatcacaagtgaatgagtattttaagtaaattagtattatgctatgtcatttttgtattagtatattaaatttggtaatctgaatcaattaggaattgctattaaattaccattaattgttatatacttgtaaaattctaaaattataattttagatattataattattattaaaaattaaattattataattattattaaaaattaaatttaagtatttatctgcaatcaaagttaactatgcaatcaaaagttaactagacttagtgtattctttttgtatgatataaaagaaagtagagattacacattatataagtttttacacattttgaaaaaatatgatatttttttagtaaaaaatttattttataagaaaaattaaaaaagttagaaaaaaaaaaagaaagataaggggtaagtaagggtaataaattacccgaaattactttttctatattttcttctttttattttatttctctcataatttttttttttctttttttcttttagaaaaaactatatttttataaacttttgtcaaaaaataaagcgataaaaatgataattccctataaaaaaacaaaaaatagcaaaaaaaaaaaaaaaatatacattaaaataggtatttttaactttatagaaaactacaaatgaaaaaaaaaaaaaaaaaagaagaagaagaaaattacataaagcaatttttttgtaaattttttacattgttcaaagattttttttttaaaaaaatatttttgagatattttataaaaacaacaaaaaaaaactatataaaagtaacaacaaaacaataaaaaaaataatatacaaataataaaaaatcaacaaaaaaataacagaaaggagtacaatataaaaatatataaaaaaatttgtattttatataaataaaatcgtaaaatcgtaaaaatattaaaaacatacttatttttataattttttttattgtttttgtatttttttaaaattatcccaatgtaaaagccttttgggcctacgtagtggtctatatgtagcaagaaaaaagcccaaatggtttggtcaccgccaagagagagaaagagaagagagagaaagagaaaggtgttatgttcaacttcaaacgaactttagtctactcctctctattcagctctccaccgtctccatgcctcaaggtccatactttatccaataaatctatttattttccaataatatttttgggttttcattatcaaattgtgtttgtttgtatacagatcttcccgggttttactatgatgcggagaagaacaggtacttcccttgtaagggtccaatacctggttctgcttctacttcttcttctaaatctgctaccaaaccagtaccaaaggtaaccactaactataactacttttttatctttaataaacttagttattttgttcttcataagcaaacttattgtgaatttgctatgtggggtttgtttgtttgtattgtatttatgtttatctagtcccaattttgttttgattgcaagtattttcaatagttattggtgtgaatttaagtttttctaaaactctattttgctcagtatgtatgaatgagatcattgaggagaggatggtgcttgttagctatggcatatcacattattctcttttgaaattctggatcaattaggtgacagataatgcagcatttcatataatgtgaagagcttattggaaaattaagtcgtttcgattttgtagttttgcctttgtgtgagttttggctgtgcaagtatactagttattacttattaggcctcaaagatgtgacataacgccgaatggtagcaatggatcgatgattcgatggtagaagtcattggttcggattgttggaaagtgaaagtctaatgtctgttggaacttttttctttttgtttttggtagttataggattgtgtaattttatctgggaattgtgctgggttctcctacttattgaatatttggaaccgataagttgacatggggaaaaggcacatgccataagagaaagatagaaattacatggttaaatcacttcttgcttagtttataatcttcactatgaatttaaccaatttttgtagtaaatttattgttttggtaagctatttttgagatatggctttctcttttgtttttgaaaactaatactgtcctcattttattgcaggagataaagtttagtaggaaaaatgaagtgagaacttctaagctgcttcatgttagggagttatttggtaatctcatttcttcaaaaaaaggaaaatgcaactttaaggaggaattcaggaaaactcgagcatcacatcctaaggtatgttagtgttcgaaaagaattctgaattagaagtatttggttaactgattacggaaaaaacaatatcttaaagacgattgcaagaagtgttctgcactttgactgatagtttttgcttcgtcttcacaataagggagtgaaaaatgtttgacgattgcaagttctatactcttagtcatttcactgaacaaccatggaaatttgaaagtcttttttctctgatgaaaataaagagtgtttatatgaatgcgcacaggtttggaaatattttggaacagagaagataggcgattctgctttggaacggataaatgttgatgtgcaattgttagagggtcaaaccaaaacagatgttttattggcaggcgggataaatggatctctaaggtattcatataataggctgttaattatgtctaaaatgcattgaatgctcttagtgtttttgtttcgcaatcagctgtaattgtgcgaaaaattaaaataaaaaactttctccccattggaaatttatgatgattccgaaagtaataactgttaaggttaatattgtagatttgagatgagatcaaggctttacgataaagggtttctgctagtttagcaaaggaactagtacaataaccattgtagcattatttgatgtggtggtagtgaagtgtgaatatgtacattgtttaatatgtgctactaaacgcta

SEQ ID NO: 16724 - DNA, 5549 bp, Cannabis sativa
ggggcattccgagaatcgaactcgggacctctcgcacccaaagcgagaatcataccactagaccaaatgcccacttgaaaattggttgtacaattgttattaatacccaaaagtgaatagttttatgctctaaataaatataaacttatgcgctttgcacttggcattattgagacttatgtataatttgtaacttttggtctccaaactaaagaggcttaggacatctccaatcagatgctttaaatccatttttcaccaacaaaactcaactctaatggatagtcatctttacctttaattaaaaggattttagtgtgcaccttcaataatgacggtatcaaaaattttatcccccaaaatactcttaaatcttaatcattttactcaattgtacaaatatcctcaaataaaatatttctatacattatctattatttttataattataatttaaatttcatattttgattttaatttttcacttcaataatctaaataatacaaaatatacaccaaaaaaacattgttatttgtgtttctaaacaagagacacgtcacataaaataagaaacacagccgtaaataatcactaattaagtccccttaattaggcaaggtcacggagaagctttgcgagtctggaaaaagactaagcccaagggctacacggagacttgccctccagcattctgccatcccggacctacccagaagtgtatcgggttggactcaatccgtccggataaaatagattttttaaattaaacccaattaaaatattcagtcctaattacaataataggtcttgagaatgaagctttcttttttgttttgtcctctctacattataaaagaaaaaatttaagtgtagacactattttgtaaatttctgcgtgtgtgagtataaaagtaaatttccctcttattttaagttgccctggcccactatggtcggtagtgtacaaaattacaaatttaccacataagtggcaacagctaataattagttgtgctgtacctttacaaacttgtacagttggcttacttggttcccttccttctctataggcaaccacatgttattacatgaagaggggtaatttagtcattctaagtatcaaaaaagaaaaaagcgaacgtccaccgcagtcgcaaaaaagttggttacttacttgtcgttctttgaattgggttagtaaccaaataagggaataagggaggtctgagtctctgagagagagagagagagaggcaccgcctttttttaacctcggtgtctccgcctcccatttcacatttctctctctttgcatttttgttcttttttttttggaggtgggatctcattgccccttaaacatcgtcttcatcgtcttcttactcctgatacgatctggtgaagatgtcgacgatttcgaatctcgcgatgtgcggtcacgacgggagctcagtattccgtttttctaacacgttagcgtcttctttcgcccccattaattacagagtttcatggccgattcaggtaatgtttctttctaatttgaattcagatttgaaaccagaaaaataaataacgtttcgtgcaatgcatctgtgtaagttaatggagacattgattaattttggtggcgaatatcttatttacgcttccagaatgaagcgttttgcggttcttgtttgggtcagagacattttaggaggaggattaaaggtcgttgtgttcgcatggcgttagtagacgagaaggttacacgaaccaaagatttgtcaaggccttctgaagttctggtaatgaaaattgctatgattacaacaatttttagacagaggttaggttcgtatttttgactgaacttttgtgatgtttccttttacaggcatacgaactcgtgcagggagcacttgtgagttttagctacttatgtcctctgttgtgtgaatttagtttgattgtgaaatttagagtttgtagccctttactataggcagagtaacgttaattatttctggttaattatcagtaaagaaataaatgcaaccaaagtgcagtcaacaatgtgagtaatttttttttcaatgaatgcaagtgtaactgtgagtataaactattacatatgcaggttagatggagttctgtcatggataagtcgttacctgatccgccaacagctgtttttcttcatggcattttaggcagccgtaagaattggggtacgtgcttcacacttcacacctttaatatttgcctagaagctgaaacatgttatgatactcctcctgaagcacagtatttaaattgcatgtcagatccttgtttcattctttttaattattagttttgtttttaagccgcaaatattagctcttgattagagacttctacttaattttagtgatgtaatatatatattttttttttcattatatgcatttgtattttgaaggtctaaccttcttaatgttgaatccattggtctgttttgactacccatttgctgcatttgaaagtttttgagtttctaagacttattttattttttaaaagaatctagaaaatgtaatgttttcttggctgcctcttcttatgttgtatcttctctgaaggggttgctctagacacgtttttcccatatgggaggcttgagtattttgcatggaattcattttccttatagatttaattttaaagcttacgagtttttttacatgtgttatacaggaacttttgctcgtagattggctcaagagtttccaacatggcaggtatctcttctaaaaaatatctgccttatttgaatttaccatttctagatctaaacattatcaagggaattttttttctggcaccaagtttattaccagtctggtttgtattttgccttcctttttacaaatagggaccactgctgccactttaggatggcccaagtggttagttgtgcagaccaataacatggttaggatagctcaagtggttagttgtgtagaccaataaattaaaaaaaggaccgttgactttatagtaataaatatgtaattaatgtcatcaataacatggtttgttcttttccatttcacttgtctgcttgcataacatggttctatcacagtttaatgcattgcattgagcatttttctggtgttaatcttgttcctctcattttcttttctacagtttctcttagttgacctgcggtgtcatggggattcgacttctacaacaactaggggtccccacactgtagcatccactgcccttgatgtcttaaagcttgtgtgtatattttttgtattgtagtaatatttttcattattcgtcaacttcatgcattgctacctgattttcttaactctacagttatcagaagaactaccatattgcctttttaaattggatttacaacatgcatattgatttctcagtacagcataatttcatttattatgcttgtcataaaccaaattaatactagaatttcctcgtctcattagagaaagactcagtttttctctttcctctatccaggttcgacagttgagaataacacctcgcattcttgttggtcacagtttcggtggaaagggtatgtttctattttgatctttctacttttcatgtttttaacttacacatgtttcctttatagtgcaatgaaagtgcttgtgtctttagtttggtgctgattcttctgcatgttatttcaccttacagttgccttaagcatggtagaacaagccgcaaaacctcttgctagacccgttagagtaagtctctattggtttctatttttgacaaggagtttaacttttatgcaagttcatggagtgaatacatgtgtgaacatagatatacatgccgaaatgatttctatgcatctttagttctgtcaacattggtttgtgttgtgtatctttgtttctaatccaaaaatagacgcttagctaaaatcattttgtcaagaacatgggctttaaatagcggaatctattctgagttctgagttttcatactccagtttttaaatctgaaattttaaatttatgggcgaaaattattttttgaacttttttttatccctttcttcccatattgaaactttagttttaactatttattttttaggtttgggttctagatgctactcctggaaaagttcgacctggtggtaatggggaggaccatccagaagagctaatatcattccttaaaacactcccagaagaggtatttgctcagtcaactctttaaccttttgtactttacaattattagttttctttttttatgatttggaaaatgctatttcctctgatttgcattgcaaatatattgttgaaactttgactaaatcttagcatttcaattccttggttctgctgatactattttggtttgttttctacatattatgtatcgtatttatcattcttatttatctcttttctttgtgggcatgattttaatatgggaacttttttctcaaggaaggtctcttcaaagcgggatattattaatgcgttaatccaagaaggattttccaaagatgtggcacaggtacactttaaaccttttatgactgttgagacctgagtatctttaatttttgtttctgaaacttcttattataagagtggttaaatcttttactttttgacatgggcaaacatatttttaagagtggttagctttctttcaaggacagttatagttattgtaaatgtggcaactttactatttcgtgttcatgacgggcgtttatagttgtgccatctacatatatttacatttaacctttttagattttatagcagtattatactgaaacaagaagcagcataaacgtgggttttctatctattctactgagcctataaaatataataattcatgcagtgggtggtcactaatcttcgtccaactggttctcctggttctacaccatccggcttctcatggatctttgatctgaagggaattgctgaaatgtatcaatcttacgaggagacgaatttatggtattgagctagttttattaaagcaaatactgtattaaatatagttgcttaataccatttacaccttttaagtgcctcaagattaagaaacactggttgccttctgtacaaaaaatggctaagaagatgtttgttttttgtttgtttgtatcttgaagcaggaagtgtctctttggtctttcaccgcatcttagaaaccatttaattttaagttttaagttgtcgttccttttttttctttttcctttttaattcttttcttcctttctttccaggaaagtagttgaagatgtccctcgaggtgtgcacgtgaactttctgaaagcggaaagaagtttacacaggtgggcccttgaagatattcaaagaatacatgctgctgaggaggttgcttctgaagagggaggtggcgttgaaatgcatgtacttgaggatgctggccattgggtatgttaatgatatataaaatatgcccatcttaaaactataggaaaaatatgccttcccgacaatgttaaacaaagttgcct

SEQ ID NO: 16725 - DNA, 9322 bp, Cannabis sativa
taataacttttgcaaaacataaaatctaaaatagtatttaatacaaatagaatgtcatatcggtcatgcacacaagaaaaaaatgaggacctttagtttgtaagcgtaggaactttttactaagtacgtttttctaaataatttaaaatatatatattgtgaattaaattcacattaatcttgttgttataatcaataattgcttataagaatcaaacattcaaatattcaaattgttaaataaacctctatataatctcaattatatacaaaaacaaaaattacatacccttcgatcgggctaaacaaaaaagagactctaataaacaaagactcaaaatagaaataagttccaatcttttaccaaaattacagattacatcaagaaaaaagatgacaactgacaacaaagactttaactacctaatttattcctatagcctataaaactcatattaaagtttgagttgcttggacttatgtcctgatacgccggtaaaataaataaagattgaacaattacatatatacttgaatgttaattattattatttaatatttaataattaatatataaataaaaaaatatatatatttatacatgaggttgtaatatgtattgtatgaaaaattaagatcacttagtcatgaataaaacaatcagtagttattatcggaggaatttaggcaacaccaaatagtgtaattattcgtgaaaatcaagaaaattcaccagcggttatgcaagtactcaaagcttgggctacaaaatagaaaaataaagaagagaagagaattatagtagttcaatcaaacctcgattttcttagtccactattggtaattatttttagcttaatttatttaatgtagatcacctctttttatagaaagcaggtgccctttcggatttcataacttattagataggaccactattataataaattagagaattgaattaagagaaacatttaaaaaaataaatgaagaacaattttgtctgttctttgtttaattgtagcaacacatgcgacttgagaagtcgccgattgtccattcgtattccaaacacatgagctcacaagctctatagtgttatatgagcaaaataaacctttgagcctatatttgttggatgtctacagtcccttgatcgcgtattcattcattctatgcattgacaacttatagaacatctgagttctcagcaagttgtccatcacaatagttatttagactgaacctatgtaaagaagcgaccgttccttatcgcatgagagatatacttgataatcgcatataattattatatgcacgaccagtattaatttctccttatcatgcttatccttttactatgttgggcatagtatgcagctagaccctatcacggttgcaccctcttgcaagtttgacttatgcgaggatgattctatgagaataatattattgacatgtctttattttcctatgggaaataggtgcatgtgtcaactattcatgagactggactcgttttctaggtaaaaaatttacactataacccatgtccctagtttcacgatgacaaatgtttttgaaatagcaaagttattcttaatgaacaggtgacttgctttgtcacactgcagtggctcttggttgtcttgtcgatggttttgaatagacagtcataattattgtcttccattctactagatgccacatcacaaaacccttcagggtttgtgcaggtatggcttagggcgacggtcagattaaaggaccatttatctttgataaacacatgtcatgatctcaacgggtgactttgaccactatttaaccccctttttgtatgaaatgaaaaatctttcatcttccctctcattctcaagctctttaatctccttttcttttaaagaatcaaaatttttcttccagttcagaagcttgcaatctattggaagttagcacaaagaacatttctctatttaattttttggaatcatgtctataatctccctcaaaaactaaaggttattctttttgagagaatcttggttaatttgaggtttaattgttaatattcgcttaccttcaaggtttttagggtaaatatatatatgaagacgataggctaggttctggatagtaagattctagaaaaataggccagaaagggtttttttttttttttttgcctaagggttcaatactcacacttttaaagaatcaaaatttttcttccagttcaaaagcttacaatctctcccaccacaaatcttgaatattcgcatctttcagctacaatacattgaatgctcgcacatgtatgtaggttttcacatggaacatgaagaacagtacgaatactcacgattttcttgatatcttattttcctaatttacgattattggattatatgtgtaaggacactcctcttgaaattacacgcacaatacattgaaaagatcttctatctttcagatgagcgatctttcggacaaccaaatttttgagcgtgatggaggagtgttgcggatgatcctcaaaagagcaagaacttcattccaacgtaatttttaaatgatgaagttccaactgaagtggactcataagcttcttggtctactagcaatatagcttgcatggttaaagaactagaagaaccagtagctgtggaagtgcgggggagcgagttccgtgtgtttgctcaagggagctttactaatttaagggtttttccaaacaatgtagtcgagaaaatggggcaagactttgagttacatgctcacggagatgataaagaagatgatgacgaggctgaggtttccattgaggacgcacctttagatgagccatttgcctacaaggatcttgatctgatgacattctagaggttaaaatttatgaaaactagttgtacaaagccaatgatgaggtagcgaccacacttttctttcacaaacccagcgattatcccgactaacatcactgttatttcaaatcccgttatatgttgtggagtcactgttctattccatcctttttcaaaaatattttgacaaattatgaaatttctctgttccagctaatccttgacagctgtagaatcatcctcgaattctatgcaaagtatatggagtacacgcaaggggaacctactattgaggacatatgctacttctatgatatcaagaatgttggctacgaaaattgcttctgctgcgttagcaagtgggtcaacttggaggtcaacgaacttaaaggtatagtttcaaatatgggagattggaagtcgaattgctttttcgtgtttacactgctcgtaataaggatagacgttaactaccgccctcatacgtcgtatattttaatacttttattatttttttgttttaatctttaggaataatgaccttttccatgtaatcacagggaggccagctcgatcaaagcttaccagggatcatttagaaatcatagatgtcttaagaagtcttctaatcagagatcgttattgtgcattctttgtacctcaaaaaaacactgagaaaatggattgatttgagccgacgctaaactagagtgagagcacatatacaaggagcctttctataagcaaaatgtaaggattgaaaaattcctttccaacaaaacctaaaataacctgcaagtaatatgcccctagtatactgttgaaaataaactatttttttgtgttgacctcacttctatccaatgacagtgagtctaaattaaagtgaatagataaaataatttataaaacacaaagacagtaaataaagaaaacaccagagtttctagaggtttgattccttgataatggtaatagcctactcacctttaggttgtattaacttatgacacaaagaacaaagtattctctctctaaagctcttacaatggatctttgagtaattctctcatagatcactatttcttcttgagtgttctctctaattcaatttgtctcccccaacagtgagatgagaccaccagttttaggggctcattacatatgaatagtttccattaatctataacacaaaaaagtaggaaactaatatgtttccataattacaacacaggaattgggcaagttcaagctgattacccttattctttgaagatatgagtcaatcccacaaaagtagggattattttgtgtcatgtaagcatggatatatcatcaatcactgctaaaattgccaactcacataacctggcaggttcatgcgagttgatcacacgatcgagctagtcggatgtccttcagtgactttgaccagacatcctgcaatgtatgtaaaacttgaaccttcatatcaatccttgtcggctgctaagagtgaaaccatccgcccatgttgtaggccacgttgtccagctagatgccatatcatagtgcgaaaataggataacattttcccccaagtctgtgcaaaaccatcttggttacacgtggacttttcattcagcttggaaacttgtcctaatgggcgatgcagttgttcttcaaatcacgctgtgacggttaaggagtgcagcatgtgtgatgtctatccttcataatgagtacttttaatgtacagtttttgtggggaaaacccaaatttggaattacattactcttttaggtgcctataaaagcggtttaatcctttgtgggaaccttttttagccattttgattctcaaagaatcagagaaaaaaaatcttcatattctctctcaaatattcaaagaaggttgttggggaatccattgacactaccctctaagaaaatcgagaaagctacaaacagcgagtaagttacttatcccttgaattcatacaatttcctttaatatatgcatcattttctatatttcttgccacaagtttatccgttcttgaagtgttcttgactgatcgtagaatagatgttattagggcttgtaactttaaataacatttaactgagacttctaattctctaattgtatattgattttgacctgaaatcattcatttccactcgttcacgagattataagtatttctaggtccctctcgaggttttgaacttttgggtttgggaattgcatttttgagtgaaaccctttatttttgtccttaatctggcctggtctgcatacaaaaaatgtttttcatcttttccttcttccaactctcattttcttgtctcccatattttgaagatgaaccctagtgatttctagggaggcaaatacaacatcgatcaggatttactccaactcttatacgaagatcatcctcgactccgtgcaagtttatatttgtctagtgacaatctctcaaattttagtttggaagattgggagataagtagtgaacacacattgtctccgaaactcgagatgaaacatcactggtacccccgaccaaatacatggagaagggtacggacacttcatctggaagttgaagaaaggttggaggcattacttgcctgcttattggatgcacatagtctagcacgaggttgttgacactctgcctaaagcccgcccaaccgcatctactaagggaaatgccattactgaatttgttgtaatcgttgcttggcatacaactaaacttaaatctccaccaaatcatagaatgatggcacagacaaagcaaactatgaggaaagcttcaaagagcgacccacactttacaaggttgtttgttacaattggagtggaacatgccctacatgcgatcgaagcatgagagattcttgaaggtgactttgaagtccaagaagttaaggaccagggagagctctgtcctgctactcctcctgaggtcgagggagaaaaggaagaggaagaggaagaggcacccttggaagctagtagggactacattgagaatgaatacatagaagcccgtcctataaacaatagtagtaaaagaagtgctcagtgggtctcgccatctgtcttgatagttaagagattgactaatctcaaagaagagggtcttctaggaaaggttgaggctttcctcccttctcccaggcagctggccacagatcttagagatggcttttgtgtgtggttgggacctcatattaagtagggtacaatgctacagttacatccataattttaaggaaattgaaacatactatcacattattctgacccagctcactcccaagggcataaagtatttgtttgccctattcgtgttgtatgcttcctaaggatggggtcagtcattcacccacgacaccaactggctatttgacttgaagtccagtcccaagcaaaatagttttcggtatttctacttctcctagatcgaagaaaaatggttgagtggcaccatggatactgacgtgtccaaaattcatggctacgttgaggactattactttgtcaagggcatggggaccaatcataccagttttcaacacatcccttcattctgtcgacgtccttttaccttgtaacttatggagagagctctaaagatactctaactttcttccaaggctaaaaatatctcacttttggctactgaggccaattttattaagtatgagctttaccaatctgatgatgtttaagggatggatcaagttatagatggggttgtgtccgatcaggatggggaggttgtacccaagcaaaacacaccatggacgaagaaacagaagaaggctccccaaggtgaccaagtacctattgagtggcctatcaagattagagatggtcctaaagaggctactcatccttctgtcaaggtggaggaaaagggaaaggctgttgtggtcgagtagaaagaagaggactcttctgatgaggaatctccttctttacttgtttgggagggtgatcctgtacatgtacagggtagatcattttttcttagctttatttatccttacttgatttatgcttttctaacatatacttcctttgtttgtgtgcaattatgtctaaaatgatgttgtgcgcactgaagaagaggtcaggtgatacctccagttagaagtctctaacaaagagtcctaaggtggactacacactattaaaaagcattgtttcaagaactaagatgcctcgagcgactgtttagaggagttatacttctacttccttggatgctcctgaggtagtagtccttcattctatccatttggccaagaaaaactacaaaacatcaagctgcaactgctccatccaagggttctaaagggatgaccattgaagggcccaaactacccaagccttaagccactcctcccatacaaaatccagagacgatgaagggaaatgagatgctcacattctactaagacattgtgttgcctgaattaaatgattaattggttaggggagaagatatgtgtgtggagctgatcatgggtggcttactgaaggaggtcacatgagtaagtatctttccttttgtttcctcacatagcctttaaaccatttaggctttaatcttattcaattgtatagctcaatctgaagatggcatacacttactcacatgccatatttgtagccttgaaaattacaaccaccaccaacaatttgaagaaagagatggaggaggccaagaaggaaaacgagctaaagagtcttcaattagaaaagttaataagcaactccttgctgataacaagcttattgaagacttgaggaaggagatcagtcacatgccacccacaactcaacttgaggcacacaatgagtctttagaaaaggaagggaactctcttaaatatgagagggaaaacccacacactcttctcagaattctagagactatggtcaacgatctgattggggagaagaggggcttgtaggagtcccttgattctgagcaaatatcttctagtgttgaactaatgattcttcaaaagggggtggatagtttctagtcagctgctttagacatcttctatgagttctggaaggccaatctagatgctaactttgattacctcaatgagaaaaaggaggcttatcttggtttttgcgaggcctagaaggctaaaaaagatgctgaagcagctaacaacaacctttccactgaccaagactgaaaacctcattgctaaagactcaaccaaccagtgtaaggaacctaggactccagaagtttgatgttttaaaacatttttcaccaattcagcggacgggcctattttcaagtacaacatggccgatcaagtggcttttaaacttggaaaattacattttattttatgataactggctggccaagtagcttttaatcttggtattatcatgctttgctatcttaaaatgaatattttctcttaagttcaaatgattgcatatgtatataatgttttttttttgtttgttatttaccccatgctttgtacaggtatatagttgcccccaaggaaacgagtagatttatgactattcgtcacttgtatttcacaagctcaattttgtttctctctactaggtttaggcaaaccctttgtacacattttttttggtaactacataacttgctatacaaataagataaaatagacacaattagaatgataattaaaatatttattcatttattagtctatatgtgtcgtagtaacgtacatttattaaattataaaagctattaaatgatctaactaatatttagttgactaaaacataaaacagtttaacgctatactccgcccattagatattgctcaagagcaatgatttttgaacatattgtactttggaggtggtcatccggcctaagtaccagtcatttttctaaacccttgagcgaggtctactagaaaggccacctacttaagagtaagtgtttgagcattgtgcacttattgggatcatcggaccttccacacttattggtagtactttcttacttgttcaccattatgataccttggcactagaactagtttcatgttttcatcgtatcgattaagtttgtatgctctagagtttgtaccttcaattacttgatatggtccttaccaattaagtccgagcacactagctgcactgtcttttgtgtttaggaatactgttctaagtaccatatctcgcacaaaagatttccttgccctcacttgcatgttgaagtactgagctacgtttttcttatgacccagtagctttaggtttgcagaagctcttctcctcaattttatcaagtgattctgccttgagggcatggttagtctcctagtcataagttaatcttcggtgagatgggggttctaattccacgggcaccgtttcttgataaccataagccatggcaaaaggtgtcggcccggttgtt

SEQ ID NO: 16726 - DNA, 3630 bp, Cannabis sativa
ctcagtactactccacaactatatctaacaccattaataagcagaagataacggaatacattcagataaagtagactaaagaaagaaagagagaaagaaagaaattaagaaaatggaggtccatcttggagactcgttaacaagctttcaagaacaccacacttctgattctattccagatctctttgcctctgaagctgatcatatgccttcaagaaactttttcactcgcttaaaaaacagagatttctacgttccttttagaagtgaggcaatttctcatattttacaggtaattaattaaattataagtttttatagctagctatactttctctacattttcctatttactttcttgtaatgtagttgggtttggtagatttacttgtttggttttataaaagcaatacaaattaacttgatttttaattttttacttatcaggcgcagttctcctgtaacttagaccccttcatatcctaccttgctatcaattacatggatcggtatgtctctaagcaagaaattccggtaattctctcagaactcatcagttataattttctgagcaatcaaacagaccatttttttttttgtttatcaccctgtacctgatgatagatcattcatattatgtagcaaggaaagccctggatttcaagactaatggtaattggttgcctctctctagcttcaaagatgaagaactcgccattctcaatatctgatatttatgtaagtaaatattgaatctttccatagttaaacataacactcaccgtgctcttaaaacataagtaattactaattactatgacatgtaacagagagaagagggtcttgtgtttgacgctcaaacagttcacaaaatggagctgttgattcttgatactctgagttggcgaatgagatccataacacctttctcatttttctccttctttatctcctttattgaaattaatgacccattgacacaagctctcaaagaccgagcttcagacatcatcttctgctcccaaaatggtactactttttcacattaactctttttttgctttgttttctacttcctttgaggcaatcttataatgttttttttttcttggtgaaagacattaagttcttagattataaaccgtcaataattgcggcatcagcgctcctctttgcaactcatgagctattcatacagcaatttgcttctttcaaggcttctctcttaaactgtcaacacattaaaagtgtaagtaaccaagaatggaagccgttaatttacgtttgatttcttatgttgtatgttccttgctatattagagcggtttacaatgcaggagaatttattgaaatgctataatatgatgcaagaaatggtgttgatgcaagggtacgggtcgaatttagacacatcatcaagcacaagaacaccaatgagtgtgcttgaacgtgaaatcaccaactcagatggcgaaaactccatgtccatgtccatagctactgctactactgctactacctcctcggctcaaatatgtgtcacgtcatcaatggtagacaaggatgacaacaagagacgaaaattgaatggtgtgtgtaataataacaataataataatagtaggtttcagctttctcagtttcatcactactgagtactgattattagaaccaaacaaggaaactggtccatgtctagtgacaattgtctcctgtgatgttcgactttttgggctctgatttgaagcattaggcgttgtaaggggtcaggctcaagtctgtttcactttcctctgtctctgtctctctttcttcacaccctgttaaaaagagtaaagtactgggaaattatttagaacaaaataaaaatttggttagtaggatgtggtgatgacataaaaacagggttttgtttactttgatgattttaagtacattttaattttgaatacaacgcttgtcctcttgtttttttctttcctttgcctagtttggatgctgttttaatatagagacactttgaagtttgaattattttttaataattatatatcatgttattttatgttcaaaatcacccttcattgtcaatttcactcttgtattctgtgacactaatttgttacctgtactttaaattaaagactaatcgaattggaagaaaaatgaataagagaagaacctgcactatttaaaccaaaaatatatatttatttaattaggtttactagttaatttgtttgctgcttcatgaaatgtctagagaccttcttgccacttggacccatccaacccacactgtcgaggaacgacggtttggttgtttcattggctttcattgttgagtcgctcacaaaatacaggtcatttcacgtgactgagtcattggctatatttattgctttagttttactggttgggttgagattgagtttttgacttaaggggcatggggatgttgattttaattatgggttttgacgtaatttgtggtggcaatttaaaatttccctaacggatttataaggtgtgtttgtatttggtattttccaacgatgtattagcttaatttgaagcatgtcccagatcagtgataatgtcctctttatttgagtggtgtatgactatagtttggagtttcattctctatccgtttgatgtccaatgtatagtcaacattaatatgggtattggtgaagttgatgtcgttggggacatttttttttgtttggtcccaacaagtcagtcacgaatttagaattttcattctaattgttatgtaaaagtatttaggtctactttatatgatttattgagttttgtaggggctaaaaaaattaaaagaaaaatatttaatgtttttagtgtattttttttattggcttatcaagtgaatctgtcgttacaataggtgagagctcaagtggttaaggaacataaaggtccggtagcaatgatttgttgggctatttggtatgctcgaaatgaatttatatggaataaagaacctagtgtaagtaatgtggttctcaataaaattgtatcttgaacaatagaagaatacttagatgaaggatgactatgcaccattacaagtggtatggtaccaaggtttgtgtaaagtctctaagagatggagattaagataaatgttaattctgttgtgttcactgtcactcatcaatttgggatcggtttggtagctcatgatcatttggtgaagcccgtaccattatttgtgttgatgatgtggaacttgacttatagctaaagttttaggcatttgagaggcacttagttggatcaaggacaaagaatggtcattggtggaacctaagtctattgtttagtgacagttgaggccattcttgatcacttaatcatgaatactccttttggtttcgttgttaacaattgctgacatttgattagttgtttaaccggagtctcttttttgttcgtttatcattctattattaacaaagtgactcataattttgctagatcttcctattatttttcatatcgaattctcaattggagtaatgttcctactaagtttatgtctatgttattaggcgattcgtcttttcatgaaattctatttcctttagaaaaaaaaaaaaaaaa

SEQ ID NO: 16727 - DNA, 4607 bp, Cannabis sativa
gtcatttgttacttcaagatcataatatacatgtcaaattgaacgaagaaataatcattacaatttacaagtggtattgaatgttatgtaattttacacattgtaataataatatttaagggaatatgtatactttctcatcaaaaaaatgtacattgtacattttataccatatacaaattttattgttaattccttctattttagctaaaactaaaaataagaagaagatgcttttaacaacagtaagtttcaatcacggcattagacttgtaagtttacttcacttcccgcttctattctcttcctcctcatttcgaccttttctagtcggagcaacctcattccgatcatccatggcggcaccggcgatgccaactcctcccgcggccaagaaggtggagcacaaaatggagttgtttggcgatgttcgaatcgacaactattactggcttcgagatgattctcgttccaatcctgaagttctctcctacctccggcaagaaaattcttacaccgaatccgtaatgtctggtaaaattttaactcgttaatatattctcgaattttatcataatgcgtggttgattcattgattgtttttaataggtacgaaaaatttggaatcggagctgtttgcggaaattagggcacggatcaaggaagacgatgtgacggcgccactgcgaaagggaccatactactattacgagaggacctcagaagggaaggagtacgttcagcattgtcgtcggcctctgccacattctcaagctcaggttcctccttcggtcaacgatgtgatgcctactggggacgatagtcttgaacatgtaatcttagatgagaatgttaaggctcaagaacatgaatattactccattggtgcttttaaggttagtcccaatcacaaattggttgcttatgcggaagatacgaaaggagatgagatatatacagtgcacgttattgatgctgagactggagctttggtgggaaagaatctgactggtacgacatcgtacattgaatgggctggtgattcggctctggtgtatatcaccatggatgcgattcttcgtccagataaggtttgtttaaagaaatcttgctgtgatagttctttaattgaataaaagtaaaacattcggctctgcggaagtatctgtctgcttatagtccaagcactgtcttttattttatcttcaatcataaacgctgtataatcagtaaaatgatgattattaagataatatttgaattgaccagaaaattagtgcggtaggattttcattttgaacattatttcatatgttttatttatttagcttacagtttagggaatgctttttcctcttcttttctatttttttgtaggtgtggttgcataagttgggcacagaacagtcaaatgacaagttactttatcatgagaaggatgaaactttctcggttgatcttcaagcttctgagagcaagaaatttttgtttgttgcatctgagagtaaaacaacaaggttcaacttttaccttgatgtttcaaagcctgaagatgggttggtggttttgacacctcgtgtagatggcattgatacttctgtcagccatcgagggaatcatttttttattactaggcgaagtgaagaattattcaattctgaattagttgcttgtccactggataacgtatctgagacaacacttcttattccccatagagaaaggtaatgcttcttttcctatgtcaaaatacatttaatgacctaagggatgaccttatgttaatccaaacagatgtttcagtttaggaattaggataagcgatttgttttgttctgtagtacataaatggaatttttatttagatttttgtaaattatggtttagtgagttatattgatagctttctgtaaatgcagctatgaactgattaccctaattgattatttattctttattttctgctcatgttcaaatgttcacgtatgcaatgagtttggtgatcactatctctttacatttttagtgtgtatgttctttttactgtttaaatggatactttctcaattttttcctttttcagtgtaaaaattcaggatgtacaactttatagtgaccacctcgttatatgtgagcgtgaggatggtctaccaaagataactatttatggtcttcctaatgttggagagccacttaatggacttcagggtggccgagctgttgattttttggatcctacatactcagcatatcctacagaatcagaattttcttccagcattttaagattctcctatagctcaatgaagacacctccatcagtttatgattatgacatgaagacaggcatttctgttttgaaaaagattgaacctgtaagtcatattaacatgtttccaaaatttacatttgtgttttttgagacatgacttagatgatgacacttttatcgtttttggcatatttgcaagaatagtggaacatttaaaaaaacgaaaaaaaaaacagaaagaaagaacataatttcttctctgttaagatcactgtttctagttactataaacacacacacatgagcattcacatatgcacacatatagataggaaaaagtatatatgacataaagaaaaaatatcctcttactctttataatctagttatggcttttgtacaattttaaacccttgttacaatggaaatgagtgtaattttgtttgttttctttccttcttgttgagcaacacttctattgatagggcacacacctgcttggtaagagtaaaccgttattttctttatattttccaaggtgtgagattctcatagcatactggccttttttaccccccctcacactcacatctcctttaaattcagcactaaatgagataaggaagctcactgaaaatttctcgaaaaaagttgcatattatctattgtggagaagagagcaagaattttatcccaaaataacaggcattagaatgaactacggtgttatacttcaaaacaagaacagaattttttcaagagttaaaaatgtgttactttcttgaacattttgaaaaatttaatatcagaatactgtttaactttatagtttggaaccatcaaaatatttggatagtattttgccctacctataagattcattttcttttgagagcttcttttggatagtatttgctctttaggcattttcttttggatagtaagattcatttgacttactgggagttaggcatttaattcgagctctttaggtgtttgaacaactggagtcttgtcttagatcacaacccatttcatacaagatagctgaattcttaaccaaggataattgatgaccgtacataagtacacatttttcaagattccagtatgggactttttcttatggcattcttactttgccattatgccattttgattcttcaagtcctgactctcaccagatgaattttagattgaggctgatctagaaaaagtgattataaaacttgagtatggaatttgtttttatatttttttggtcaaatttttttatatggatggaaagcacattgaggatgtcaaattcgaattttcaaagggtctgataggatattatgagctcttgtaatacttggattttgcaattaggtcaaattcgcatttgtgattagtctgataggatatgagcttttatagtacttggattttttttctttctttttgcagttacttttacatttgtgagtagtctgataggatatactacatagaattggttacaaataaatcatcgtcttctatggaaatgttttgacatcaatatttcatctcttttccttttactgaaatatttaaataataattatttttctctgcagtttgattttcatggttgtaacctttaaccactgttattttggtgaaattacatttgttaaatttatctactttttgtaaaggttttgggtggttttgatgcgtcgcgatatgtgactgagaggaaatgggccagtgctccagatggcactcagattccaatgtctattgtctatcggaaagatttggtgaaacttgatgggtcggattctttactactctatggctatggttcttatgaggtaatataataagttacgtattgaattgtgtattcacattatagagaatctgtttcatcatatttgttttttttttcatataatcattcttgttatgtttgaatggattttgtttcttgaaaacatttcacattaacttatgaaactttctcgacacatttgtagaacatgtgatctcctcgtagaatattatgcttttgaatttgatactgtagttttatctaaatgggctgtagttaggtttttgttcagtgctgttaagttatacgaacgttagtcaaaattgaagcttggctgtctggtttctttcttgtgtatgattttaattattttatccatctctctcttttttttaaccttcaaatgtttcttgtaatttattagttacagttagctagtgctgtcaatttaatgtttgttggtatatatatttattagtgtaatcttcttagtcatgcactcgcaaaaattgatgggaaggcaatgtttttcat

SEQ ID NO: 16728 - DNA, 1537 bp, Cannabis sativa
ttgtatcacactttataatagactttataatagcatatacattatacatatgtgcccacaaaggatttttaatccaacattgatcagataaaatcgtttagaattaatatatgtatccaatttaatatgacagtacatttattaatttgacaaacatataataatcacaacttattaattttgttacaacataatttatttggcaatattttgataaatttatataatatttgatgtattatgtatacttaacttggagctgagtttgtggggacattcatactagtattctcggcagccgggggaccattgcttaataacaagtacaataatggggtggaaacattgatgggcaacgtggcctgcgcagggctggccgcgatggtggcgatcttcgccataggccacatttcgggcgcacacataaatccagcggtgactattgccttcgctgcattgaggcacttcccttgggcccatgttcctgcctacataatagtccaggtttcgggttctatatcggcctcttttgctctcaaggccgtgtttcatccctttatgtccggtggtgttacggtgcctagccctggaattagcaatgcccaagttttcatgcttgaattcattgtcacattctttcttatgtttatcatcacttcagtggccacagatactcgcgctgtacgtactcatattaatgatttttaaaataaaaaatacaaatttgtattttcttgattacattaattaggttttgttatgatatgaatgaaataattaaattaataataattggtaacaggtaggggagttagcaggtatagcgattggagctacaattctacttgatgtacttcttgcagggtttgtatttttattttatgtacttttattcctatttttcttttgcctattaaggtttttttttttacaaaatattattatatatttatgatcagtgtttaattaagtcaaattagaaagaaagaaaagactattatgaggtgtttggtaagagggttgggttttggggaatgagaatttaaaaccaaataatataaagggggttccatttttaagcttttttttttttttagcaattgcggtgaaacgcttttatgttttaatttttatacacctaattttcttatttatttttatagtaaaatccctggctcttaagtttttttgggcaaatttgacacgtcagttaaatattaccgttaaatattaactggataaccacggtatatacttgtgtatatgtaacagtaaaatctcgaaatcgatacagtagtaatctaattagtatttaacggtaatatctaattaaaatcttaaatttgcaaaaaaaacaaaaagtaaacttgagggaatttagccactaaaaaaataagaaagttaagtgtttaaaaattaaaacataagagagtttcgccgcaaatttttttttgtttgggtaattaatctttaaactctttaaatacttgagtttgatatttaatttcaacccctctcaactaaaaactcacgaagt

SEQ ID NO: 16729 - DNA, 3784 bp, Cannabis sativa
actcgaccccaacaccaactatgggtcgggttggggtctaggttccagttcgggtcctaggtctcgtgtctaggtcccgggtcccgtgtttgggtctgggtctagatccaagttcgggtctggttcttgggtctaggtccaggtctaggtgcggtacctagttccaagttcggatctagctaggttcgggtcggggtctaggtttgggtccaggtcttgggttcgagtttgggccgcgaattcgggtcccgagtctaggtccgatcctaggtttgggtctcacgttcgggtctggccccgagtttgggtctcgggtccaagttctgggcccaggtttaggtctcaggtctcaagtctgggtttgggtcttggttcggtccagggttcgggtctcgggtccaatcttgggtttgggtctcgatttcgggtcctaggcctaacttttggtctcaggtccaggtttggatccgggtcccagtctcgggccccgtgtccaagtccaggtttgagttcgggtttggctttggatctgggccccgggtctgggtctcggatctcgattcgggtcttggatccgggtctaagtccaggtcccaggtcttgggtcccgagttcggaacttggtttgggtccaggttcgagtctatataggttcaggttcaagtcccgggtctgggtctgagctcaggtccggatctgagtcccaagtccgggtccaggtcttggatccaagtttggtgttatatatatgtatatatatgtttcattatcaaatgtgtggcaactagtaaagtatcaaacatataaatatgtaattgaatagtatttaagaaacttatgtgtatatattgaatattcttacatgcaaaaaggaatagtgagtttttataatgcactcttaaaaataggtgtactattgtatctttttctgttttggtaattagaaaaaaaacatagtctaatttgattttatggacttgtatgtttaagataatttataataatttatgatatagaaagtaatgtttaaataatttaattcatacacatataaaataaaataaaataaaaaatattatgcttgtaatatattatttgtatcttaatattttcaacatgttaaatttttcgaaattttaaaaaatatcttaataaattattacatgtacgataaataaaaaaaaataaactgaaatcagaatgaaaattttccaaaatcatatgtatatataatgtatatttaatattagaacatcaaactagtggaggaaagttattagtagtgtatagtacaaatgttggtcataaaattgaataagggatcttaaaatggataaacaagttgaacacatgtgcatggggatcttgaggggctccatcaataaaaagtctatttcaacttctatactatgccctctcttttgggctctctcaatacctcaaataattcttgtacaatattataaataatatatataacttattatacaaccaattaagtaggctccatgcatttaccaaacacaacaacttgcaattttatatgaatatatagacaccatgttgttataaatatatagatgtactatatatatcatgtgctcaaggggtccaatagttttaagcttcgatacccaattggacaaaaaagacttctcacgttaaagcaaactgattatatatatacctatagctactagctagggcaagactaagacaattatatatagttaaagaaaaaacaatattcctaaagggttagtgtttgtcaacatcttaatagttttaagtaattttatttgattatttatggtctctttcatcgtattaacctcaattagggaaataataaaaagtgggattccattaaagtttttctcacaatattacaataaaaatatataaatatgtatatatatatatatttatatatcatacatattgggtttgatcttgtttgatttacttttaagccaagttgatcgtccattaatttgagaataatcatgaaataataaaaagggtttgtactttttaccaaattgttaatatttgctgtagtgtgattattccatgataataataaaaatttatttatatcaaatgaaactaaaaaaaaatacattataaatattataattgataaagagacgaggctgtgaaaatgactatactgctggaaaataaaaataaaaaacaaataatatataaacgacttacatgtgattgataagattattcaagatcattaaaaattagaacgttgaatagttcaattttcaaaccctagctatattcaaaattaaatacaaagaatgttgatcattgaatagtaaacttattatcaagtttgcacttttctatttcttttatcttctatttatttaactatattttcttaatttattatttcaaaaggaaaaatgaaagtaattataaggctatagttgatcaaataatggtctcaacaaatttgataataggggttcttttcacgtatattgactagtcaaataatatatttttgttcttttatttggaacaacaaatgaatatgaaattatatatagttagataaagatacataaacatatgacacttacaatatatggttaaaataatgttattatactaaaatgtccattgttgaaaatattagttacaaataacaattgtgtaactaaacatcttcttagttacaattaattgtaattaattaaaattaaatttatgataactacttgggccacagtaagtacttgggctgccgagtactgttggcaggaataataatgtcattttcggttatttaaaagacaaagtgcagaagcggatccagtcttgggacaataacttcctatctcgtgcaagaaaggaagttcttattaaatcaattgttcaatcattttcggcctatacaatgaatgtgtttcttattcttgtagggatttgtcaggacattgagagaaccattgccaagttttggtggaggtcgaacaagaataaagacatacactgactaagctgggacaagctcatgaaacacaagagcaagggtggcatgggatttcgagatttaagggacttcaatttagctctactagctaagcaagggtggaggcttttgacttgtggtgatagcttgatggggaaaattttcaaagctagatacttttcttcagggtcttttcttacatcgacgttggggagtaacccaagttatatttggagatgtgtgtttgaggctaaggagttagtttgggctggggttcggagatttgtgggtgatggttctaccatcaatattctatctgagccttagcttcctgatgagatgaaccctttcattgaatctgtctatccatgattggtggggaaggctgttgactctttaatgaaagttggtctggttgaatgggatggggaagttatagctgatgtgcttaatgatagagagtaagctttggtgtggaaaattccactcagtagtcatgtgagtactgatttgtggtattggttacatgatacttcaggtgttttctctgttaagagtgcatattccctgcttcaatcaatgaaaaccaacagggatattccagataactctggtttctggcggctcttatggcagttacagctccctccgaaggttctcaattttttgtggagagcttctacgaacagtctcccaactcggtttcatctttccacaaaacatgttctaattgctgcaacatgtccattttgtcttgctgctcttgagacgactctgcatgttctggtg

SEQ ID NO: 16730 - DNA, 5600 bp, Cannabis sativa
  modified_base (31)..(41): a, c, t, g, unknown or other
  modified_base (95)..(113): a, c, t, g, unknown or other
  modified_base (5527)..(5532): a, c, t, g, unknown or other
aaaaaaaataaaaaataacatacaaataacnnnnnnnnnnnaacaaattaacaagaatacaacataaaaagatcatattttctgtaaataaaatnnnnnnnnnnnnnnnnnnntttaaaattccgtgaaatcgtattcttgtaattttgatgttgtttttgtgtatttgtaaaagaatccctttttataatagttaaactatatataggagccccaaaatttaatttcgccttaggccccatataccttaggaccggccctgttcgtaccgacagacaatatttttgattacaaaatctaaggctttcttggccgttatggatttcattagctctgcttctgtccacttcatgaaataatccacgacaactattgcatactttactctgccttttcctattggtagagatcctataaggtcaatgccccataccgcaaagggccaagagcttgtcatcaatgtgatttcatttggtggggcccttgggatgtttgtgaacctttggcatgggtcacactttagggcgtagtctatgcattctttcttcatagcaggccagaaatatgcttgtcttaaaaccttattagagatgctcgaacccccatgtgatctccataaaatccttcgtgaatctcccgtataaattttttagctttggagtctgagacacaacttaggtatagcatgcttaggcctctccaatgaaggataaagtctattataagataacagggggattgatattgtatccttctggaagccgcatgatcttaaggcaattcttcctttgtcaaatagttaattattgggtccatccaacttgatacctgttcattcactggaatctcagccttcgatacaatacttagcaccgtgaggtactcgacaagaactactcccagtttttccatttctcgatttgatactaaattagctaagtagttgcatgagcattcttttctcaggaaatttgttcaattttgtaactcttgaattcctggagcaactccctcatggctgaaacataggcagccatctttttttcttgaatttgatattctccaaacacttggttaataaccagttcagagccactaaaaacttctatcttgtgggctcccacgactttggctagtctcaaccctgctagtaaggcttcatactcggcttcattgatggaagctaaaaatttaaaccttaaggcggcttggagtctcaacccctctggagatatcattgttattccaaccctagattcattctcttttgatgctccatcaacatatacccttcaagtaggaataccagggtctagtaagtcagttgttgcttccgtttcattgcattcatccatgaagtctgtgagggcttgtcctttaatcaaaatacaggtagcatactatatgtcaaattgactaagctccatcacccatttgagaagtctctcaaaggctaccagtttctaaaggacttatcagagcggtttgtgaatactttaattgtatgcgcctgaaagtatgatcgcaacttccttgatgccatcaaaagacaaaagctaacatctcaattaaagtatacctagaccagcatgtcatcaacatatacctccctatttcttctcaataaatttttgaacatctggttcaccatgcactaatatgtggctcttgcattttttagtccaaatggaatgactagatagaattataaacctttgtcgattcgaaagctggttgtaccaggagtacgcatccatgaaggaaaatagctcgaatccagaggtggcatccaccatttgatcgattctgggtaacgggaagcaatcctttgggtaggccttgttcaattctgtgaagtcaatgcatattcgccatgttccgtttggtttgggtactaaaactaggttagctagccattctggatagtacacatctctgatgaaggtgttcaatagcatcttatccacctccttttctaaggcttctaattttaccagatccaaaggatgtcttttttactgtactggaggcatgtcctttaattaatgtttaagacatgagtgatcacatgcgagcttattccagtcatatctccatgacaccatgcaaatatatatgttgattttttgatggtgcttataatttttctccttttgtcaggactcacgccttttcctaagcggataactttggttgggtcttgattgcaaattcctacttcctcgagcttttccataggctttaaaagggtctcatagccaatacgaagatccaaatcatcttatcctttttataaggttgtgtttccagttccctaaaccatgaaaacagcttgttgagtagcgacattataaaactttcttacctccccttaatttccacgaatagttccaatccccgtcgcttgagtgcggaatttgaggcacatatgcttgattgaggtaatggctccaaaatacaccaaagctagacgtccaaaaattgcattgtaagttgtaaggtagtctattacaacgaaggtgaaatacttgaatgtgctttggggggtatccgggcacatggttataggaagtaagggtagttccattgaatcttgtgagttttgaaccactcggggagaggtctttatcagtgagtttgatggcaatgaaagcgtctttaaacagaaggtttactgaactcccattgtccagcaaaatcttggcaacaattttgttggcaatgggagtttcaatcaccaatgggtcattatgaaggaaatgcactaacttgacatctttttttgtaaaggtgatgggttgatccatgagtcaaggcctttgtgctgggagttggttaacttcccatacttctccatcatgatctagggccttagcataactcttcaactcatttcatgtggttcctctaatatgtggccctgctgagatcattgctacccttccatttggtctaggaggctgttcgggcactggatggtgttgggggaggactcccaaatgaacttgagctctgagaggtgctggtgctctgacttgtcctccattcatgtgcgacaatctttcctttatccactcgtataagtgaactagccttattaggctcccgataatgtctttcaagcttttgcattcattggtagtatggccaatatcattatgatatttgcatcttttattgggatccctccgtgaactatcccggtacagaggaggtggtctctggtagtggatgttttgccttgtggctaagttcacacattcttgagtgtccactaaatcggtatactaagtatactgggaggtgtagcgtttcttttgcctcttattcttagtctgtatgctttctttcaatgacctcttactctgggaggtctgaagagtttctgttgcagttgctttaagtcgtgcaaattgagcgggatattgcgagttcactccgggagccaggttaccccctagcgctccaaaactagactgagctggggtaagagcaaggttgtgggtatatcctggtgttgctaaaaattatacattgggcgctccacttacctgcaacacagcaggaagggtaattcctagaaactgcattccgaaagcataccttggactgccagtcgtagtatcctccgaaagtaattatctgtgcttcctataaattaatatatttttgggccctcttcttgaagtcctgaagactagcatctctttcttaatgattctcattccagaaaagggtttgctctagataccagcttgtagcaacgccaactgatgtccatcatctacttttttttttgttttggaagcttctttcttaaataattttttaaagtttcaactagctagtagttatttaatgttgcgttaaagcactgactttaaggtttattttcttggctgccacgaactgccttctaaaactaacttgttccaacagtccacgaataaaagttccaactttttaaatcactcctcagcagaccctcctaatgtcaacgggaaacacaaacactttgtgtcattactgactctcatgaccgtcattacacggttaaatctggataagtgatcactaggattcgagtctccagcgtataaggttatttcaagcattttgaaattctttgggagctccgcttcaagtatgtttctggcacaagatcagtcctcgcaatcagacttcgaatcatctcccctttgtgttcgagtgactttcgctatatcttttttggggatggcgagttcggctaggatgccgtcattcaatgcactattggagattgttaaagctttcttctttcgttctaagtgatttctaagatcacagtgcttggtgtcaagtttttatctcaagtcgatagaaggatccttgtgactcttcctcagcactttgtgcacggatacttttttccagtctccccgatcctgaggaccaacatttccctttcgaaacctgcccctctgtggaccattctgtttagggagatcagagcggactcttcatggatcttgagccttcctattcttttcaggaatggctattgggtttgcctttagggaaccttcggaagggtatcagattgggcttggctcccgattcatgtgcctctgacattctgaaagttgtagagattcctctcttattttgtcttgcccaatgggtcctgcgttttgatgcacatgaatgcctatagtttccatcactttttccatggtgatcattatctcttgcatcattctgttttgctccttttgctctgttaactcagcttcatggtcaacgactttctgtcttaacactaaatgttcggtataactacgatcatcatatgcctcacaattctcttggttttcatcgtattttggatcattagtttcatcttgctcttccacctctacacgtggagccacctcttctttatctagcccttagggccttaaggaaaatgtggttgatgtgcatggttcctagttaacaccatcataccaaggatttatttatgatattccttctatggaaagctttctatagctctcaatgaaaacaataaaatattgaccgagatttttagcaactaattaattatagctatttaaatgtttagtttaaatttaatacaattatatttacgtggcttgggcattaatgagccttagtccacgagttattgctatttaatatagtagttttttacatagggtgtttatactattttttcagatcccttctccaaaatatagaaggcaaaaatgttactattatcgcaagtgtggaagcattactttcacaagtttccagattcagattatagggtatgtatgtctgtctggtaggttgtataggcttttcctaagtgtttggagaggtaagtccttaaccttccttgattgatgcaatagttcattatgcaactatcataagattcataaatcagagtgtaatcatcgaataatggatttaatgcatctcacacgtctttttagaaccattcgtagacgtctttgttgggttttatgtcctaaannnnnntctatttcaatgtaatccaaattattcaatatcaataaaataatagaagtatttttcattcatttctg

SEQ ID NO: 16731 - DNA, 3677 bp, Cannabis sativa
tttgaattttagcatagtaagtgatgactcccttttctcctttccaacttttcattcaatcttgtagtgaaaaatctaattaggacttctttttcttttttttagacaatactgcacatctgacaaccacttctttcttgcatgagagagaggctttgtataaaggcttccctaaggaagatttgtaggtggagaaactggtccctacaaccaaccttaggcaagttgttctacttactcctcaccagggcattgatgcctgtcatgctcgtgatgtccataatgacgctccaaaggtcaagaaagttattgcaaagataatcgcagataaggcgaggaagaccatcaagaaggacaagcaatggcttagagagtgggctaggctgcatctgaagttattcctgatagaggtgctttgtgtgccagcatgtctggaagaggcaactctcccttccatttatttcgtgcctcaaatctagaagacataggccacgtttatcaaggaggctttgatccatattttttagaactagaccaccatagatacctcatgattcgttattatgatagggtagatgacatagttgaaagccaaaactatttcctcctgccttcctaatgtgttagagtagacccattcatcttgctgaagtatttagggttcttccaatacggtagcttcttaagcaaagaggatatctctttattttcttgtggggatccaaaatacagtagtgttaatggttggatccagacttagctttcaaattattttactgttattgtttttgttgcttccatatgttttaacttttgtgatcttcttgtagaaaatacccagaccgcccagatggggcctgggtccaaagaggccaaagaggcaagtctagaacatcttcccagaccatagttaaagaatcaacacctccagacaatttgccagaggctattctagaggttgtagtcctggacgttatttaaggatcccaaaccaaagaggctgcggtggaagctcatgctcaagaagttgcgatggctttgactctttaagtggaacctttccaacaggatacacttgccactctcaggtcattactgttgaggaagatgatgaagaagacggtgaatgaatagtatttaatcgaaagaggccaagatctaacatcgatacggagggcaagagaataaaggcagaggttttccagcaattaaaccaatgccgtaaaaatgagaagttgcgtggagagtggaggagcaaagagaagctaaaaagaagagggcagagaagaagaagaagaagaagaagtagaagccaaggaaaatctcacatactaatagaaaggttttagatcccaagtcccgggatgctagacctaattttagcgtacatcttcaaatcctttcgcaaatcttattcttcctatacttccttcaactagcttaactcttccagactggtcattggaattgttagaggaaaagcatgtccaacttgaagagttaggtcaattcttacaaaagaagattgaggttgaggaagctaagatccgccagaggactaacgtgattgccaccagatgcaaggttgaactaactgatttggttgtgggatctaatgcgcctaatctgattattgatcatctagacatctctgagaagcttcagactagggttgaaagtgatttggctctgtttattgtagatctcttagagaaaataggtgacacttattgttggatgggagcatagagatgggttacaacgaccagtgaagatctagcttttcttgcatattctcttcgtcgtcaattggttttattttatatcttccagggaacttgttggtagaaaggtgctctaaagcagtggttaagatgtctctggaactcaagacctttagggctgaacaagatgccttagagtgaaagagagaggaaaccttggctgaatggaagaaagcccaagcacaatcaaaggagttgctgaagcatcaagttaaagcaaggctagagtcaaccatagacaatgttgtagctggttataaagatgaaatctagaggctacagaagtgcggtgatgactataaggctagctatcaacatgtcaagactcaagttaatttgttggatgcttgtgttgaaagctaaaggctaaaattttaggaggctgagatcaaagaaaaaagtgctactctcaaggaagacatgttgaaggaggagattaacgaaaaagaccttaaattcacaacctaaagcaagaagtaaatctgttgaccaacttctaggattctatagttcaggcctaaaaagagatttctaccaaactcacctaagtggaaattgaccttgactttctttcaaaaatgttaggatacagttaaagtagatgtgactcgatttgttcaacgattctttgaaagtggtgagttagaatcgtcttgtggtgaggctaatgtggtattgatcccgaaaaagaaatgcacagataccatgaaagatcttaggccaatcgctctttgtaatgttttgtataaggtaatcacaaaagtgatggctaatcgaatgaagccattcatggatataattatctcagactctaaaagtgcattcatacttgagagattgatctcagacaatggtctcctttaaagttcttcattacctcaaaaggaagagaaaggggaagacagggttcatggtgttgaaactcgatatgagtaagtcgtatgattacatagcatggccttttttggaggctatgctgaagaaaatgggttttttgcctagatggattcgtttaattatgacatgtgttacttcagctaattataaagttattcatggctgccatgatatgagccctatcattccaggtatccgacagggggatcctctctctccgtatttgtttattctttgtgcggagggactgtcatctcttatgcgtatgtatgaaaatcatggttggattcatggttgtaaagtggctaatagagcgccaagagtctcatatatgatggcttatggaaaacatgttaattttgttaagtcctcaatttttttttagtgttaatactgaagctaatttgaggagccacatatgttcttttctccacatgaatgaggcggtaaaaggaagcttttatttgggtctccctcgtacaatgtctctgaataagaatgtggtcttgggatatcttaaagataaagtccgtagacgcatacaaggatgggaaggaaagtttctgtcaagggtagggaaagaaattttggtgaaaacaattcttcaagccttacctacctatgcaatgagtgcatccttactttctttggaaatagtagagacatttagcgtatcatgactaaattttggcggcaaacttcaaaggatgcgctgaaaggtatacactagattgtcatgggataaactcggttaaaataagaaagggggtggtttaggctttcgtgacttgcgaatttcaatctggtaatgttgggtaagcattgttggagactccttactagacccgagtcattggcatcaatagtttttgaggcaaggtatttctttgatggtaactttctctcttctcaactcggttctaacccaagcttcgtttggcaaagcattcttgaatcaaaagagctagttcttactagcacgagatggtgtgtggg

SEQ ID NO: 16732 - DNA, 5859 bp, Cannabis sativa
ttatataaataaaatttaaagtctacaaaaatattaaaaattctgtagagatcatatttatatatatttttttgtgtgtgtgttttttttttttttgaaattatttatttttgtaaaataaaaaaatcaaaagggtagtttagtaattttcttaatgaattgaaaattcgaaacgcaatccgaaaaaacccagctcgatttaaatggtaatataaaacaaaaataaaaataaaaaaaaaaccgcggtaaagcttttttatggatcctatcccatgtctctgatttatacatatatatatataataatatatatatctctatatatctatatctatatctctctctctttaaggatctttctcattcttcattgaaacatccagcacagcctccattctctctctctctctctctaggatttgggtcacgcgccggtgtattataacagccatatccgatcaccggaatctcgctgcgaaggtatctccttaggcttgatttgagagtaggaaatggttatgtttttctctgatctgctgtgaacttgttgagatgagtttttaagaaatttgtctgtattctgtttggtggccgagaaagttttgtgtgagaggggtattaaagtaaataaacagaaaggaaatggtttcgagttttgctgatctctgttgttgattgttttttttacttcttctgaatttttgacttgggtttttttttttttgattcgtttgctttgcttctgtaaattgaagccgaagggttttgaaacatgatatctgatattaggtctttttttttggaaaacttttggatcttctatttgagttttgttttacaaatttgactgatcttaattatatgtaacgttgtatgagatcatcaactttttttggggggttaagatctttaattttggttgttgaataaatttgtatttatttattattattatttgaaaaaactttcttagataaactttgaaaatgcatttggtttctattgacggagaaatcaatttgctttttttagttatttgcatataagatataagattagatagataggataaggtaaggtaagataagataacttgaggtgtaaagatactaaaattactagaacttatcttgtgtaataccctttcttctaggttgatatgattctttaaaaggaaaatgattcaaaggtaacaagaaaaggacaattaataccgtttttagagtctcacgcaatcagaaaatggaagaaatcctgttttaaggatttaatgatattgatatttagacatgcttttaacttttaatgggtagattactggtgagtacagtgattaggtgaagaattttgtgaaatgaaagcgtgtttctatttaatttttctcttggagttgtcaaaggtgcctaacttactgtaatttcattgtatagtttgagaacaatatctcagttttaaatattatgttccattgggtgtatatatatgtatagacttaaattaggttttacttgaatagtgttactgataatctgctgttctccctctctgtagtggaggtttttctttttgggtttttaatactgattatgcgcttgattatggaacttatcttcacattttattgatgtttgcgttgtgttatatttttattttgcaggttggtgtatatttctagctgggcagaaattttatcagcaagttctactctctttatgtcttagtaggaaatatattatttttctactcacaatggcatcaaggtcttgtacaaacctattaggtttggccaatagtggcctactagattttccttctactcccagtcctcggccccttcctcgtgtgatgacagttgctggcattatctctgatttagatagcagtaatgatgcggattctgatgctgcttcttctgtttgtcgtgatcgaaaaattatagtggcgaatatattacctttgcatgcaaaaaaggacacagaaactggaaaatggtgcttcagttttgatgaggattcccttctgttacagttgaaggatgggttctcttcggaaactgaggtcatttatgttggttcgctcaaaactgaaatagatgtcaatgaacaggatgaagttgcacagacattgctggaggattttaactgtgtgcctacatttctacctcatgatgtccataaaaagttctacctgggtttttgcaaacagcagctgtggcccctatttcattacatgctaccgatttgtccagatcacggcgatcgatttgaccgctccctgtggcaggcatatgtatctgcaaatagaatatttgctgataaagtcatggaagtcattaatcctgacgatgattttgtttgggttcatgattatcatttgatgattcttcctacatttttgcggaagagattctatcgagtaaagctaggattcttccttcatagcccattcccttcttctgaaatctataggactttgcctgttcgtgacgaaattctaaggggcttgctgaattgtgatttaattggttttcatactttcgattatgctcgtcactttctctcatgttgcagtagaatgctgggtcttgactacgaatcaaagcgagggcatattggacttgattattttggccgcactgtgtacattaagattcttccagtaggtgttcatatgggtcggcttgaatcctttttaaattcatctgctacagctgcaaaaataaaggagattcaagaacgatttagcggcaagaagttgattcttggagttgatgacatggatatatttaaaggtatcagtctcaaacttctagcaattgaacagcttttgcagcaaaaccctgcattgcagggaaatgtagtcttggttcagattgtgaaccctgcaagaggcttggggaaggatgttcaggaagctaaaagtgagacttatttgacggctgaaaggattaatgaggcttatggttcatctaactacaagcctgtgattttaattgattctcctattccacgttgggagaagacagcttattatgctgtagcagaatgttgcatagtgaatgctgtgagagatggaatgaacttagttccttacaagtacgttgtttgcaggcagggaactccatgtatggataaagctttaggcatagaagcagatactcctcgcacgagtatgcttgtcgtgtctgaattcattggttgctcaccttcccttagtggagcaatcagagttaatccttgggacattgatgctgttgctgatgcattgaatttagcacttaccatgtgtatgtctgagaaaaaattgcgccatgagaagcattaccgttatgttagttctcacgatgttgcctattgggctcgtagttttatgcaggatttggaaagagcatgtcaggatcattacaataaacgttgctgggggattggtttgggcctgggttttagagttgtttctctttctcccaacttcaagaagttggcaattgagcatattgtctcagcatataagagaaccactagaagggctatatttcttgattatgatggtaccgttgtttcccaggcttctattatgaaatctccaagccccgaagtaatctccactataaattctctctgcaatgatcctaagaacaccgtgtatattgttagtgggaggggaagaagttctttaagcgagtggtttgccccatgtgatagactaggaattgcagctgagcacggatatttcataaggtataatgatatctttcttgccctcatcttttgttttttagactagcccgtaaggcgttttctctagtgtaccgaggttttttcttatcttttgtttgttttgtgtaggtcaagcggaacatcggagtgggagactagtcctgttgttgctgatcttgattggaaagaaattgttgaacctgttatgacattgtacacagaggctaccgatggatctactattgaggttaaagagagtgcattggtatggcatcatcaagatgcagaccctgatttcggttcctgtcaagcaaaagaattgttggatcatctcgaaaatgtactctctaatgaaccagttgttgttaagaggggtcagcacattgttgaagttaagccacaggtatatattctcttctctctaacaaaagcacacacacaactatgtgaaatatatagctaatcgcatttaacatacagggggtaagcaaaggtttggttgccgaaaaggttcttttgagaatggttgaagaggggacggcaccagattttgttatgtgcattggagatgatagatctgatgaagacatgttcgaaagcatactaagcacggtctctagtccatccttgcctgcgcctcccgagatctttgcctgcactgttgggagaaagccaagcaaagcaaaatattatctagatgatgcaaccgacgttgtaaagttgctagaaggcctagcaactgcttcagtcccgaagccacgacatctagctcaaatccaggtttctttcgagagtgccctttgttgaaaaaggtagatttcactagcagcttttgatacaaacaggaaccattgtttttgttatataagaagtgggggttccctttttctgagaaatccagatgatgttttcgaatgacgattaatcttaaaatgcgatgcatgacagagcttgctgatcactaatctgattggtccttgttgggatgaactgtgcatttcagtgcaatattaacaagaccatgaaagttgaccattcttgtatttgtatatggtgacatcaaaatctttgtatttacgggtgtgccctgtaaaagagttgtcttggggaatcagtttttacacaaaagtccttaattaatggctgttttattggtcaggcccctccactattaacttgtatagatacaatgtttcttttcataatagaaaatgtcagtttgttctaatgttgtatctctattcatgctaacttacattattggctattttttcactttagtcaattttttttgggtattattatttattccaatgaccttgatggagttgattgattatctagattgaaggttcaagattatgagaatccaaaagaatgaaagaaaagagaaaaagataaatgattatctagattgaaggttcaagcttatcttcttctaatggtgtgtaaagttaatggtcctttccagttttcccatcccatgtggaactataaataatataataataataaaaaaccataagacaaagatacaaagcacttttattatattccaataccatcccatttggagaaacacaaagttaaacataaggcatatatttgaggttctgaaatatttgagaagaatagtacaagggtttgcagtgtatgtttgtattatgattttggtactcttcacagctaatagtggtccaaaaacaccatagatatttctaactattacccccttttttttacaatgtggctaccactcactagtacctcatctctttttggtgggtgtatgagttaaatacaaggaaggaactacatttattggctctgcaattactggtttaaaagagagttgaattttaggtctcatctcatcaatatttgagctctctcacaatcacaatgaatgatgtaaaatagatgtactttcataatataccaaaaaataaaatattaaaaacactttaatgctctcttttactttttttttttttaccttttgttataatttttaatttctacattttcttttttatagaaaggaatagaattaacgaactaactaaacaaggaagggttattgtctaacacgataaacgatattgttggaggaaattcctatctcgaaaattatatgttatac

SEQ ID NO: 16733 - DNA, 8727 bp, Cannabis sativa
aatagaactttattggcatatattgctctgtagacaatacatagtacagcaacttgccccaactgaagtaacagggaagttactatacatcatacaataattggattttcatatggtcctatttaccataaaagaagctttcgtttggtacatttaatttatagtttctagtaatgctttatagacttgaactcacctttgtaatttctatatggaatatttccaattgtaatttgtcacatgtaggccttatggcttggttcctttcttgactttaggacaatttacatataactaaggacccacttcgaattccatccctggtccccaatcgacattttcaccatacagaaacatgtgatatatgattagtcacctgatctatgtacagtaatttcgtcttcaacacgtcaaatattaataaaagggtttaagaagaagattttaatcactccatataaaataaaataagggatagaagatagaaagaaatgacttgaaattcaaatctagaatgaataatttttttcagtccccttttcaggaagagcacatattctcaacatttttcgaaccaactgaattaggtactaaaacacaatgacccgaatcagaactacacctcaaatatcaaaaggtgggcttccgcactaaccaaaacacagccacaccacctattaatgagccctacatatgaaattttcaaaaagaaaaagggaaaggaaaaagaaaagagaacagaaaatttatttctgaattgaactatatatgttacaaatcctcctataggattgctgctctactcactaaacttgaaacggagaggtgatcggagatttatgaatggaagaccaatgcaatgatcacgaatgatttgatgttaactcaccagaaaggaacgtgattcgactgcagtgttttaactttgcaatagctgcttctgacttaccaagcgccagatccacgtaaactcccgtcaaagtagcctctggattgttgggtgctatcgacaatgcttgtgaaacaaactgatgggcttggttgaaatcaccttgcatcgcatacaaggtagcaaaatttacgtaaagtgctgcacgtgcctcttctggcttgaggaacccaataccttcgagatcttgaggggaagaattcttggcatttgttgatcccccatttatgtcttcacaatcagcagtcctatccactttacgttgctcaaagtcctcttggctgaacggcaattcaacactgccttcagatacatataccaataaatgatcaatagcttccttttgcctgttcaaccagcagagagactctgcggcaaatatatgacctagaaacagataaactctagagcattctggaagttccagcagagactttgcagttgaaagggccttaatgggatctcccatttccaactcagcatatgccaggttagctaacagagcttgcttgatcaatgccttttcctttcggcggatatcttcataataggtaagcgagttctgcacaagctcttgagttgttccccccctttgctctttcgcatccccatttgcattgacctggcttaagcctactgccacagtggatgccttggaatccatgttctgcaagttcttgtggcttgagttctttgaagatgccatttcggttgattcattctcatccaaggatgaattagaaggcaaactggatttcagatggcttaactcagaacgatccaacaggtacagggcattataaagacactgtcgggcaagggacaatgagagttttggttgaccatcactacccagtaataaatcacctctctcaagatccacattcccgtttttcggaatcccctcccctaaagcaagttgcctccattttccctttccaataacataaattataacatctgatctatcagctggagccaaattggattttagtagtcctttctccaaagccattagacagcattctgcaagtctaagccacaacaaaggccggttgtagaaaatcaaaccagccttttgaaaacaacgagcagcaggaataggtttcccgcaagccaagtactgcataccacaattatatattataagtagagaattatcctgagaaaatgttgacagcttaagaggcttctccttccgaagagatgcacaattgttcaatgccttggaaaagaaaactgatgatgtgtggtattttccaagctgataatatatgcaccccagattattgtggaacatgctcaatatacctatgtcggtccgattgctagaagccatcaacagcttgatggcttttcgatggttaccacgagcatattcgagttgggacttcaagagaagagccattgatgagtctctcccacgtgcaatgttcatagcatgcttgacttcacgcttagcaggctttagacttctagtcagaagcaaaaacctaactttgtaaagctgcaacttaagcttcagatctacagatgatatggacctgtcaactgagtttctcaaaaaatcattcgaagatgagagaccaattggccgtgccacatctatatccctaaacacagattcaatctcaagtgtttcctctgatagcgttcttgataagattttttctgatgcattggtagcaattagctctgaattagaatctgcagccaatgagctgataggaagagaggaagattttgaaactagatttgtaggttgtggcacagtacttccattgtcattttgactgatacagctaacaccaaaggctttttctagatataccaaaacatcctgaatgaaataaatagaaaatagggaccaatcagaagataaatatgttcataaaacataagcaagctttaagattagagatctcactgcatccataagaaacaaagaacttagcatgaggctatcacactcaaggttttgcacttttcaacatcaaaatttcaggatgaaaaaaaaaaaaacatataaactttctagtaaatttgacttgtcaacgcaaaacatctggtaaattcaaaactctaaaaatgtataaaaccaaatccatccggctgtaattaagcaattgggtacactaaagaaagaaaagcagccatctacacaaggcatgcttatagccaacacaagcataaagcagacatgcattctaaaataaacctgaagatcccgtcaaagatgactagaatacaaaagaaatctctatccactagaaaacaactcactgctaacatgttcaaatttttgagcattaccaatcataagtagcaaatagaagatgttttgacgttcaaaagttttggtattccaaataattcacataatacatcaaaccacttaaaaagaacttgccataatgaaagtaagcatgcagggcctagaaatacagtaggaaaaagaaaatttgcaacattgcaaaatgatcagaaacactatcacagtaatagtatgtcaaaactcaagaaccaacccaaaaaattaaggggttttttcataaatacgttttttttaataatttacttacatacattttttttacaattatacaaatttaattcttcaaacaaaacaactttaaagtttcaaaattacaaaaatacgttcttctcagcaaaaaataaaaagtgaaagaaaacttaaaaaaaacaaaaaatcaaccttatgacaactataaataaaatatataaccaaaaaataaaaatatcaaatagtttacataagaacgtatttttgtaaataaaaaaatttaaaccgtattgacgtatttttgcaatttttttcaaatttttggtgtattatgtaataatttcaaaaattaattactctccatctttttcctaaattcttaatttatacgccagaatgtagtttaagaggattatcgaactatactttttttattattattaaaattgaaattataattaatcttcctagtacatttcacatattacgaaaacatacaaccatattgtaggaacttcccagcaagtaaagatgttaagtggtaacatttttagctattcttcaattaattataaaaaatagttaaaaaaagtgtgaagtttacaaacatcaaggaagttcaatctccctatcaactccttgataaagttcgttctttacctttctcttttgaagtgaatatggctcaaactaatatgcaaaaagcacattacaagaaaaatgaggacacgagtatataatagtttcatactacaagtcaatgatcagaagttctctaggaacaccctatttggctcacactgttcatgctaccttgaaaaagaattaatgcaaaaaaggtaagaactaaacctaaaaattgtggaaattttaaaatgaattttgtacaaaaaaaaaaaaacacaaagaaaaatgtaacacctttggcaacaccatccaaaagatctcttggtatatacaagaactccaaacaaagctagttaaagaatttaatcaccaattgagagctcttaacaagttaacaggtatattcacaaaacgtgaatctctactctctatatagcaaacaaataaaagattcctgttcatcagtaggtgtagataacataaaagtcatccaaaaatgacaactcacaacaatatacatatataactaaacaaaaaaaacatatattattaacataaaaacttacggctgactttggtgcatcgtggcaagctagcccaacatccagcagcaaaaggcaaatatgaagagctgttgtctgcaagatcaaaagcactttaagatgtatttactatttagtatttggtacaaaaaagcacaacataacaaataattttacatacctcatcaattggtccaatattttgataaagaggatcaagaactgataatgccttaacatattcatgtaaatggaaccatataatcgcctatagaagttcaaattcagaacaaacacctcattaaacaaataaagagaaaataaaaaaataacaatcagcactggaagcaaaatgtggtaaattaaccacacaaacatactatgttaagggttgcaacacaagtgtcgaattcgtccatgtaaacaacattgggactactagaaccagaaaatgattgtgccaacatattagatcctttagaccctaaaagagctttatttccaacaatgccttccacctgctctcctgatgtttgtgcgtccacttcactcctcttctatagaacaacacttaaaacaattagaactttcaagagaaatatacatatatatatgcatgtatgcaaaacaaatctagttctattataagcttatagatacaaattgcagcactcacaagcttaatatgtaacaatatcatcaattgaaaagtagtttatcaatgggctgctagaagattgttgagtttggaagggagatagctcaggtatattctctagcaaatctgcttttgattccttgagaggaaatgaggaagtggaggaaaataacctggtttgatgctatttggaaaacactagtcccacctaaactcaaagtctttttattgttattaatgtggaataagatgaatgtacatgaggtgttgcaataaaccctttactattattccccagctgttatgcagaaataacaatgaaccagcaaatactttttcttagactgattttgcactacaattatggtataaactattgatagaagtctgcattcagtggagcattccaacctagacaatagaaatcaagacattcggcataagcagatgcaaggaacgacaaattctatggcagcttgctgcatcggccattctttgaacattatggctggaaaggaatatgaaaatcttcgaagggcagaggactgaggtggaaaatttttgggataagataagatttagggtagctctatggcttcatattgtaaaaagctttcaagatatccctgatcctgctttatttcgagagattggcatgtgttcttgtaattctgttttgatttttggcatgtgtttttgtaattctgttttaattttttgtaaccacggttttccttccccaaaagcaagggctctcaatatatttaaaaagaggtcagtcatggacatgaaacctttgtctctttttctttttcttttttttttttggaaaagagacagaggccattgtcttagactggtccctacccattatatattgaaaaccctcacttgtggcggaggaaaaccgtgattacatgagttttagcataaaacatactaaaacaagcacaaacaaaacaaaacacatcataatcatatctagtacatcaaagatttccactcacgacataagtctagaaaagagaaatcttcaaaatgtttagtcctgtaaacccacgttgcagtccagaatttgattttttcccataacctctctacttgacagcattttccatcaaaaagaaagaaaagaaacttagtttatcatgtaattttaaattaaatgagagagtcaaagcaaaaggctaccacatgaacaattattttgttaaatggatataaacataatgacagccaaacagaaatgctgaggttcattgtatattatatattatctatgaataattactatgatatttctgcgttattaaaatttcgggagttgttctgaatagactaatttaagttggtgcaagtcgacatcattttttaagaattcattgttctgtttgcattgtaaagttttaatatacaatttcttattagggaaaagaatactactgtagaaaaaatctactctggatcactagtttcaacttggtgttgaaaacttgtctgggataactacagaattctctcaggtgttatttcctagaatcaagattcccctttggatttaagtccacaaacaaatatccccctctcgtcagaaatagttacaattgcaaaagaagtaaaaaaaacaaaacatattaaccatcaaattaaaacaatgttaaatataaacaaaacttgcagccaaaaactcttgttctctagtaactaaagagtgtttggctgcaaaacaattaaacaaaaggtcatttttctctttttcctgtattttgacaaaattagaccacaagggcattttctaaaatcctaaaggggctagctcaaatggttgggcatggcatacaattgcttccacaagatctaacgttgaggcctgcctttgcatctacacaaccgttgctatcgttttctgctcttgaaatattatagggtaagcaaggtccctaatttcaaacttggcccactaagcaagtttgagggagaggatttatcggtataaaaaaagggaacataatcacttagtacccaacgttttattaaaatatagagttatgtgttttcaataatactcatctagtacctgtattttgaaattgtacatatttaataccctgaactcaaatttgatcaataaaattttatcaatttcactaaagttctcccagctatatgtaattaaataattaattttgaatttggaacaaatacaattgaagccatttcaatcataatgataaaattttattaatcgaatttgaattcatgatatcaattatctaaaacatcaaaatacagagtaccagataagtgtttaacacggaaccaaatgagtacacaccctaaaaaataatctaagagaatttatagtttaaagaaccaaggttaattgtgttaatgatcctaatttggtttactatttcagttctgcaatatatatgattgcaattaaaataattggtgtgtgggttggaatatgtagcaagtaccacaaaacaagtaattattcactatacatgcagaacctatagaatttaaataattttggaaaattattttgattgatcaaaaggtgaagagaactttctcagataccttcaccctaaaaacaccctaagctatggacattatatttttgccactgcctatggcttggggcatgacagaaaaataatatcttcaccttttgatcagtcaaaaataaataaatactatttcaattctacatgtttactataaatcactgctccgatataaaaaaaataaaaggcattgattaccctcatagaattatcaaacaaatgaatataaaggcacccaaaattcaactgccatatcgttcctatgattttgtacaaaataatgatagagaacaaatagacaacaaaaactaaggaagcagatagacagaaataaagtaattatattatattccataagtagcctatgctgacacaatggaagagaaacacagcgaagaaaagagatatttacaaacttaatagttttatgtttcatgaacaatgcgacatctagaaatccaaccttatttacagaaaattaatgtaaaatctctaaaatatcattaagggccttagataaactaggattacagaacaagtaggtataaataatgtttacatacttgtggacccatatatgaggaaatgcaataaaagagaaccactggcatattaaacaaacatgtatgcaacaaaaagagagaaagagaaaggtaattcacctttacattattgagtttgtctagcaacctctttggatctgaacaaccatttagaaaatattccgcaatcgcaatgttgtgatgaacctgataattataattgtaagcacaacttcagaaaaaaaaaaaaaaaacccccccttcttttgaagaaaaaccacctccttcatggctaaaaatctagaaaat

SEQ ID NO: 16734 - DNA, 3791 bp, Cannabis sativa
ttttattttaataaatattataaagaaccaccccacctcatagcggtgttaggcacctcgatgccccacaacaatgcttgtaataaaaatggtaggttattttggggaactttaattggctttatgaatatatttaagtggggcagggaaaattgaagggaatcatgaatggtgtgaatttggattagcgttgttgctcctagggagaggggtggtctctggaataccattaagttttctgtattattatttttctgtgttgtttgtgaatttatttgggtcttaacagtggtgtatgctgccaaaaattcatgctacaaagaaaaataccgatgctatgagtgggcattgtaagtatatgccctcaatgttctcaacagcaacatattccccttgagagagcttaaatatattcttcttccgatctattattttcattgctccatttggttgccattcaccaatgtcacctgacatttcaaaatcaaataatatttaggctttctcactctttgcacatcttttgtttaactttggagatttattatcaactgagcatggcatttcattttgacatatacttaaattaagcacatagatttactaactgtctattaaacatattttttttctccctcaatgtgatccacttatggacgcgtcatacttctactagtttacttctttttggagctgttaataaaaagataggtgccaaaaacagatatttttattaaagtgccgatatgtacagctgaaaaatatgcatttagattaaataacttgtaaggtcttacctgtgtgaaaccaaccatcaactaggacatctttagttagatcttctctcttgtggtagccagaaaacaaggttgttcctcgcaaacaaatctcgccacgaggcttgtcagaaagggcatcatatcccatttctggcactgattcaagccttacttcaatagttgtgatgggtactccaacagttccaatcatagggaaaatgttggcaatggatgtaagacacccaccacagctttcagtaagcccttacatatagaaagataaaaattaaaaaggtaaattgatggcaatagtcttatgaaggaaataaaggtaaatgtttaaacttgttatcatcttcattagagtaaattgcaatattcatctgagatcaaattgacgtgtaaggtttggcagattaatattgtttggcgatattgaatttaattgttttataaactgttcaattaactctattgtaccatatccttgtgttacagaagcacagcttgtgaccctcaaatattcctccacatggtgaggcaaaggtgcagccccggaaaacatgagccgaattcttcctcctaatccttgttttatctagataagccagcacaatttagaatgaagaattatgtttgaatatatacaatacatgctaaaatcaaatggggaagcatgtcttgccttgtcaaaaacaatcttgtccataaggggagccgctttgtcgtgtggaagacccttttccatatttgccaacttgctgcaaatggactctttctcagtaggacagaagcacagtaaaggtatatatatatatatatttatatataaatgtaacaaagaaacgtttgcagtatctcatactagttgtatgcatattggaacaacatcttcttcagtgtacctccagatgagactttatggaatataccttcaacgattgacatttattttagttttgactgacagatcatgagatattgtatggtttcatattctactaatctaaattttgtcaactttgaaatttacctgcatatatacgatcataaactctaggaaccccacaaaatatagtcggtttcagttcttggaggtcatccatcaaaaacctgatatcctgtaataagtccaaaccaattctcagttccttggagaattaaaaagttgcaataaaaggatataaaggaagaaataattcttaatcttactcctcgccaatagccaattgcgctgcccttgtagatgcaatagttctccacaatttgatcatatacatgagccaaaggaaggtaggaaaagtacacatcatcttctgagaactgtaattgaaaccatctcatgtaaatatgtagacgtgtacaagaaccttgtgagatgacacagtttttaatttcttcactttatagagtttcaatttagtgaaaaatatccttacaaaaaaaagtgaaaaatataaaaacataatgtacagtaagaactcgttaactatatagtattcaaaaattttaatagaagaacattcaaagtaatctttagactttttactttcctcacaaaaactactgtttaattaatcttttttctaaagaagtccccttgtaatgacctcaaaggtcctatatatagtgagttctctataattttaaacttcatccgatccctaagtctaagaatatcaggttactttcatactagataatctagtacttcagatagcctgttgtctcagacatactcagttgcactaaaatttcctctttaacttgtacctcagttgaaatgaattttgtctcctttatcaatactcattgtgtagtcactatcttgtttgtgatcttttggcttaaatgaccctagtctcgatattttctccttacttctatttgtatgaggacacgggatacgtgggagtcgaacgcacgggtgaacgcgcgcggggaagtgagctgggtgctggtgcgtggaggttggagagctaggtgctgcaagctggggagctgggtgttgtagtcttgggagttgggcactgcaggcgtgtaggctagggagctgggcgttgcaacatggaggttgggcggtggtacgtggggcctgggtgctagtcgctgcaggctgggcgttggagagggaagaagaagctgatatgatgggagatctgatgaggagacaaggacaaaagaggtagggaccactctttgtccattttgtttatcttgagaatcttgtattattctttctacttatttgttgtccataagaacattcatttattggactttcgttgttaacacttgccccccagtccaaaagagcacttttgagtgatctgtttttctgcaattgagttattctttaggccttatgcgacgcatcttttctggtggaacatctaacatgacgtaccgaaatattgatgagaccattcaatgaagtagacggtccatgttgtttctcctgtgtgcatgtgactaaccccatcctttgatcttattttcatcaaacggttgccattcatctcttcttcttataaataggctttcactttcacctattcttatctcatccttacttctcaccacttgctatctcctttagcttcctactccttccaaagtcttcttacatttcgagccctttgacatttgttctttctttgagtttcgacatagcaagcctcttcctactcaagcaaatcttgtctagtaccttctttctctattcacattaccttttttatatatatttatacacctacgacacttgcgggtaccactcaaatttatgataactcttattagtctttggtctcccactaaacctatccattcgtccaccctccccctttattttgtcgggtgacaaacgtggtctaaggaggcccttttgtgagtgagttatagttggtggtgtgttctcacacttgatcagcgggtgttggtgcccacattcactttcttcgaacaatacttctgccttgccctccccacattcactttcttccctgtcct

SEQ ID NO: 16735 - DNA, 2377 bp, Cannabis sativa
ttcgagttcatctggatcggtttctggaagaaatggtagtcagaataatcataataataataatcaagttggtgggagaagatccgattccggtgagctttctggatcgagcgagagtagtccaactgctgttgaaagtcttcgatctggaaagaatttcaagacgacgagatctgattcgggaagtagtacacctccgttgatttactcaggtagtagttatggtggtgggtcgtcggtgaactctcctcctccgtctttgaatgttcttccaactgggaatatatgtccttctgggaagattctaaagagtggtttgactccgaatcggagagaaaggagcgatattttgggatctgggatgggtaattacggtcatggaagtataatgcgtggtggtggtggtggttgtccggtgaaatgtgagcctggaagtccggcgaaatgtggcggcggtggtggtggagagtttatgaggagagcaatgccgaatgtggatccggaggaagtgaagagggctgggaatgaacagtacaaaaggggtcattttgctgaggctttgagtttgtatgataaggcaattgctttgtctccgggcaatgctgcttatcggagtaatcgggcggcggcattgactggtttaggacgtgttggggaggctgttaaggagtgtgaggaggctgtgaggttggatcctaactatgggagagctcatcagcgtttagcttctttgtttcttaggtgaggattgaatttttggagaaattgatgaatacatattcagtcaattgggggggtaaagattatgtttttattgatgggtttatgttagttttgttgatgatttggtttttaatggagtcataatacttgaacttgttgccattgtctgataaagattgattctttttgttcttaggtgagaaatgaatttgaattggaagggattgatacaatgtttagtcaatgggtttttttgtgttagttttgttgatgatttggtctttaatggagttacaatatttctacttggtttacattggatctggtttattattgtattgttgtggttgcccattactcatatgctttggttgatatactgccttggactctttcttttctttgcttctatgataaagattgattatttgcatatacatacacatctttggattctgaatttaaaattcagtctgattgttatctgtatactatttcttctactatgtttagttttgggttaaatttggatattgggtattgtctaattattcattgtatatatgagtttttcctttcttggttggtctttaccttgtttttgttaattctattgatatgagtttgaacaggttggatttccttttgttcttgagatattgcttattgtatttacttagaatctttacacaatgaaatcacagattaggacaagttgagaatgcaaggaggcatcttacctttccgggactcaacccaggtctttccgagtttcagaaattgcaggcacttgagaaacatctcaacaaatgtactgatggcaggcgaatcggtgattggaaaagtgtgttgagagaaggtgatgcagccattgcttgtggagccgaccattgccctcaggtaatacggtcttattcttaaaaattgtactttgctgaagttgaatggtttgatgtagtatgaacttatataacaaatgattgaacctgttccaaattaaatttacagctcgctatgtgtagagcggaggcgcttttgaagctccaccaatttgatgaggctgaattgagcttacaaagtgtgcccaaacttgaaccaaccgcgaaagtttgctcgcagacaagattttttgggatgctttcagaagcttatcttcactttgttcgagcccaatatgagatggcattgggaaggtgagttcagaaattctaaacttcactgtaaaaccagatggtaaatggttttgtgagagtgagaatggatgatggatgtgctgcaggtttgagaatgcagttacagctgctgagaaggctgggcaggttgatgcacgaaatgtcgaagttgctgtgctcattaacaacgtacgtttggtagcaagagcgagggctagaggaaacgatctattcaagtctgaaaggttcaccgaggcgtgttcggcttatggtgaaggtctcaagcttgatccttcaaactctgttctctattgcaatcgagcagcttgttggtttaagcttgggatgtgggaaaaatccattgaagactgcaaccaagccttgaatattcaaccgagttacacgaaagctcttctccgaagggctgcctcaaacaacaaggttagatttcaaacaaaccccttgaatgtttcctaatcaca

SEQ ID NO: 16736 - DNA, 7352 bp, Cannabis sativa
taccatgatgagtcatttgtaaaaatgaatttaatgaaatcttagagtattccatatataattcttaaagaagcaacaatgttagatattgtattaaaatacaaccagtaggatataagaaaggataggacagaaataatatatatacacataatagtaagatgtacctttcatagaaataatgtatacacatatatatttaaaaaaaacgtggggctcttattggaggatgaacatattagttttcttttaggtttttattcttcggttaaaactttatggaatatgcagtattttttttttttttggaaggatttcttttcagcaaactgaaactttgtctataaaagttatatattggttgtgacgacaacaacagccttaggctaatacgtgtgtgttcatatataattaaagttgaggaaattttacaaggaataatgaagcatgtttttatttttattgatagaacttttgtctaacaaagcaaaacaaaagtaatttgtatatgtggatacaattacttaattcgataagaaaaaaaacagaaccaaaaagatcatacgtatgtgtcgttaaacaaaagttatgtaaggaagaggatcatatataataataaataaatatatttttgaattttctgctattgatagtattatagtatctaaaagtaattaacgtttctatttgtatgttagtcaaatataagtatggcgtattatagaagatagaaatagacattaaattaaaaataaataataatcattcccgttgagctttattagaaaaatacattagtagaatttgtctatactattggatttggatcgataaaagccatcttgtcaaatacgtcatgccatctttaattatttattattttcttttcattttgatttaatcattgaaacttgttctatttttctttttcaaataaataaaaaattgatgagtattaacatcaaaaacatattcttccttcctccaaaactttgcacaatgaatgataaacatgtctaaaaattgtattaatcaataatattaagtattatttagaattagatttttgacttgtgattgatggttagagcattggacaccctattaagtattgaatggcctctcatttggggtttgggttgatcctcaacaaaacgtaacaaggtcctgattgtatacccttttaaactaatcacccgctcaccattttttaaataaattaaatgaaaaaaagggaagtaagaatggatatagaaactttgggtttattattataaatataaagttgagatttttaatgctttagttaagtaaagtcaaaaagtccaataacatacgcgctatggctgattgctaattgaaaaagagagaaagtgggaggttgaacttaaaagctaatttactttctttatctctctctgctacaatttcgtaattttgaatgttcatatggtctttataggattttgccaacactttcatagtcttatgtatctgggtctgtctgtattggctctgttttccatttattaatcattgttttcgtttttctttcacaaagttttcctctttggtcaattttcatacggttttgtccatcttcagaatttttttcatctgggtcattcttattttaatcgaaatgcaaaaaatcaacttacttttaattaatttgtttatttttgtctcccgtattatcagatcatagattcttgcctcattacgtggaaatttcatcatatctttctataatgtcaattacttcccttttcttctgagacttatgaatttatatgattttgaagagtcccatttgataagaagtcataacatttgagaaggaaaaaaaagttttaattttgattttgtgaaaacaagaatgaagcttttggttcgtattattgagggtcgaaatcttccagcaatggatctcaatggactgagtgatccgtacgttaaattgcagctgggaaagcagagagccaaaaccaaagtggtgaagaagaacttaaaccctttttggggcgaagagttcagcttcagggtcgaggatctcaacgaggagttacttgtctctgttttggatgaagataagtactttaacgatgacttcgttggccaagtcaaggtccctgtttctcgagttttcgatgctgatagcaagtcccttgagactgcttggtaccctcttcaacccaaaaacaagaaatccaagaacaaggattgtggtatgtcattttcttatttaaacttttcaacttttttgggggtcaattttcttgtatctcaagttttacttggtgggtacttcgatttctttgcttcttttatttatttcagtagttacatatattatatcttttggatcattaagtgaatattttcttctcttcattgattcgattttataatgccccaatgtcctggtctaaactgttgctcaatatatcactcactttcgaaatttggtttgagttgagaaatgttagatacaatgttgtaatagtacttgtggttgttgaaccacctgtttcatattaaattttataattgtacattgtattgatatttctttcatttctgttatttttcccttataggtaaaattcttatttctttgtccttctctctaaacaatccatatggggatttgaatagtaatggaagtagttctccactcttgaggaaggatcctgatttaggagctgaatcaccttcaaggtctttcagtggtacatcaaactcttcttctcctcctaggctagacgaatttgcagcttctaaggaggagaagtctttttcacagaaaacattagcaggtcgaatttgccagatttttaataaaaataatacagattcagctacctctagcaaatacaatgacttattggagatacctgaaacagttgagcctgaggaatgtaatactaagtctgaggatgagttttcttctggtaattttgatgaactaatgaaaatgatggaatcaagagatgaaggaaatgacatgccatgcaatttaccaggaggtgtgattcatgatcaattgtatctcattactccaccagacctaaactcctttctattctcatcagattcaagctttcccaaatcattagccgatttgcagggaagtacggaatatcaactaggatcctggaattttgataatggtggtgagtgcttgaagagagtgataacttatatcaaggctgcaactaaattactcaaggctgttaaagccactgaggagcagacgtatctcaaagctgatgggaaggtgtttgcagttttagccagtgtaagcattcctgatgttatgtatgggagtacttttaagacagaagttctctactgcatcacacctgggccagagctttcatctggagaacaaacctcacatttagtgatatcatggcgaacaaattttattcagagtaccatgatgagaggaatgatagaaaatggaacaaggcagggcttgaaggaaagctttgagcagtatgcaactttgttgtctcaaaatgtcaagcctgttgagttaaaggaccttggatccagcaaggaacaagttttggcatcactgcaggctgaaactcagtcagattggaagctagcactacagtattttgccaatttcggtgttttctcctcagtatttttgggattgtatattcttgttcacatctggctagccaaaccaagtcccattcaggggctggagtttgtagggcttgatttaccagattcaattggtgaacttgttgtgtgtggtgtgctggttcttcaagctgaacggttactgggattgatttcacgcttcatgcaggccagacgacaaaaaggtaatactgttgccttggtaccatttcttatcagtgtcagatgctaactttagtccaacatttgtatctactgtctccattctaatcagctgaaattctattgtcttgaactgtcaataaaacataactgatatataaagaatcttagcaggaatgccaaacactgatatctttcaactacttgcaaaatcatctgggggaatatcacggatctcatcccctaattttttttctgctaacatatccctgttgtatttaaattgctgaaaaattgatttcatattccttaaaagaacatacatgatttagcattattgtcttcaataataggcagtgatcatggcgtgaaagcacaaggagatgggtggttgctcactgttgctttgattgaaggaagtaacttagcagccgttgatacaagcgggttctctgatccatatgtggtgtttagttgcaatgggaaaactagaactagttcaatcaagttccagaaatctaatcctcaatggaatggtaattattactctttttactttgatcagtctttttctatgtagccattttactgttacatagatgtaaaaattctgtcaaaagattgatgggatgtaaaatgattatgcatctgattaatagttcttttgatcactccttgcagaaatatttgaatttgatgcaatggatgatcctccttctatgctggatgtggaagtgtatgattttgatggaccttttgatgatgcaacatctctggggcatgccgaaatcaattttgttaaatcaaacatatcagatttagctgatttgtgggttcctcttcaaggaaagttagctcagccttgtcagtctaagcttcatttgagaattttcttggacaatacaaggggtggtaatgttgttaacgattatttaagtaagatggagaaggaggtggggaagaaggtaaattcttagaactttcaaaaccattgccttttcttttcacttcttctactaaaatggctcttgcattcccttcatatatatctatacttgacttgtaataaaaattattattgtgcagataaacgttcgttctcctcaaactaactcagcattccaaaaactttttggacttccaccagaggagtttcttattaacgactttacttgtcacttaaagagaaagatgcctctgcaggtgctttagttttgaaatatacactttagttgggtcacaaatgtatttaaaatgttctttcaatatttatatctcactaacttgcatttgatccttttcagggtcgtctttttctctcaccgagaataattggatttcatgcaaatttatttggacacaagactaagttcttctttctctgggaggacatagaagacattcaagttgttcctcctactttagcttccatgggtagtccaactatgatcatgactctctggcaaggcaagggtatagatgcaaagcacggtgcgaagacacaggatcggcaaggcaggctgaagttccatttccagtcctttgtatctttcagtgtagctaataggtagatctctcttgcatcaactaatagcatgcttttatgtcatgagctctcttcaaaatttcctaaatatttattggtgctgaataggacaataatggcactttggaaggctaaatccttaagtcctgagcagaaggtgcaaattgttgaagaagattctgaagccaaaagcctccagagtgaagaaagtgggtcatttttgggccttgatgatgtcagcatgtctgaggtttattcttctgttctttcagtacctgtaagttttctttcttcttctctctatctcttccttttcttcatcgactgttgcaaacctatctgccttatcaccttttctacttttctgcctgttctgtctatttgttatatcttctttaggtgcaattcttcttctaacatacattttctttgttggttaattcagacaagcttctatatgaagctgtttgagggtggtgagctggaccgtaaaattatggagaaagctggctgtcaaaactatacccacagtccatgggaatcagagaaaggcgatgtctttgaaaggcaaacttattacaaattcgacaagcgtatttcccgttacagaggagagacaagaagtactcagcaaaaaagccccctttctgatagaaacggatgggttattgaagaggtcatgactctccatggagttccccttggtgactatttcaatgtatgaacagcagaacggtttcttctcaatacctgcttttaaatttcccatttatcaattctgttttgtcagtgtgactgtcatctagattaaccctttcagtcaatgtgaaaatcttttggaatactgactagtgccatttcattttcgcagcttcacataagataccaagtagaggatttgccttcaaaatcaaagggatgcctgctgaaagtatattttggaattgcctggctcaaaagcactaggaatcagaaaaagattacaaagaacatcattcaaaatttgaacgatcgcttgaaagtgatcgttagtgaagtcgaaaaggagtttgcgatgaaatagtcaatgaggtggtgcaaataagatcattagcattcttacgcagtatccagctgactcgggtttgaatgccctctaattgagcatcaaggatccatccaagtacacccctaataggccttgaatgcagaagtggtgtggcaacattattcttttggacacccactgctttaacacaggtaggtagtcaaaagctgagaacaagttggagagaactatcgattcgaaaccagatgctcttagtttcttgtcaaaaaatctaacggatgagttcattggaatttaaagggtgctgaattttcaatggcatgaactcattggaagttgctaattcacaatatgtgttgatctaactaacatgtgacttgattttgagataccactaattcaaggtcatggggggtggatggctttgctaatttctgtaatcaccagaaacaaggaaatctatggatagtgttacattaccccagtgtgggaaattactctcctgtattacttgcaaattcatgaaacacatatattcagttgtaaatattcaaagtaccaatgaaacaaaacaataggcagtattgctttcttataagtaatgcagctgtggctttggattggatgaaacatcactagtggttcaactcaagggaagcatcaatgtggtaatcatcttggtgaaacttataacacaaagtcacaaactaatctgatttttataatgtcttatatatatatatatattatgcaatgtaatcatatcagttgaagagttagaaaatcattattgtgtaggtaataagtaataatgtgtacatttctcaggtattttgtttaattattttgaaaaatcagaggaatgtgattaaattccgtaaagttttttatttttttggtcagaaaaaattcagaatgtttttttttttttttttt

SEQ ID NO: 16737 - DNA, 6121 bp, Cannabis sativa
caaccttccttttcttgtgttcctcattccctgaagatttgaatgtattttcatataccctttacttagtaatacaaatatcaatttaatataattgaataattatattaaatacttactttcaatattaatttaaattttgaataatataatacgaatattatgcaagtaatataggatgatgtttattttttttaatatatggtaaattttataattaattatatgtgatgataaacagaaaataacaaaaaaggcattggtaagtacctcccaatctagcaaaatgtatttttgtttcttgataaaattcaatgattcttctttatgccagaatatattttgctcaagctacattatgagtgtcaaaatacaaaaagaaaacataagctcaatctgtacatcaaagagctagaattcaaagtcaatcagagcactaaacatgaattcaaataacattaaaccaataatacattgcataataaatcaaataagttctgaaagcaactagcattgcctgcatgggatgggaatacatagacaaaggtagctcaaataattatattgaaagaagaagaagaagctgtacattcatagttagttatcacaaaacataatagtattgaagtttcaagttcttttcataattaaagtacatcccagaatttaaaattctgaagcatgttaggttgctgatcatcaagcaatgtctgaaggttgtgacattcccatatttccaactcgtcaagacatgagaggttttcgatacccttaggaagcattttaagattaggcagtctctgaagttgaagagaggataaagtgctaggcaacaaccattcatcagggaaagacaccaactcattgcaccctccaaacactagatttgtaagatgagtgagtctgtgcagcccccattcgaatgtaggcttaagcttctcgcagtccaagattgacaaagagatcagattaacaggcaaaccaccctgtggaaatgaagagatacttgagcaaccttctatggatagttcttcaagagagttgaggctgttgtgcatatggtttggtaaggagttgagactccaacaattggacagtcttagagattttagcatcatcaaaggtaggcctgattctggaaaagaaagcagaagtggacagtcagttatttcaatatgaacaagatgtattaggttctgtaaaccatctggtaaaagctttaggttcgcgcaatccttgatgatcaattgtttcaggtttctgatcatgttggaggtgactctggggtgatgagaagcaggaaggtcagtaatggaatggcaaccaacaatactaagaaattcaagagaatcgccatgaattagatctttaggaagggattccaaattcctacaatcatgtatttcaacttctttgagtgtgttaggaaggtcatctcttggtaaatgtgtaagaagtggacaaccttcaacagtcaagtattcaagtgacagagagagcttcttgtcatgtatcttccagttaggcaaggaatggagagcattacattctgtaatttcaaggcctgtgagtgtggaaggcaatcctgtactcgggaaggatttgagcaaaggacatttccaaaccctcaactctttcaaagacgggagtttgtgcaggctttggggcaactcttctagcaatggacatcctgaaatttccatcctttgaagacttgggagcttgtgcaagccaatcttgttaggcaaagctgtgagatggttgagatgcgtaatgtgtaactcttcaagagccgtcaagttttggaaaagtccatcaggtagacttgtgagatcgagaatttgacacattcgcaagtgggaaagtgacttgagtgcaactatactttccagtaccactgcttggcattgctttaactctacgtcgtgtatggaaggaagcttgggcaattcttccaagctttgacaaccatctatctcaagcattgtcaatgatggaagagtggtaggtagctgcctcaagtttggacatgcacgtatagatagctctaggagggaaggaagttcttggccttcttgaaagtttccatgacttgttggcagccttggaagagctattagttcttcacatcccataatactcatgtttttcaaggcaacaaggcaatgtggcaattgttttagcttaggacagttttgtattttgattttctgtaggagatgaaactctttgctgctttcaataccagaagaagaagaccagtcttcccaatttaacatattctcaaattttaaggattctaaagatggaaatggtaggacagattgatatccttccccataaagttcaatgccaatactctttaccttatccattccttctatgacaagatctttcagtgaaggtaattgcccaagagatggtaaataatcacacttcttgcaattactaatatgcaagaatttaatattcaagaacaagggggatccaatccatcttggaaacattgtacctccatagtctttgatagtgatgcttttgatgtttttatgaggttgtagcatctcgagtacgagagtttcaactctttcatcccttgaatcatctagaatatcactgatctccatcctcaaacccatagaagtttgtctataagcattcattgtttccctaaagctcggaaaccttgtacttctgtatccaaccatgtttacatgttgatgttgtggcacatatctaacttcctcttcatctttctcaatcaatgaaccatcacagctattactccactgaaacaccagttgatcaagttgttgtttttccttcatattagcatccacagcatcaacaaaattgacaatgttctgcaatcctgaaatttggagtgaccctcgaagttgtttcatattccgcaactctctaatccccgaaccactatctttaccaaccacaaaatttgacaatgtttgaagatccctcaattcgcttagttgcaatggcatttctcccactctacttccattgatccaaagatgccttaagcatttcaagttccccatctttgatggcagcttggtgaggtagcgacattctgataagttcaatgtttgtaaattgtagagagtatttgttggctcaggtaactctctgattgcagtgtaagaaagatctaagtagcgcaaatgccttaaaccgcctattgaatctggcaatttagtaattcgacaagaattgaaagagagtactcgaagaaagcttaactttggcaacaaagaaataggaacattgttagccaaatagcttactccaatgctttctattggatccaaaggaaggaatgtacgcaagcagtcagctccattaagagcctcgaatcttgtcaatgcatcacgtttaccacgaaagtaagatgaatggcgtgccttctcaaaaattttgttcccatgatcatcttgtgttttatcctttagctgaaaacaaaattctccagaaacaaaatcagctaactccttcaagaggctatgcatcacaaattttgatgatgtattattgttattatcaacaacttgttcaaaaaatgaccttgatacaagctcacaaaaatactcatgaccaacatcttccaatcgtttcttcccctttggttgttgaagaaaaccttccgccatccacaacagaacaagcgagtccttatcaaactcgtgtcccataggaaacactgcacaaaatgcaaagcattgcttgagatgtgtaggaaggtgatgataactggatcgcagactttgaagaatgtcgctttcttcatatggaagatcccatatttttctattcaatatgtctttccattcatcttctttagctctccaacgcaaaaagattcctagtctttttactgccaatggcaagccttggcaccttttcacaatcttctcacctatggacttcaaatttggatcaccatcaatgtctccttcatctttattttcaaatgcttgactcataaacaatggccaacaatcctcataaggcaacccttttaagtaatgagatggaattgtgctcatgcttgctgcaacatcaccattttgtgttgttactatgattttactcccacttccccctgcttttaatggcttccacaacaaatcccaatcactattttcttgctccaaacatcatctaaaacaagcataaatcttttccctttcaaatgctctttcaaactaacttgaagcaaattcaagtcatcaacatcacaacttctcaaagtgatggatttgagaatggtttttgtgaccttcactacatcaaattgatcagtcacacaaacccaaatcttcaaatcaaaatggtcatccactcttagatcattgtaaaccaattgagcaagagtagtcttcccaatacccgccattccaacaatcgaaataacaccaatatgactgttacaagcttcatccctaagcaagtgttgaactatcatttctttatcctcactccttccatagacacaagactcttctaccaaacaagttgtctctaacctttgctttaacccaaatgacctctctccattgttgtccttcaatccaagaacattcttatacttggcaatcaattctaaccattcaataatctttcttagtctagactctacacctctaccagatggactaagagaagatgtaacagacttaaaattcttccataccttatgatcagatcttgtagcctcagattcagcttccaaattagatttcaatttgagggcatcagtagctagctcatccaatatatcctcagcatcataaatagcatctttagccatgtgtagccatttctccactgcagggctatgaaattgtttctcctcagcatcattaagcaatgcagtgacactcaaaagtgtaatctttaacttttcaagcaactcatcatatttctttccatatatgaaacctataaactcacgagaagctaacctatcaaacaatacttgtagaaatgcagatagaaaagcttctcctactgccatatcttctctctctctagaatggaaatcaatggaaaaaatggaaagacataacaactccaactttacaaggagacttatcaactattctatattttgacttgtcaactttggaaggagactttatcaaagaattcatcataataatggtagtagttgaaagaaaagcacataatgacaaaaggaaaaagtagcagtaggaggagcacttcttacttcctacaactcagtcactagtcactactgatgcatattgttaattaatattttgttcttttaatctcaatctcaataataatttatagttgttttgccatcaaatcgttatacacaatataatttattgttatttatgtgacatataagattattttactaataaatttttttattaagttagtttgttaataaaaaatttcatagaaactatttctagacagcactcggtttgatgattcaacataaaagtccctatataaataaaagaataaaagaatttaagtgactttttacactatttttttgttctgtttttcatattttgtgaggcattcaaaatttgtgaaaagaaaaattataatttacatatttaattattattaataaattaatctattcgtattcttctattgaaaataataataaaaaaaactatttgtatttttttgaacaattatatttatgaagcttttcatcttcatcgaaatccctactattctcaccatattatgtgtatatatatatatatcctattattatccaatgttagaaatataaatgagacataaaaaaaaaaaaaaaaaaagcctactacatatatactataatatatatcttaaagtttcccatgaatgatttatctaccaatttcaagttaccataagtaagtttttttcccctttctagattttattttttgtatggtatttttttaccttgaattttaatatgtactaaattatattttttaaactttttcggtaaaaaaaaattctccttaaactattaaaattattggatttaaattttgaaatttttacaccaaaaatacaaattacacactttattacatataaacctacacacggt

SEQ ID NO: 16738 - DNA, 14049 bp, Cannabis sativa
  modified_base (13831)..(13832): a, c, t, g, unknown or other
ctaaaagaaatcattcctttgcttttttgtttggattggatcaaccccttcgattgattacatcttaaaataacgaatctaaatatctaaaaactttcttttcattttatattgaaaaatcacatctgggttttcggtcattaaagcaaaaatactcctacggcaacccaataaacacacagacaatccacgttgtcaacgtcccatggaagttcaccaatgaacaacatattctaaggttgaataggccattcgtgattggttatattcaaaaagagttcttcacataatggatgacctttttcaccgatcgaatggcttgctcgtcaccaccattagatgtttatgttatcgtcctcgatcaagaaacctattctcaccttctacaatcttcaacccttttagtttttgaaatttagcaactcatgagtatatcaacaacccatgatgacttcccttcacgatgtcgacaataccaatggagtcaattttgttaggcgaagtatgacttaggagatatttttcgtgcttgctttatggtggagggaaggtgaattagttgaatttccttatgggttataggaggggtgatgaatcaagaagactggcaagacaaaggaagcaaactatgagcaaaagaaatgtgtaattggatcttacccaaatcccatatggtcaaggcatgatcttgattaattgggcaatatcttttttttatttgggttgcaccttgaacaaggtttaattgattgggtcttacgtgataggtctttattggaacatttgatgtgtaaattgacatcagcaaagatatataactgttcacattctctcgtgttcaaggagaatactcaattgagagttgtcaattgcaactctcaacgtttgagatgtatgattgcttggaaaaagtagggtccccaaagcatcaagtccacttagacacactaaagtgattggaccccgtatgcaagtttcacacctgtaaagtcatgccacagttgactgcgtagccttctgccacacaatacaagataagaggaggctagccaaagtttcccaagaagggaaaatagatgttaattgacaagaaaccatttcctatgaccgtgcaagcggtgccagtctatatacattaccattacggcgtaaaccctgaatcctaaggtgatcacttcagagaaatgggtgtgccaagaccagtcacacagcaaacatcttccatagtcattaaagagattgtcaatcactagattgattattataatgcaaacatggttacgatcctacaaaggccaaaccaaccccgactaaaaaagaactcttgttgtggtgacttttctaccaatacacaaccaaattttaagtactttggattcaatcttagaccaattttgactcaatgttagtcattttcatcaacaggttaatatcttctttaaccaaaatataatcttgctttggtagctctagtttagtaactccaaagtttgtctgacaatcctccccatgtacgcattagcaaagtttgtttgacaatcctcccatcatgtacgcattagttattgtgaatgaatgtcaccttgaatattcttttgcaaagtacaaacaagcctaacgagatctattcctatgtaccaagtgagtgtaccgtcaatcatagatccaatggctacaaaacttttatgtgatctgccatatgttgtgtagaaaaacatttttcaacacgtgtggacatcaatgccatcaaatttggggaagtcaaaattgttgaaatgcttacccatgcagacacttgaaatttttgagccacaatagccgatcaaatattgcaaaaacatgttgaagtgactacttctttgaaaaaacgctgtagccaccaaaaagagtaccaccaatgggctagagatgggtgctttaagtcaagcataaagcagactattcggtagatatgttcaaggctatactaattacaaagggttatacttacgttatgtttggcagaagggaatttaggagggaaggagaggtatggaggtaagcaaacaataactatggttgcatgcaaacaagtattttgtacatattacttcctcggaccgagtgtttattgtaatattttagtataatttcaccatattgttgttcttgactagatcaatgtgcccatcttaccttgggtttttgaaccaaacaaaatgtactttttttttttgtaagctctgaagcctcgtgctaaataaaatattcctaaaataggaatatgaatgaaatgaaataaaaattcaaatgaagatgaaaatatatataatttattaaacaaaaacaaaacaaaaaaaaaattgtttttattattctttggaatggttttgcatcccacttttggaatgaatagatattccgccaaaatagtggaaaaaccattaaattgaaatagtattccattgcattacattgaaaccaaataaagaaatgaaagaaaataaattattttccactccattctattccatcacccctaattgaacatacctagtttccttttcttttccaagtaaataagatggtttatagagcaaaatgaagcaaaaaagagaatcttctcgtgggagagggtcaatggggatggaggtgatcatttggtagcataggagaaggtttcagacctaatgagtttggtgttaggaaatgataaatattgtaaagcgtattagcttatttatgaaattgttctggagattcccaaaagaaaaaggacattgtgacatgatgattaaatatgacatggtgtcaaatgtaaatgtctcgatgataacctcacattcaaaagcacttggaattgttttctatttattttttttattttttgaaagaaaacctttggaattatattttttcatgattcactgagacctaaaaacacttcacttttgaactgcgcatgagactcaaattttcgaaggtttggttgggagcaaccactatggctagtaggctcccattactttatcgtattgctagctctcaagactattttggcatatgcaaggggaactggaagggtggagcattaggaagattttgttgtgattttgtggtggagcaatatgaattaatttgttagaggaattcgagatgatacatgctctagaattgttattgatgctactttcacagatagtgtcaatggctgatagaaagaaggataaagaagcctgacaattatgagactttttgttgaaatctacttttgagtaaaaaaaattggtgagggccaaatcaattcatttggaaaatctttgctccaacaaagacaaatatttaggtggttggcagctctattaagcttatacatatgagagcttacaatgtttctctgaacttgtgtgtgatgtgccgaaagatttcttactagtgatcatctatgcctacatagttacttttctagggctatctcgaaagttactataataaatgaggattaatggtgtgtgacctaattctagtcatgacatattatttgtaacgtggaggcataaggggtcgtggattgcaatgggaagacaaaggaagacactttgaaatgtggttgtccttgtcgatcgataggcagattggtgatataataggcttcaaaacagccttgtattacatgttgctttagtatactttatatagtcacatcctagcatgtaatctagattacttcctatcatctacaattaacccatctttactttgttattagaaaaaatgttaagacataattaataagacctatatagcattatgtaaaacacttctataattccaaaaatcacacacgagattcatatgccacaaccaaacacaagtatattctcatccttaacattctcaataactaaataatttgaacccctcactccaaacaaaacataataaactccatgtgagatgatttttgtagttgatttggaagcttataatagcatcaattgcttacctaataatgtctgcattgttatctattttcaatagatgctcaacaccaccaaggccagttatattgaattctgccaggcttccataaggaattgcaaccttaaaagagaaaaataaaaagaaataaggcaacctataagaacatcacgtagttcaataattccaagagaataactgacttagcttgtcaaaataataatacattgtttcatatgttagttaaaattcgtagacaagtccaggatgagcacatgtcctaccgtgggcttgacctgatatacaatttgaatattgcattactatatgttaatatacttttatattatgaaattttgactttatgggttgtttccgaagttttgaaaagaaatgtttttatgtcagcaatagaagctcaagctcaaacagattttgggattagaatgtggggacctatggacccacacatgccttacgatgtgcaaatatataatctgatgatgctcattatcagtgcatataatacttatatgtcagaaataaattggacacagctcacccggaccaggaaagtatcacaagtaatttatataaaaaaagttccatgatttccatccaatactaaaaaaaaaatgaacaaaataaaaagaatcaaataatatataaatctagcaccctctccaacttaaaaaagttgaagctttatgagcttggcctcaacattgcaaacacaggttactggttcaatagaaggttggtacagggtgatcaagcaaaaaggtacagcatgttgttgttatggccatttgctggtttgttagaataaagattaaaatcagaagaaaatccaaggatggtcaaattttatgttgtttactgtatatttgacagtaaacatttcaaaagaaattgttttctaatttggtgactgtagttttatgatgactgtttggcatactttataatatttgtaagtactaggtagtataagccaaagtgagaataatacaattgtggacggcgaaaacttttctgtaagtacaacaccattggcgctactggacttaatactgtaggcatcccttttgattgccaatgtagctggttcccatatatcaagatacccactctagaaaaaaaaaatgtaagaaaacaattagtgcagtggtttaaagagaggaaatagcagctaaagagaagtaaaatagaatatctttgtaggtattctcattgaagccataccgaatacaggactttgtaagaagcatggccattatgaaggatcttctctatatggttttgcatatcaggatctatatcaaaggggtagtaaactgagaacaaataataacatgcaaataaaaaaaatatatattattcttgtttactcagtccaaatatacttggagaaaagagggaatccattcacagtaattcggaaactggggacgtttataatgtttgcatatcataatatatatcaatttacttaccacgagactaattgatcgaaaagcaaagcagaaaattactcaccacaagtgattttttccttcccattggcaaaaacctttacaagctcaccctgctcaaaataaaatcaaataagaaattcagacaagataaaaatcctttccaaaaactctacttactaaagagattagcaaactggtactaaaccaaagcagcaaccagacctagacactttataccctcacactggccaaatatatggtatgtgaaccttacaaaataaatgtaaagtttctttcatacgaacgtatctagtttcagtgtttgcaaccctaatggctgattttttttatttaaaaaaaaatttaaaaaaatggatacaaaattaaaaaacagtagaaacggaactctgttttattcgataggaaaaaatacaaagtaattggagcgtatggtatgtgaaccttacaaaataaatgtaaagtttctttcatatgaatgtatctagtttcagtgtttccaaccctaacaaccctaatggctgatctttttgatcttttttatttaaaaaaaataaaaaaaaaaatggacacgaaattaaaaaacagtagaaacagaactctgtattaaccaatggaaaaagataccaagtaattggagcgtggttaactcagagttgaaaacatgaacctaaaaaaaattggacaaaatgaactagaaaaatgtttccaactatctctttatctttttttttttttgtcaggatcttagctatttaaatacatatataggccaaggatgagttatagctaaactacacagcatagttattgagcaaaatgattcaaagctattgcaaatttgccccttcagttgcattgtattcattttgaaaaagattgctaaagtagcactaatgtgatcctaatctagcacagtagaagatatcaggcaaaatataatgcataaataacgatctaataaaaaattgtcttcattcttagagctgatgtttgtatgtttagcgcgtcaatcaactggattttggccaacttaaacaaggtaaatagacgtactgcaactaaacttgtggcaatgggccacatcagcaaattgcttgaaaaatgaacgaaatataaagggacatttgcaatgatttgtatagttcaggaatatttttttcaaaaaaaaaaatcaaggagcaaaactcttatatagtcatagttcgggagaaaaaatcctacttattcaaaaaaatattgttcattcaatgtcatcccttggattttatttcaaaggttgtgaattgagattattgatcataccatacagttaactacacaatatccttgtcatatagacacatacatatatgttaaaaaaaaacttttaacttgaactaatagaaaagttctgctggcaaaatttggagaaacttcttaaaaaatacaaaaggataagttgtaatcaactacactgtagtatagttattgtaccaaaaaaaaccctcagcctatacatatataggccaaggataagatgctcttgttaattacacaacattgttattatatcaaatagttgatacaaggttggactagatattattgaccatgccatattcttctcatatatatatatatatatatatatatatccacataaaaaaaaatcctcagctaatactaatagaaaactgttgctggcaatttttgaagaaacttctaaaaaatacaaaatcccataaaagagcatgtaccttgcgcttcctgttatcaagaggttggacttcaatagcaaggtatgtatcaacatcatccgcagtgacaagataattgggttgctttgctcctgccagaaaaatgaaccacaattcatacacaagaagaattagggggaataatataaggaaaacgagaagtaccttcaatgtaattaacagatccatcttccaaatgacgtacccactaagtgcaaaaaagtaaaacattgtgagtttatatactagtatctaaatcaaaaactttcaaaagaaaattatttattgtaaatccagagagagaacaagagttatttctttaattgcagtgaaaaaaacttcacctcaaaattgcaactggttgttccattgattgaatagccacatgcttgaagctcgtgtcctggataagcctcacctgaaatctggaggccatctattgccggtaaggggtcatcatctgcagctgtatgttataagacactaattaaaaagtagccaaacatggtatgatctacttaatatggagtaggctagtcacacatgcttcttctgtagccaataacaacaacaagatcagatcacataaatcctagcaataattaccctctgaaaatgaggaagaaggttcttctaaaactggtggcagataaggataagaggagctggggtcctcaagtgtagtcgtgtaaggagagtttcctgaagtccaattagccgatgtttctctctcattctggcttccttcagcaccttgctcatccatctcactgtggctcacagggtcacgaaatgtgacctgtttattggtggattcttcagtatactgaggaacatatgcatcaccatgacttaatggtatttgtgttggtatatcttgagctacagaagtcctacaaaatatagaaaacacatatcaagatacccagatttacatgataaaagaaatttatacacatcgcaagtaattacttacaaccaccaaaaatctctaaataccataatatatttgtattagtattattaaaaggaagacactaaaacaacaaagagaaatttcagcacagaggaaactaagctatttgttataaaaataaaacttaggtgctgtcaacaacggcagagctaatttagctgtagtaatatgttaggaatttcttggcactttagtacaaacagtaacgaatgaaggaaatagtaaatgatatattgatattagaagatgaaggaacaatggattgctgggtattcgagagacccagtgctctcccaagagctactgctcattaactaattcattctctacccaaacccttctagttgttctcatacatatactctcccaatagcccctattacaatgacccaaataccctttttacttatcctaaggcctaacataatacagacagcaaatgtttaaaatcaggccacaagaaacaagaacttgaagtattaactaatacacaataacagacacccacagcaaagtataaacctacactacagcctaattccacaaacaatgtggaacattcttaaatctctttcaaatggaaacccacaaaagataccaaaatggcacacctttgaaaagacatacttctattttgaaataatatttacacttttttacatttttttccataaaaggcatgcaaacaattcaaataaggggaacacttccaatataaacaaagcattgaattctccctcacttaattgtcacatatgattgctattaacatgtaaacacaatttttcagtaacagatgaacatgaatgaggcagttgctgagttagtaatatattaggcatctacaattaaatacgtacgtctcctcaggttgatttttttatacggataatcaaggtgaataatgattgataggttgcaaaccctagtgacctttcaaatacaacaagggaaaaaagaaaaggcagttgaggacggaaaaaacaaatgataaaagtgcaggtaaaaagccttttatagtctctcagtgcaaaggcaacactctcatgacaaacacttagtcgatgttatgcttgaaataggtcatttcatatgtgagagaaaacagaagaaaaagaaacttgagtgaaaaaaaaatatgggacagagagctcgctagttatttgctaccagagtgaagaacataaagagaaaacattgtaaaaaaattgagaattacatactacttgcacaccaaactttacagtaacagtttaggtgaaaatatataattacaaaataaactagtttcctatacttgtcatctaccaaccaactataaaagaaaaacatcatcctttccatcctctatattttccatctcttatactttttccatcccacctattttcttcactctctactagacatacagtcatactctatgttttgttaagagaaaagataagtatgagagatagaaaagacaatatagtctcttatgttgttttgttgggaggaagaaaaataaaaaaataaaagtaaaattacaattacaatttaacaactttaaaagattattttggattaaaaacaagggtaaataggtagttttcatttagatgtatagaataaacattttccactcaacttttctctccaaattgggaaggttatatattgatgggaccaaaaacctttttttttccacccctattctcttccaccaccttttctcttcaaccaagcaaacattttttatttttctctccaaacttttctaaccattttccttttctcccatacaaacattgccacagttttagtaggacctttcaagctacaaaaattattcgtgacatctctcaatttgagagagagagggagagagagagaacaatacttgctcaaatcataagatataaacagaacaaataaacagcaaccaaaaaaaattattggcagactatgccacaaaaacctttatttgctttcccaatcacaaatgttacttgacacacagatcattaggttttccgttttccacagatcgtttcttttgcttccttccacactctaacaataatacaagttgggcatataaagaagacacattttggacaattatttatgcatagacgaccatcaaggcatcaacacaaaagttaaatgaaattagaacccaccaacaaatgcagatggttgtaatttgtattcagttcacagaagcagtctccatttgaccaggctcacctgcttgcaagaggtgaatacctccccaagtcatcgggttccgtatgatttgctgcaataccaacagtgccactttgacgtcgaaccagtagatcccattctgtagttgtctgagcatcggaattaaagacaggttcttttccagttccatgggtgtaattcagctgaggaactaattcgagcccactcatgttctggcaaagaacaaataaacaatttacaagaaagcatagcgacaagctaacaagaaaaaataaaataaaatgagaccgtactgaaggtgccaacactgcactgatggagtgagatggcgaaggtggggcaatatttgagttattgacatctgaccgccaaggggtcaattgatattgagattcctttagctttgactgacaacaatgtaagagttaaccatgacaattaatttagaaattaattaaacatgctccaaaaatcctagttaacctcaagaatttaaaaattcaagtattccatcgaacaatgtacttgcaatgcatacctcagtaaggaaaagcttctcctgcaaatgtttaaacagaacctgcaaaaagcagatcataccattaaaatgcaaacctataaacataactagttttgaactttagacagaagaaaacaactactctcacaagagcccatgcccttttaaataataaaaagataataaatttgccttccacgtgcttaaaattccaaatctaggtcagtgtaccttccacattgctaccacaaccttctgtggctcgcacctcaatgaaaaaagtggataaaataagaagaaaaagaaaatgcacacagtttgataggtgaagaattttgtataacttaatgtttaactattactgttactagtaacatattcaaccgtggtcttctacacccaaaaaaccatagcatattaaaaaagtcatcagtgagcaaatggttgattccaacgattgtcaataacaagatttctcgatacacatagaatgataagattaagtccaaaatataatgctaaaaacttccattttaacttctgataaactatttaaggctgaccttgacattgctgacaattgattgggcatcaggaacaggtggctgcagagaatattccgctagaagaggcaacaatgatgaaacaaatgttgatctttcttgttgtgcatcctggcaaaagggaagaaatatagtcatcaaacaactaggctctgaaattaataaagcaataagaactcatttccctaagaaccatttatcgtcgcgcgcacacaaaacaaatgaaaattgaaaaccaggataaaaaataatacctgtaatgcatatgtaagacgtatgttttcctcaataatatcctgtctgtatgaaagagctttagaagcagcatcaacaaggtcttgttgctgctgatcaaaggcctaaagaagggtgataaaattgattaaaagatataatgtacaggggataaaggacggggctattgactgagagaaccaaaaggaataaggcattgaattccaatgtgaaaaaaaattgtgttctccctaccaggcgcatataagcaattctcttttccaaaacatgtttttcattgcgtatttgtgcctcctatcataaagtaagtcatgagtcaaaattaaagataagaatacaaagaatagaggacaggaaaaagtaggaacagaaataaatagccacttagatatctatggttatgctttacctttattgaataatcagcaaggtgtttccgtaattgcataatctcttcttcatgctctcgaatcttagaagtaagatcctgtaagaattaagcgtttgctccataaaaaattatcttctacaataacaatttctatacccaaatgacaatacctgcttccagagactagtagaattagttacttcagccatcggcatcaaaacttgtccagacaaattgaaacggggatcataatctccttccatttggaacctgagatagatgactcattttcttaagtgttctatactccaacgtaaaaaaaatactattatctgcataagaagtcatataaccttcctgcagaaaatgatgttgtagatgaagcagagagtccagcattatccaccggtgggtgaccaccaggatgtaatttaactgtcccgttgatcttgctggcatcagagtgggcttctgtgtcactttgtgtagtaacatcattattcggcttcacatcatgatgaacaaccaatgtgccaggtaggctaacagcagaagtgttgttcatgctcttatccctgtcttgttgacttttaacaaagggaactgatgggggagactcataagatccatggccatgcccagcaccagaatgagaactttgggacactgagtcatctagtttctgtcaaaaaccgtagagtcaccacatgaaaatgacatagaagatacctactgaataccaccaaaaacccttaaaagaacaaaaattacattatctgaccacatgatctttctcttatttttattctcagctgttgtagcataaataatttactaatagttaagcaaattagttgtgccgagcaaaaccaatggaacttgaaatgaaagaagcatcctaaattcaaaatttgcctattttggaagacgatgcatgcaaagttactcacagttcttttcagtcagtagctacccaataaaatgtctatatatttatatgaatcacgtacagtgcttaagatagtttgggctaaatcctgcctgaaccgaaaactcacatatttctggaggaggagactcttatgttggagctccgcccttaatcggctattctcgtcgacctgttgcttgatggtggcttcggcagcttcaacggctttcatgacctgaaacaagctactatcgttgggattattgatgttatcatcggacgaaggatctccaatggaagagcccatccctaaccctaaccctaacttcaaacccgagaatttatcggccagtttcccatcatatccattctccatggctggatttcgcttggcctttatataattctcaaagtttttggggctttttctcgaaattggaagaaggaagcccttcttcttagatcataaaaatgggactatcggcatgatctcttctttctttactaccacaaccaattactaattcttccgccttctattcgggactgaaaaatgaatataacgagacaaagaaataaagggattgtcaatatcattatgttatcactattcaattatgtctgcgtgcgtgtaatttactaatacagtatttttatttttatttttgaaagggctaacagcatctcggagctcatcaaatttggtgttacacgttaaaaactatcatcactctaaccacaatactaaaaattacactaacaaattatttcttattattatattanntttttaataaaataaaaaataatattatattaattaactaaaaccaccacaaactaaaatgcacaattttaaataaaatagtcacacgtgtaacagataatttgaactttattttctgcttgttaaatttttctaaattttttaaaattttacaaaatatcttaagtaattataatatacacaaccataaaaaaaataaactaaaaaattctctcaa

SEQ ID NO: 16739 - DNA, 7760 bp, Cannabis sativa
  modified_base (7051)..(7054): a, c, t, g, unknown or other
tccaccgaccaaattgagaaagtctatctacaaaagtaacaccttcaaatatttaacaatactcattttagtaataataacaatataatagttttgtgttaaaattcaaatgcaaaatataaacaagtgataaagttgaggtctttagaatcaagcacgagtctttcaatagtggtgattttttttaactgctttttcacctcaaaatattgacattattaaaaatgagtgagattcactataatattattaattattgtttttttggttgggaagaaaagtttgtaacagttgctcaacctcataaataatttgccacttgcttcactacttggctgacacctgtccccttattccttatctaagggacacatatgcaaccacaccaccacataggaaagaaaacatttttggattttttttttttttttttaatttttattaaggaaaaacatctttgggattttgttattttggtattaggtgttgcccatgcacataatactcaatcaacacgcaatgagttatagttggagttcaaccaattataaaaaacaagaatcttaagaaaaaaaaaatcaacaaaaaaaacttaataatgattataaaatattacaaaaaacacatattcattgagcttttgattttaaaacccaatttagtcaaagatttttccttataaacataatgtcaaattttaattatgagcaaaaattatcttctgttaataaattgatgattaaatgtaaatttattggatcatacaagcccttactaaaatattacttgctcttaaaacaaataaataaatgaatttcccattttatttaatggatgaaaaaaatagtagaaaggtacttttgatggaggagaagaaaagaaagaactgtttgacctaacttataatgcgtttgccaaaaaaacaagtaaataaaaaaatgaaataagaaaagaaaattatttattttttatttaataaaataaaatagtattattatttcttcctctttctatctactttctctctctttggttatatgtggagcccatatgcattgctggctttcagccatcgctatgttggttttcttttatatgaatttgtctcctaaaaataataataatataattaattaattacataattacaaaataaataaataaataaaaaataagagtcttttagttcgttcaatcaccctgattgagagctccatattcaattatctctctttttatcttcttcttcttcttcttcttagttttttctatctctgtaaccaacccagaagagaaaaaaacaaagataagagaagaagggtgtgactcatatccccaaaccctattgccaacactttggtttgatttgatttgatttgatcgatctatagatctaaagctttcaaaacacatgtatcgttttgtttcttttagatctccatcattttcgtctgctctgattcactgaactgatcacacaatcttaattctatttattgttgtaagttttatctttttttttttatcttaaccctttttgtccttttttgtttccttttcaaaaatcaattttttatttgtttattttgtttgatttgttcttttgttgactttcaattgttgttaatctttaacttgttattgagttctttttagtctgatgaataatctatagctatagttgtatagtagaggagaatgtataggtttaagttttagtatcaatgctatttttgctatctattcatctctcagtcatttcctaatagtttttttcaaagtttttgagcagaaatggatttggatttttgatattacgccttatttaaccactttgttgtgtggtatcagctgaaatcttgatgagtgtttttttgtttggttatggaaaatgatcaaattttattgcttgaggttcctttatttgatattgattttgcttttttatggtgtataatttggtatgtgcagaggaggtaggcttgtgtagtttggtttctcattggattgtttaaatacatccatttttggatgtggaggtgtaagaggcttgctggggtgaaatgagggatgttatcaaggttgatgaacattctgagggcctgctggctgccgtcctcggatcggtatgttcacacaggttcggatgcagccggccggcaagatggtttattgtggtacaaagacacaggacaacacatgaatggtgaattctcaatggctgttgtccaagccaacaatttgcttgaggaccagagtcagattgaatccggtcctttgagcacacttgactccggcccttatggcaccttcgttggaatttatgatggccatgggggtccagagacctcacgttacatcaatgagcaccttttccagcatctcaaaagtaagtttttttaatcataataaatttgttttagttacttttttgttgctttctggggttgttgttgttgttattgtaaactaaacatctaaaatttgctatgtgttctttatagctgaggattaagtcatggtagttggtaatgttagttaatatttgattttgctaacagggtttacttcagaacaacagtccatgtctactgatgtgattcgaaaagcttatcaagccactgaagaggggtttatggccgtagttacaaagcaatggcatatgaagccgcaactcgcagccgttggatcttgctgccttgttggtattgtatgtggaggcaccctttatattgctaatcttggagactcccgtgctgtgttggggaaacttgtcaacgcaactggggaggtcctggccatccagctatcttctgaacacaatgttgctctagaatctgtgagacaggagatgcattctactcaccctgatgattcacatatcgttgttttaaagcataatgtatggcgtgttaagggcttaatacaggtaagaagtgaagtgaagggtctatttaaaatgattttcatttggttatcttctgggtttcctctttggaaaactcattactggtttttatgttttgccaacgctttggtactagtaagaatataatgatggctttatactatgtaatctaatctatttgttaaaataactattctggccctattattattcacagttagaaaaagagaatataaagatcatgaactgatgatttgttgataaggaatagtagtaacatgctattgaaatgatagagaaaagagtatttagcctttttgtattgtttaatgtatcaattaaaatatttgaagtccatttctactaattgtgcatgaaactattgtgttgttttttcttagtgcatcctagtatgctttttttttcttcttttctttctttccctgatatcatatatccattgtcattctgaatttgaactttgttttctctacagatttctagatctattggtgatgtatatctaaaaaaggctgaattcaatagggagcctttatataccaaatttcgcatcagggaaccttttaaaaggccaattttgagctctgagccatcaatttctgtgcatgaacttcaacctgatgaccaatttgtcatatttgcctctgatggactgtgggagcaccttaccaatcagggagcagttgatatagttcaaaatcacccacgcagtgtaagataatcctctttctacaaaaatcatttcattcagttagtagtctgcaccattttattgctcaagctgataaattacttgtaagaattatggggaagctccttgtgttttttttaataactggtgcatgtcattcaacttttgtgtcaatgataaagagttttttttgtttattgaaacctatggttcttggattcatagctatttatttagttggtttatttgatttattacatgggatgcagatgtatgaaaattatacctaatgaatcacatcaaatgccatgccaaaactacttcctttaaaagaaaacaaaatttcagctggctttgttgtttttacagggaagtgctcgaaggcttgtgaaagctgccttgcaagaagcagccaagaaaagggaaatgaggtactcagatttgaagaaaatagaccgcggtgttcgccgacatttccatgatgacatcacggtaatagtcttgtttctagactcgaatcttgtgagtagagccagttcagttaggggtccaactatgtctttgaaagggactggtgttaacatacctactaagactctgcccccttgcacaatggagttcaatactacatgatgaatgatgaaccaaaaccccgtgcgcatgactgtcacttagtgttacctttctctgaagtcgaaaaccccacgatcgatcagctctgtaaatctaagagagatgagagaaggtgcagtcaattaatttttttcttttttactgtactatgtaacatttaacttgggacttgtattttatttagtttctgagaactggagcagaagtaaaaggaaagaatcatggaaagttgctcttcaaaatttgatgctgtgaagattctttcatcaagactatctcctctacggatttttaccctttttccttttttttttccagagttcttgccttatgtaaatcttatgtgaaatgtcatttctgaaaattcagaactctgtgttgctgttgttttttttttttctttctttccctgaagatgactcctcttggggctaccacttgaagaagggttaccctttgctttctaatgcatgaggctgttgaaatattctgagaatagtgccttttctaaagcactggataatgattctctttgttttgttttgttcttaacaaatttaaaacttttggggtatttttatattagagggaggaactgtaaagatttcatggggtctacctttaaccttagcctacattatggttagagatccaagagcattaatcatattatctttttccctttttcttttatgggttaaaaccaaagaatctgatttcaaagctggagcaaagcacaacttattagtagagttttgcataataatagtaaggttttatttaagctcttcactaataagacaatgtattagctttttgaacaatcataaaaaaaaaatgtaatcaaaattttgcgtgagatttccaaaaaggactaaataaagtcttcttaacaactaaagtttaagaaactcaacctcattaagtgcttttgccttttttttctcttttcttcccccaccttgctgtgagttgtgacctttggttttggctttatcttataccaaagtccatacacatattttgcattatttcacaacaacccatgagatgagagaggcccctctcccttttaactttgtctgtttgcttctcacattttgagggcacaattctccacagtcacaccaactggcaactaatagtattagtattagtggtaatagaagaagaacagtactactgaaagctttctgtctccagctcagtaatgtacctgcattaactatcaatttgagctcttatttatacacttgtgacttatgaacactgttctcttttagtgtcaatagcacttcgatgaaacttatatagataaagtgcacttttaatggcagtacttgtttttatcctaatatggttcaaacaaaaagttcccactttgcacagtagactatcatcacttgtgcccatgtatcatatcacattctatcccaaagaaaaatactaaagagcagcatcttatattactcaacacaccattattattattaaatatttggtgttagaaaattacaactaatatacagaatcaaatcaactaaaatttaatcaattagtaaagttaagattaacaattcatatacaataattggatagtattaaaatcagaaacgattaaagttacagaacaataaaatcaacaccaagatatatactagttcaaatcctatagattgatatgatttatgtactccagttctagaacaccatcaaaatcttctttattgattgagcacatgtcacaatacaatcgagattgattctccgatggattctcacaaagtgtttatctctctcaatctgacccaagaatattcttcatctacaaaagattcttcatacgaaatctaaacccaatctctctattttttctgtacctctctctctctacttcttaattttttttctttcaagatcacctcttgaaaactcttctgatctcgttctccccaaaaatataggtgtgtccaagatatagattctaaagctagtgactgcatgtgctaagttgttaaattagttacgacttaacaaatttaataaactcctatagaaatatctctacatcaacacaagttaaagttcttccggatgaagcgaacaattccgagactaagaactgaagtgtaaagtacacgttgaagggtctttcgagataagaaaaaagatagttggagtcgattatccgggactcccttccaggaaggaataactagccatccgaaactcctttttggaggaagacaagttttcctgaagattccttccaggtggacatgatagacatccggaaacacccttccggacgacatctatcattctacaagacttatttcggatggtgaagttagacttctgggaacgctctttcagatgtcatctaactttcaataacgagaataacttttggaatctttttatttggagaaactatattacaattggctttcatatatttaatggaattttttttaaaatatgggaaaatttaatggagtgtacttttatatggcataaataaataatgcaaaaagatatgagattaaaaaataattaaagtttaaaatatgggaaacaaaaaaaatacaataaataaatttgataaaatttctaataataagtttcgccaaaaaaatcgcaagaaaagtcaccatcgctggaaaaatcactagaagtagatgtctcagatgtaaataaaaataaaatcggttctataacattataaataaatataaataatatagaataactcaaactggttataaattaaaaattaaaatagaactggttctatnnnntaatgaataaaaataagtaacacacaataatttaaactagttataattaaaaatagaaccggttctacaacataatgaataaaaataaataacacagaataactcaaactggttatcattaaaatagaaccggttctataatataataaataaaaaataacataaaataatttaaaccagttataattaaaatagaaccggttctttaacaatattataatgaataaaaataaataacacgaaataactcaattcggttatagttaaaataaaactggttctataacataatgaatacaaacaaataacacagaataactcaaatcggttataattaaaaaaaaaaaaaatcaattcttaaaatactaaacacataaattaaaaagagtaattggcggttaaaccctcccaactcttattttacttgcacttagccatccaaactcaaattttggtgggaaaacctaccaaattataattctatttgcatttttaaggtgtcgtctaacaaattctgttaatgtgttattttgcttatgtggctagtgacacatcactattagaatctaacgtggctgccaacatagattgtacatgtgtagaaatatagacgtgtcacatttagattggtctaattaatttatattatctaaaattaaaaaataaaaactaaagtttaaaaaataaaaattatttcagattctta

SEQ ID NO: 16740 - DNA, 3611 bp, Cannabis sativa
ttacttttgcagagacccaatttcataaaaatcgtttcttcgaagttcaaacacgaagaagaggtaactttttcattttctttctttctttttttttttttttttcaattgaatcagagacaagaaatgttttttttttttttttatgggcatatcgtaatctttatatgttgtttgttattatacgattgtgatgatatgcttattattgggtttgcatttgcatgttatgataggcttttcaagacccttttaagacagaccaaactatgtcccattttcaaagagaagaagaagaagaagaagaagaagaagcatattatgacttctcagattctgatggtgactttgacttcgattttgtggtgagtcatcttaacttaactaatagttaaagattaaagattttaactttaatctctcttttggtttgattgggtttgtttgtatttgtttttttttatttattattattattattgcagcaaaatactaaatcaactgatataactgctaagcaagctagagcaggaaaagatatccaaggtattccttgggagggacttacttttagcagagaccaatatagacagactaggttggaacaatacaacaactatgaaaatatgcctttttctggacacacctcttcaatggtattaaatattgttattatgtcttaacattatagctatgtgtatagcttgcttgcttcatagtattgactatttaatactatctatactctctaacaggactgtaaaattaccaagaaagggtctacattctatgatttcagaagaaatactcgatcagtgaaatcaaccatacttcattttcaggtttgctatacaaaattttgattttggatcctgtattttgcaaaacttaccgattagaccttctgttttgttttagacaatttagaccttgtgttttacaaaatggaatgtaatgttacctcaaatttgattttggtcaaacttttttcaagttaggaatatgatacacacttgtgctcaattattaattcttgaaagaaatgtagtttattgataagaggaagaacaaatacaaaatttcaagttattcaagaaacttggtagactgcccgagtaatattttactctaaatatttcacaccaaaagattcctcccctctcacaagactaacaaataatcctaactacccaaccaaattagaagacacaaatttagaaacactgaacacagcggctaaggacttgataacttagcctccatacttctaatgagttatgctaatcagactaatattaaggcctaacagagtagaatagaaattgaatcacgattgttagagttagggaaaagaatcttttaagtttaggaaaaccaaaatcgagctcattgtattattatgttcttttttgcacacggactctaaattgtcatttaatataatattaggggttgatcggtaactttgataaaatacaaggtccagaatggtgttagtcaattcattccgaagtaaaacaacaacaacacaattatttttgttgttttggtgatgcagttgaggaatttagtgtggactacttcaaaacatgatgtttaccttttttggaatcatctcataattcattggtcaccattaacttccaccatgtttgaagttctcaatctttcaggacatgtagcaccctttgaggtcattctttgttttgtgttgggtttatttattttatttaatttcccttataattaaattaatctaaaagcttattcattattgttgtcaaattcacttactaagttttgccatgtagaatcatcccggaagtcggctagaaggatttaaacaacctcaaatcagtactttcgctgtaaaagacaatcttttagttgctggaggacttcaaggagaacttatttgcaaggtgaaaatgatcttgattataatttcaattttacgctttgaatttattttatttacaaatataccttttcagtaaaaataataaaccgtttttttagtttatttgcaaggtgaaaatgatctcggttataattttatgcattgactgagtctttgaagattttgaatttcatttgagtctataatcaattaaaaagacatgtttgaacactcttaagaattgttagattttcgtttggaaatacagcatcttgatcgacctggagttagctactgcgccaagactgtcaccactgataatgccataacaaatgccattgagatctatacaagtccgaggtaaatattttaacccttttcttcttttttcgcccaccaacaacaccaaaaaccaactcataatgctgactatataactattggtgtcttcaatttttagtggtgcagctcacttcacatcagcaaataatgattgtggagtcagagatttcgatatggaaagatttcatctttctaagtctttcgtctttccttgggcagtgaatgtgagattcgaatccctttgcattgtgtctaaactctaaacccactgctacaataatcttgaaaatataatatttttgctaatctttttggtctctaggagccgatgtaatcactgaaaacacagaggaagtctttactacatcggtcaccatgctcgactgagatgattgggcgagacttgaaagcctgacttgtgtgttgtgttgttgtgtctttatttgcagcatactagtttgagccctgatggtgaacttcttgtagtcgtcggggacaatcagcagggtatgttagttgactcccaaactggaaaggtactcaattttcatatctaactttatgctaatattaatagcaatatatccaaatccgaaagctgaaaactttgcataatgcagacagtgaaacacttgcgtggccacttagatttctctttcgcatcagcctggcacccggatggtatcacatttgcaactggaaaccaagataagacttgcaggttatgggatgttcgcaacctctcaaaatcgattgcagtactaaagggtaaccttggagcgattcggtctattcgttacacatcagatggtcagtacatggcaatggcggaggctgcagattttgtccacatctatgatgtgaaaagtgggagtggctacgaaaaggaacatgaaattgatttgttcggtgagatctctggcatatcattcagtcccgacacagaaacactcttcatcgggatatgggatcgtacttatggaagtctcctagagtatggccgacacaggaactacacatatctagactctttgatttgagtttggatctaaaaacttgtgtttgctggtttggttggtttaagtgagtgagtttttagagttatgctaatgtaaatacagaacagaaagggctgaagtcaaagggtttgactttgatgatagatttatatgtagttcagaaaatagaaattaggagagtgtttactcatatacagtactattagtactaactggacaagtttttatctttttgtgtgttttattggtctcacaacaaactaacatcagattttttttttttttttttttaaagaaaacccaaaatgtgtgggtatatgaaaatccaaggagatctccctcaatcgttg

SEQ ID NO: 16741 - DNA, 7053 bp, Cannabis sativa
tcatgagttaatattagttaattgaaatctgaaaagtgaatgttaggaatactctaaataaataaacataggttttgatgtgaaacgaaagtattcacatagcttatatggtttttagattattgcttaatgccaattgtttgttgtactatttcagagatgtgagtttaggttaatttataatttgtcatcatataagaggaagaagaacggttaataagttttaataattgagcagtcaatacaattgaaatcatatccctaaatttatatccattgttaaacctcttttatttgtttgttttatttgatttttgtttagtttatttagtttcaaaatctatctatttgattgccaaatagaaacaagaatttaattgattgatacctagttacagtctttatgggaacaatactttactttcattattaatacttgtaaatgaaacgtatatttgcgtgttaaatttatcacaacagcagtaaaaacaataagtaattcaaagcattgcacttaagttaccaagtgagcttgattcatgaaaaaaaaaaaaaattaaaaatcaacaattttgtatgaaaaaaactccattaaatctaaagaaatggactgtagttgatttgtctaaattttaatttattgaataattaaaatttgttctaaaaataaaaaacattttgtaatttattaatcacatttgtttcgtgtgttagatttaatgaatggttactaacaacccaataaaagtagtgtaaatttaaattaacatagaatttgtttaattaaaaaatttattttagaaaaaatggagaagaaaaaaatagagatgatcaagttcttaaataaaattagagaaaaaagtatctgactatcttgtcattcaaaaaatgtaataaatcattctcttgtcaagatccaaacttttggggaagagtgtcagattaaataggagcttactcagcgtaatcatcatgattcaacttacttgttttacttatttggagttgagttgagcaactagatctacttcttgctcttttatcacaaaggttgggtttatgaggtaacttcaattcttgttaaataaggcctcctgagctgaccgaccgtacattggcatcctttacatgtaggagatttttttttggaaatgttttcatgttggagatggtaaaaaaacataatcaattttgcattcatcaataaaaccccattttgttcgtcaaatcctaaatagggcagagaatatttttaaaaacaaaaaattaaccgacacgagaaataagcagtcgcttgtaagttgtaaatgccagtaaagatgaagattaatttaactgtttatttaggtagtggtatgttctcaatggtttaacatgaatgatataatttatgagtcacccatgtcaatgcaatggtttttacagtgtaattgttaatgtcaattgttgcaaacacgagcaagaacaagcaaaaaggccaaatcaaataaggcaccacaccctcatcattaagataaaaaaagaaaagaagatcccaaactctatgtctgctccttgtaaagagaaaaacatcacttacaaacacaaagactaaaagaaccacgcatatacaacatatcaaactccccaaaacacactcaccaaccaagtcaatatacaaagttagcttcacacacactaccagtcaactttgtagcactaaaagaatatatataatatatctcactaacactaacaagctaaaattttctcaattattgcttttactcggcaaaagaaatgcaaaataaaaagtatttgtagtaatataactttctttttccataattttcacaagttcaagcaatatacgcctcttaagacttcattgatttgtctataccatatgctcactaagcttttgtacattgttctgggatatcttcttcctggggctgcaaataaaacacaatcgattagttctagaacaagtatcagcaaggaaacaaggaaattcctaagctatacccagcatttcactcactatatacttcaatggctcaataagcattatatttttaatataggatagcaatataaaaaacaatttatattgaataaaagggagagatgagaagataatagagagatgagaagataaaaaaaagtatcagcagggaaacaagaaaacgctttgtacaaggaaattcctaagttataacccagcatttcactcacactatttacttcaatggctcaatcagcattatattttttaataacaatttattttgaataaaagggagagatgagaagaaaatagagaaagcagattccaagcaaaaaatcccataagctgtaaatgaactgtttcaaacttaagagatgatgtatatagtgatattggtcctgattatgggtctaataatatactgaagaacagaatgaaagaaagtatatatagcatgaatcacattgcagtgatactatgtgaattaaaagattatgacatgcattcatcttagattacctgttttccattgtctgagggaaaatcctggttagattcttcaacaaacttatggagctctaatttgtcctcatggatacgatcagcttcaacaatttcacaagtcacttcagaaacattaatgattttatctacaattaatacagttgtctcctcagcaccttcacaagtttgtttaaacgtttgctgctctgatgtagcactacaccaaaaaaatataaatataaatactgtgacaaacccaccataaaactgactagtattcaaactgaaatattcttttgaaaaatacaagaatttaaattcaaatgaattatttttacctcttcatagtgatttgtttggatggaattccatcgccatcatattgttgcttccttttcttagtattttgccttcttttctcaactggtagatcaaaattattgtcagaagatttgttagctcttcgtttcctccttggctgcaaatcttggtgagcaatcatggggtcacacttttcaacaacagcttcactaagttcagcttcagaatcattgataccttcagcaatctcacctactgcaggcacttcaactatctccttaggttctccaaaagaatatccatgcaattgcctttcgttgacaatactctgggtcttttcttttctcatagacctgccatctttatagtgagaaatcaaggcactctcatcatacttcaaagaaggcttctcagaagaggactgcctgaaaatcaaatcagagcattttttgatccatgagaaccgagcagacctagatggagaaaatacatctaatttaaaactagatggtgaatcagatccattgctatggttagcaatattattttcattttgaaatttgatatcaccatcttgagcaactgttgactgccttagttttttctttcgagaaagtcttttgcgattggatattgaatcagatcgttgcatctcaagcatggccatattatccagggcagctttaatactctctagtttcttcaactcttcaatttgagcctgaatctcttctctgtcaacatgcaacatctccctctggtttttcaatttttccctttgcaccttaagttcatcaatagcattatttagctcagtccattcctggttcctttgttcccgttccaaatttatctctattctttctgcttcaagccttttcatttctaaggcaacgtgttccaactctttcgccactttatccttgagagagttaacatgctgaagttcattcttcttttccaactcaaagaccatctctttctctctcaaagaactttctaattcttcatgcttcttatcgatacagttctccaagtccctccgtcgcatctcaatgtcaagtaagaaatctgcacgttcttgctgcatcttgttgtaccattcagatcgctcaagtaccatcttattcatgaaatcctctcgctcacgacaaagtgactctacatcacgtttgcattgatccctcatttcatccttctcatgcctgagattatcacgttcctccttaataaacttggacaaggtcattctctcttcagccactcgctcagcttccttccgtagttcttctctcttctcatcaattaattcccactctgcttcaaactttgccttctctgcagtcaacttatctgcttcagccattagttctagtttctgagcacggattgaatctatttcttcctttaggttcgtctctagagttgatagttcacttgtttccgttttcagattctcaaacttttccttggcacaatcaagttgtttctttctgtcttcaagtgaattcaaagagttgttcagctctaacttcatcttgataatctcttctctttctctttgtaaaagaagtttgctcaactcaacctccttctcttcaacagacaagcttttctctttctcatcaagacattttgacatctctgcaacctctttctccctatccaccaatgtccttgactgcacttccaagtcatgttccctttctcggacaaggtcctcacgctgattaagatctacctccctcaactcccaagcacgcctttttgcctcaagttcatcttcaactattttgcatttgatctccagctcagcatcaaaagcagactttcttgctcttaaatcaacttcatggctcgcaataaccttttgaatttcattctgcaaaatccattagataatcaatttaatgctaattgacaggtgatgaagtaataatagtagtttaactcttcctcttcccccaccttacccaactcccctcattcaatggtaataaatgataggttaatgcaggaagtatatatgttgataacctgaatggttctaaatcttaaggttaaagcatgaggaaaatagcaaactcacagattctttgctcgcaagtttttcctgtaaaagagttaactcttgctctctattacttaacaaagcttgccgcttgcttagagcctgaaaacagtcaaaaatatgttccattgatattcttggaaagctcaaaatgtaatacaaataaatttgtaaccctacaataaacactaataaaaattaaaagaataaagagtgaatgaacctcttctcttttctttaaggaaacttcagttagttctaagtttgatttctcattaattaaggctctacgctgctcctttatatctctttttgtgttctctaactctttctcaagttgatctagcttctcagatcgactgaaaatataatcttctctctgacttaacaaagtttgtgcttcaaacaatctatcttgttcttgctgaagagactttttcctttcacataaagagagcctctcaagactgattcccctttctttttcatcacaactgttatatggaaggaaataaaaaataaatgaataaattaaaatacttccaaattgaaagataaatgaaaacaatggtgggcgattcaagtaataataatatatgatattaataaatcaaggaagaaaaacttaaacaaaaagaatgaaatccatactctaatttgaatgtttcaatacgcctcctaaggtcatcttcacgggcttcaacttcctgcagttttctttcagcaacactgcggtatcgactagcttctagctgtaaagactctgctgcttgcagctttgcctcggcatcagtaaatttactatgagcatcttccatcatcctctttgcttcagctaatttgcactcagccgcaacttttgtttccgcagattcagcacgcatttcatgcaatgccttttcaatctaccaacattcacatatatatagcattatgtacagaactaacagatatgattaacaatgcaactatgcaaatcaacacttaaaaaaatgacaaaaaagcttacacttgttatgcactcttcctttactcctattgccttcttgagtttatcctctcgctttcgtgcctcagctaatgcggacatgtgtgaagcttgatctcgcttagacaatatttcagctgtttcagcagaggctttaatttgttcatagttggaagacaattctttcttttccaatataagaagacccatttgatattggtggtcaaaaatctacattcgatgaggtaaaatcataattaaagatttaaacataaatccatgtacatctcaatcactttatgattacagaacatcgaataatagactgataataatattgtaagcaaaagaaataggcataaagatgcatatgtgcctatatttctcttaatttccaaaaacatagaaaaaaatattgtttattatcgcacacaagccatgaacatattaattaaggtcaagaaaaatcatttcacttttggaatttatttaacacataagccaaagacatctgcacacccaagcaaagaaagaaggaaataaaaaaaaacgaacttgactatacagtaaacgaaacctaaaatgatgctaattgaaaaataagtaataaacttaattgttttccatgatttttggtacatcatacatgtgttccaaagagaaactgcaatgccttatagatatttaaatgtggttaaaagaaaaggtgctacctgtataaatacaaaaaaatacatagttacatatactcttaggtacttccaaatatgcatacaaaaatacctaaataaagcataaatacttaataaagtacatagcaaaataaataggatatggtatcgaaccatggataatccccggtacagttacactaatctaaattaagatattaaacccaacaacacgtactgatttcaacatttacaaaaatttatcgaaatggacacgtaatgctaatcaaactcttagaagaaccgtttgttatcctcaagatcaaagaaataaaagaaaatggattggggctagcgaacaacctgagtttaaattttcaactcttaacaaacaatatagtatagcatactaattttttccctacatttatttgccattcaaaaaataaaattcctaaatcaactacattcttcgaccaccaaaaataaaaattccgaagaaaaaaaa

SEQ ID NO: 16742 - DNA, 6679 bp, Cannabis sativa
aacaaaagtggttatagaacgcatttttgtttttaaaaaataaattttactttcattttgtgattaaaaaattaaaaaaacaaaagtgttatcaaaccgcaccttaacttttatttttatgattgaaaaattaaaaacaaaagtgtaaccttaatcaggtaggtgaggcactccagtttcctaactttcgtttgatgatgaagaagacggaaaaaaagaagttgtaatcatagccgtccatatcattgactaatgagccattcaaagtcaaatagcacctacaaaagacttctcatgaaccgcgaagcagaggatccaaagccccattgatccggaagccattgaagtggagacccaaacaaaggaggaaaaatagaaaaaaaggaaagaaaaaaaaaaaaaaaagaaaaacagagagcaaaacaatacaaaacccaggctagcaaaatatcttcgtcttcttcgttttcggggactcagcaaaattagcattgaataaccctaatgtcatgatcgtttgctctcggctctatcgtagtaaccagcttcttcaccatgatcaacactgccaacggtatgatgtcaacggcttcttcatcggggaacgcccaatcgcctggtctgaagacctatttcaaaacaccagaaggtcgatataagcttcattacgaaaagactcacccttcgggttttctccactacacccatggcaaaaccgttacccaggttccttggtttttcattaatcaacttcttttcctttcctttctctctcaatttactatttgaatagtgttttcttaagaaatttttagctgctcatttcgtaaaatcaaatgttcgctgttgggtttgttgaatttatttggttctagggttttcctttccttttatgttcatagctgtcgttttttaggattgtaatttgaattatttgaaatttattataaattgattattgatattgtgaaggtacgttattatgttcatatatttcaatctaagttcttatgattttccttcaaattttcatattgtggaagaaatttcgcttagatataataatattcttatcaaggaccacttactgaagttaacaccaagacatgatctttacaagtttatagaattcatggcattttgacctaaatactaaaacttcagtggtgtttttgtttgttcattaatcaggtgactctagcatatctcaaagataaaccttccccatcaacccctacatcctcacaatcaagcttcactaccagtggaggtgtgcgatcagctgcagctaggttgctaggtggtggaaatgggagtcgggcacttagctttgttggcggcaatggtgggagtaagagtgtcagtgcaagtagagttgggtcattgggggcttcaagctctaccaatttggcctctacatcaaattttgatggcaaagggacttatttgatctttaatgtgggggatgcaatttttataagcgacttgaattcccaagacaaggtattataataattttagattttagttagtttgaagataagtgtttggtgtatgagaggtttatttctgtatgtaggatccaataaaatcaatacattttagtaattcaaaccccatttgtcacgcatttgaccaagacgcaagggatggtcatgatttgattattgggctgaattcaggagatggtaaactttatttcttgaaactaagttataatcttgtttttgagagttagaaatttcagttttagctgttatgtgtattactgcagtatattctgtctcactgagacaacaattacaagatgttggaaagaagcttgttggggcccaacactataacaaagatggttcggttaatagcaggtaagactaaagtgttattgtatttttttttgttgagaaggtcattgttcatatccagaatctgatgtgtacacttggtaattctgatgtcacacttgggttagattcagtgtccctgaaattgagatatgatgtaaagagagtgtttgttaattatgtttgatagatatctcttatatttattactagaaatatttgaagttcatagacataagtgttgtcaaggtatcatgggcctttaaaatagaaagaaatattcatagctttggtggaaaagcaagatatgtatatatttctaaattgcatgcttttacttctgtattcatattggtaggacttggcagctgtagagggtagtctactggacaatttgaacattcactcaagtttaatgatactgaaaaatctgattcttgaattgatctttgttttttgaaatgggtacatttaatcttggtctctgtaacatgaccatagtaaaacaagtattgggggtaaaaagacaaaatacttagctgcttatacttattccttttttatatttatttttaaaatcgagtccttttagattttaataaaatattttgggtacgggttggattttctttgtgtgtaatgtatgagaagtctgaagtctaattttggagactagtttatttgacacgaatttccaacagccgctgtactagtattgcatgggtgcctggcggtgatggtgcttttgtagttgctcatgctgatgggaacttgtatgtgtatgagaaggcaagcattaatgttctaatgtcatatactttcaatggttttgctagtaatgtctgaaatatgatgtttagttttgttgtttttccccctctagaacaaagatggtgcaggtgattcttcattccctgtaatcaaagatcaaactcaattttctgtttcgcatgctcgctataataaggtacttagaacttttagtgtgtgcaattgttttgatattactgtgttacttctggtgttagtttgggctgtatatgtctgttagtatatttttttagattctggtagactcttggacaagatttctactatctaaaacaaccaaggagaagttagatgattctatatcattttgataaatatgcaatgatcattccagatcttctaagcagtttaccttattataaacacagtaaagttgtactttgttaaaattaatgttgtttgatggtgtatattaataacataccttttatgctcccttttgttattgtccattgactactgcattatgtttacagagtaacccaattgccagatggcatatatgccaaggttccattaatagcatcactttctctactgatggaacatacttagcaactgttggaagagatggtactatgttaatattgtactttgtttgtttgttccattacaacttcaaatacacatgagcattggtttaatttctgtactcaggttatttacgtgtttttgactactctaaagagcaacttgtatgtggtggcaaaagttattatggtgcgctcttatgttgtgcttggaggtgtgtaacgttttggatattcaattttttaattattattatttacatcccagagttgagtttagcgcatatctctgttgttcttttcctttgagacagtattttttcattctgatgacatatgacatgatttatgacagcatggatggaaaatacattctgactggaggagaagatgatttagttcaggtttggagcgtggaagatcggaaggttgtagcatggggtgaggggcataattcatgggtgagttttataagatatttacatctttgtgagtttcttcttcctcttggtttctcatcatctcaaacttattgcttatgcaggtcagtggagtggcttttgattcatactggtcatcaccaaattcagatggtacagaagagactgtataccggtttggttctgttggccaggtattataattttgatgtttgttctggttgagttattgttatttttgattaatattgatatcaatgatggtcacagagcttaataacttgtatctcaccaggacacacagttgctcctttgggacctagaaatggatgagattgttgtaccattgcgacgaccacctggtggatccccaacttttagcactggaagccagtcgtcccattgggacactgtttgtccaattggcactcttcaacctgctccgagcatgagagatgtcccaaagatctcaccactggttgcacatcgtgtgcataccgaacccctttctggtttgacttttacacaagaatctgttcttactgtctgccgagagggacatattaaagtttggatgagaccaggagctgcggataaccaatcgagcaacggtgaaactgtcttgagtaccagcttgaaggagaaacctttattgtcatcaagtaaggctggcaattcaagttacaagcaatgactaaactgtctggacaccaggcaaaaccaaagctatttttttcccatttcgagttgctgtttattttcttgtgtagctgtttttatctctttggtattgttccagttggttttcagaactagcaccaatgatatttaaccaactggggttttattgtatagactaaaatggccattggaggcactcagaggttggaagagggaaagagaatgattccctttgtaagtacagaacggccttttctaggatatgtctaattacttaacaggaataatttgaaggtgcaatctttgaaatctgtacatcttagcattgcgtttttgagcatttatataataccaaagaaatcttgaggccattcattttagcaccttttttgtttgatttatctgttgagtatgatcctcaacttgaggtggcattggtttgggattactgcagaggctatgtatataattatagttatatatatgcattttttttaattacattattgagttcctaaattaaatttttacctcttaagtgagtatagcataaactgtagcgtgtatatgtttagtttataacaagtcttgatgtacattcttacagttatagtagtaaaatgtatgcattttgtcccttgattattatgggatccatatctttgctttttgtgaaccccgttgttgatttgccctagaaatccttctcttgaacaattaatataaggtttttcttttaataaaattattgtaacatttaattaaagcttttgtggctcaaaatttagggagaaggaaatcaacccaaagttaagttcattcccagagatactcttaacagatagtacaatagagttttttttttttttgggagataagagctattatattaaaacagaaagttataatacaatagacattagtggaggtggaagttcctccaaccataaacaatcagtactcaccgaaagagcatagttagcaagagtatgagtaacagtatttgcacacctcttgacatgagtaatctgtactccagggaaattgaacactgaaagtaaaatatcaatcaacaagcaatgaaagtccgagaatgaagcatgttgtgactgcaaaccattaatgactacaagagagtcagattcaatgtagtccacaggtagctgtaggtcttttatccattgtaggatgtggattagggccaaaacttctataatttctggtttaaaacagtctgggaaaggtcttgacatagcagcgatgcaatcaccactactgttttgtaatatagcaccaaaaccataaatttgcttagctttgttaacagatgcgtttgtatttagtttcagcctacctgaaggtgggttcaaccatttaggtgatggttgattcgattgtaaacctgcttgctggtgtgttattgcaaggcccttgggcatacaggctgaatgaaactcctccaagtatgatatggctttgaatagcagcaattcgatcagatggggtttagtaccatgacgttccttgtttctttttgtccaaaggctccataaaatgcaagcaaattgttccaattgcaaagttgaccatattgtagagacatgaatcatgagctctttgagtgaaacatgagttgagaggaggctatcaatagagaaattagataacttccaaaatttcctgggacgtttgcaatggaagagagcatgaataattgtatccttctcacggtgacataaagaacaaaggctagtatcacttatgtgtcttgtatgcaaggtgtccaagactggcaagcaaacttgaattgttctccaaagaaaaattcgaaccttagatggaattgagagtgaccagaattttttccaccaagtaactgctgttgtattgctagtgttcagttgctgttcttctaagagcagagccatcttgtaaccagacttaatagtatagcttccattattttcatggtgccaaatgagatgatcattctggtgaaaatagagataggggaatgctatgaatcttctcaacatctgagtctaggaaaagagattgaagaagaggagtatcccatcgtctattgtctgaaatcaagttcgaaactttcatttctctatcacctcatttgaaaataagaggtttaaagtaagtgaaaccaggtatccatggatcggttgcacaacaaatgttgtgaccatcgccgaccttccatctcaatccttgtattaggacctattctccccatatgatgcctctcgaagttaaggatggataagttccaatttcagcatccaaaaaattattatgcttgaaatatcttggcttaacaacacggcttaggagagaggtt

SEQ ID NO: 16743 - DNA, 2700 bp, Cannabis sativa
atatatatatatagttcatggcctgtcatatgggaagtataatgcatcatgcggggtatttgatgatggagaatgaagtttctgaaagttcctgcattactgctgcaagttgcaacttgtgtagctggtgttatgagccaagtttcggtgcacaaaataaaaggattgacttaatggctgcaccttttctccaaaggaggtaaatttctagctttcatcatgggataaatagatttgttttaatgtcttcacttatctgtcttcctatgattttcgctggttgctctgatggatatgagcttgcccatttctacagctgggaggatactgtttaatttgtttgtatgaaccaatcctttgtttaagatgtatctttagtgttactcttctgattttatttcctctcagaaagtcttattttcaaatagtggattccagattataaattcgtcgccagtactagtactgaaaatacttttacacttttattgaccttataaacattccaattctcttgacattttttcttcatgtccagcgtttggagaaaaagagggtggaaagtttcctttgctttagacactggtggggtctccgaaaatggtgaccaagagggcgtcaacggtgacagttccaatcttggtcgaactcgtttgggtaggatagtgagtgcaggtggcagacagctattgacgaagctgaactctgctagaaagaaccttcccatgaagatatttctggttctgttgggtttctacacagctaatgcacttgctacaattcttggtcagacgggggattgggatgttctagttgccggcatcgtggtagctgccattgaaggtattggtatgcttatgtatagaaagctaccttctctttcaaagggaaggttgcagtcttttgttgtgatggtgaactactggaaagctggtgtttgtttaggactttttgtggatgctttcaaactaggtagctagtctagattatactttttcttcacctgtttttttagttcctaagctgttcgagggtgtgaatactcccatttagcaaataagtatttgatttttaaccattccattgttttgattttgaaaagatgtagcgtgattcttcattgtatgccttggtaaaatgtctacaaatattggcaagcaactcaagtgtagaggataaatgaccagtttggtcaaaatctatatatctttcattttgatccgtaaaacttttaattctttctatttttttagccatttcggttgcttactctctcacgcccaatttggtaaagcctgctatacaataataaatgctagaggttgcaaagaaatgacatggcttcatgtttgtctgctagtaagagattattatgagaaaaaatccaaaagctcgtatcagacttttcttcttctaatggattaagcatgtaagaaaaaattattacaccaagcaatacacaactttcttgcttcaacaatcaaataataataacactttacacacagggatgtctcttggcactgaaagaatatacacgattaaacctaaaatataaaatatgaaatatgaaatctcatccctaaatcatagaaaacataaaaaaagacttagaattgtacttgaggaaacgtctttaaggttatgtttgccgaaaaaagtaccaagttcagagaaattctcggggtttgtgaagaggtgtcagaccaacttgttaatctccataaatttgttgtctgtttttcttcgaggattgatctactcttgtccactgatcttgctcgtattttggatgtttctcttgttcctttttcacgagaaatatttaggattgttctgtttcgcagggaaaaataaggatggactcctccaatcgattaggtagagtttggggtaaattgtttgggcagaaatctaaactaatttctgctgggttcgtgaggaactacttaaatctatggttcaagccaaccctacttatgctatggggttatttgggtgccaatgggtattattaatgatatctacaagatgcgtgcaaggttttggtggaggggagatgacgatcataagaagttacattagtgtacatgggagtgtcttttttggcacaagtctaatgaggtatgggcttatgaaatctttttttttttcatcaagctttattggcgaaacatgcaacttgtttgttcaatttccctaattctctagcggccatggtcatgaaagctttttagtatccaaatggttctcttatacatgttgaagagactaaacgtgcttcatttctttggaagatggtgctttgggtttggggcaatgaaatatggttggaaggttgtagatggcttattgccagaggtggatacctagattcctaaaactcgtgtgagtcgagctttttcttctcttagacactctgatttttggtttgtcagtgaccttaaggacgatcaagggtcttggaggattgatcttattaatcaatcttttgctccctcaaagcttcgaccaatctatctattcctacctcttgttttgaaagacttgatactttggtttggaattatactgataaggggcacttttatgttaagagtagttattgttattaggttaggaactttgatattaggcaaccttcgacctatttaggtcagtcttggtggtgaaattttctctagtccttacccattccac

SEQ ID NO: 16744 - DNA, 2550 bp, Cannabis sativa
  modified_base (2204)..(2207): a, c, t, g, unknown or other
  modified_base (2357)..(2365): a, c, t, g, unknown or other
aagaaatgccgttagatagacacttttaatatataaagatatatattgtaattgtaatattggtattattattattattgtaaaatattccaacatgtatcaaatacttcaatggtagtagttaaaattaaatattaagatgtcacccatttttatttctatttttacggttaacacatacactaagatttagtcgttgctatttgttaaacagaatatgactccatcacaaataatggtcaaatgacatgagattatatatataccaaatctgtaaacattataattaaaaaatagtattatcaactcaaaatatacaaatagaataaatgaattttttcatttctataattcaatttttttttttttttgtatttttatagaaattcacataacccacattgtaattaatgaagtaacttaaattgcaattaaaatctacatggaaactatttgaacaactcaaactgtaaattttaaaaaataaaataaaataatatataagataattcacttagaaaaaatcattttctaatttaggatatagactttttatttttattttggacaaaaatgaatttagattgttgatcaatatatatcagaaatacgttgggtgatagatagtgttgaattaggtagctaaaaaggcttggtttaaaattttggtggaatatgttaaatagttggtttaggaatgttgggccaccaaaccacttatgcaactcatcttaattctctctatttgtcccaatttattatataaaaacttccctttcacaatgatttttcttgcttgcttaactaattgattgtcatgtttatccaataatataatttatttaaaaaaaaaaaatctaaacgatagaaaccctctaactaaggttggtaggtagcttttagtggtattcactaaccaactatcttagttaggagtatgacaatccaaactgtttgtttcctgggaaagaaaatttggttataaatatagaataaaaacctttattaattaattaacatgacgtattttagtagcaaaaaaacttttcagtttcaaattttgaggcatgggagatttggaatttggatatttagcttaattgttacccaaaattcttagaattttagaaaaacgaaaggaacatatggcgttacatactttaatgtcattaaattgaaattaaaagttgtttacattgatttacacgttaatgtaattttttttaatcctatatccatgttgggaccatgacttgcaaaaatttgcgttgtgtgtcggtttcgactatatagaaacatcgataatggaggtgttaataaattaatcttgggaataaattcatttcacacacctacatccaactccaacacccttgactcaccatcacactattatcagtattattaaaacgtaaatactattttagatcctgcattttgcaaaagttattaataagactatctgttttgttaaatgataaaatgtattatgtattttttaaaattatacaaatagcactctgaactgattttttgtcataataaaacttaatagtaatttgatctagagatgttatgacaaaattggttatgttttctgtatctgttcgtgttggaaattatttaaaaattggttatattaaaaaataaaattattgaaagttgagctcatgatcctatttttactattttagaaaatataaggtcagttgtgtcatttaacaaaataaaagatccaattaataaattttacaaaacacataattcaaaatgatatttaccaattattaaattttaatttaggtatatttttataataagctgtttgggaagtagggtttctaaaaattaattggattaatttatacaattatatatacatatatatggctccaaatttattaatgagaattggaattcatcatttattcagttttaacataaatctcatcttctttcttaggaatttttatttttacaatctagcatattgacttgaaggtgtaaataataataaaaaaaagaacagttgttgttgacctgattgtgtatatatttattgttcgtaccttaaaaaaaaaagtgttgatgcaccctttaaattaatgtattgatgtattttttattaattttagcatttaaaataattttttagttaatttttttttattgtcatataagttatagttatttaagatattttnnnnaattttaaaaaatttggaaaaatttaacacaccgaaaaataggattcaaaaagtatattgcatgcgtgactattatattatatacgcgtgtgaaatagattctttaaacactactttttatattgttataaattattctgaattttttannnnnnnnnaaaatatcttaaataattatattgcaaacgaatatgaaaaaaaaaagttaaactaatttttgttctcaatactaaaataagtaaggatgcatgcactcctttcaaaaagatacattggaaaatcatcatatagattttactaattttaaatctttataaaaattgcaataataacatcatggttt

SEQ ID NO: 16745 - DNA, 3416 bp, Cannabis sativa
  modified_base (2271)..(2275): a, c, t, g, unknown or other
tcattgttgtttggctcatccatctttttctttgtttaagaaactttgaatggagtgcgagttgattatttttataacaagttggcaatgattaacgcctatgctacaacttgaaggggagtgttaattaactgtatattagttgtaaaaattaggatgaattgtatttagtagtttcccatttaatatccaaactttatatataaatataatattattctatgaaatacaacatacaattcaatttactgttttctacaccttatatatgttgcaactaaaacaagtgaacgcttataagttatgagtgaaactgctataatcatgtcttttgcctctactttgatgtttgggctgtagtttttaccaacaatttttcaccatttgtcttaaatatacaaagaatgaggtttttttttggctgagaatgagggaattttcggctccgtagccttccctttctcccatatttattaagagcagaggtgatatagttgaatacaattaggtgatctacttagagataaaagtcacagcgcgatcttctaaattctagttagattttagctatcgttacagatattctttaatttaacttcttcaaaattcacaactgcagctacttttgcacttttgggagcagcttgcaggttggctgcttgcatgatggcctgtgtttgacttgttgccaattttaggtgtggaagaaggcttgctgttgcaggctttttcggccactgcgggaatttttcccataaaaaaacactgatatgacatagtatgttcaaaacttattttggcatatatagtgccaaaataactaaatttgtggagggaactgtgttatgttgtcaaaggatacatatgatcccaactaatttatctgtctgtacagttaatacttttactagtttgattctaggattggaaaactaggaaacatgtaattatggatgtaggagccgtcacaggtgttcctttgaattgattttatttttatgtgacttgtgacatactggtttctataatgtgtttttactggtaaaaggttcaagaactgctaaaagataatgagtttatgcgaccagttgcaaatatggagcttgcttggtttgtggtaagtagtactgcctacttgatcatcttaattacttactaaaccaaagattcacattgtaatcagaaataagtcatccaatttaatattccttttctgcttcataggctactgctttgttggctttgcctgctctttttttgttcaaattgttttcagttgtcttcaggttagtttgtttattacaagtaattatggtccttttcagaggaaaattttatcagactccatactttttcttacctaaaagtcaaaatctaatatgatgcaggaaaaaaacaaagaatatacaaaattcaaataccaaccacacaagacgtaggcccaaagatcccaaacaatctcatcccagtaaataagagcacgaaatataggtgcgtgcgttgtacttaaaaaaattaaaaccactaattccttgggtgtctaacaacttcattgaattgctattttggaaagcatgtgtgaaaatcgatatgtttgctttttccatacttttgttttccattaggtattttatgttctttcttcataaaatataaagtcaaaatttggtcaggaaatttggctttacaccttttttttttttgaaggaatttggtggtccccaaatcgatcaagaaatataacggaaacaggtcttgaatcatattgtaggagtgataaattagagaaaaataaatatttgattgaattggggtcagtttacaggttaacttgtactgaatgggctaggaatgttctaaacttaattggtgtaataaatgttgccaaatacaaatagtggattgatgagtaacaactcaatatcccaattgggaaatgagtaaaagcagttttattttgcactccaataaattctaaaaatactctattttactatttatattttgtataatatatattttttaatacttttcctttaattattcttctttcttctcccactctaaagatattatatataggaatatgattttgtcacgttattgtactttcacggattgcaatccgtaatgtacggcagccgtcagatgagggagttatttgatctgacagctgagattgatctaggagtaattaaggttaaaaagtagaattgtaccctaacactcatttaatgtaccctgagactcatctaatgtaccacggaatannnnncgtgaaagtacatcacgggacaaatcatatcccattatatatgtatatatatattttaagatgtttttacaatacactccattaaaatgggtgtatgatgcaatccttaattgtttcggtttttctaaaaaaaatttaatctattttttttatagtcgtgtatgttatagttatttaagacgtcttgcaaaattttgagaaattccgaataatttacaatacagaaatcaatgtttaaatcgtctatttcacacgcgtataaaataaaaaagtcacgcgtataatactctttgaatactgtttttgatgtgttaattttttttttgaattttttcaaattttgccagatattttaaataattataatatatacgaccataaaaaaagtagactaagtatttttttaaatatcaaaatagataaggtgtatcgattcgccgatttcaaaggggtgtattataaaatttttctatatttggacaaaaaaatataaaaactttttttgttttataaaaactttttttgttttgtttttttttttttttgacaaatataaaaacttattagagttgaaataaatatacattatttgaacaaagttattgaaattaaaacaaaagaaaatgcaaaagaaactcaaagaaaatattgaagagtaaatattgaaaatttatttaacctgattttttttaatattagtgtgtttaaatgtaactccaataagaaattaatttggtctaatctaatacagaaagaaggaaagaaattgatgaattttgcctaaataaaaaattttacaataaaatgacaaaatggggaaaaggaattacatctttggtatttaaaatgataattcaatctcctgttagtaattttttatttttctttaaaggaaaattgaacagccaatcacagccaaaaaaaaaagttaatagcagttgagcttacacaaagaagaggatcatattatgtcccccgaagagaatggctttgttataaatttacttattaattggagaaagaaatatcttaaacaaaatttctaaacaattctctaattgaattggatgggatgggatagttaatttttagatcactcctaatttaatgtatgcccttctaatagaatcaaataatagtt

SEQ ID NO: 16746 - DNA, 6102 bp, Cannabis sativa
ttatcccataatccattaggaccatgatacaaacctttgaccatatatcagataatacaagttttttttcttcctgcctttttcttgttaatgatatatatctatttaaaattagatcatgcatatcgtatcgctactgttcctcccactttgagtgaactatatatcttaaaaaacttgtccatgattattctcccaaaagttttcatctccctcattgagtggttgttgttataaatcttaataatcttgatgatatattgatttttagattaacctatgtttaaaaaacgtgtgtgtgtaatatattcaagaaaaattatagcaaattagaagaatacaaagcaaagtcaacttagttagtacttaatgcttaatactgattgctcgaagaatcagaaaaaactcatcatgccagtactgattgctagttatacgtggctcgtttattagctggatcccatgccattaaatgagattaattatttttggaattatcctccatattatattagcttttcttcttttttatgaatattagttatatcaacaagaaccaccaaattggacgaaatttgatgattttagaattttcttttaggatattaaaattttattgtaaagttttttagggtattttattggaatcttagatatttacatttaataaactattatgaatattaaccaattgtaaaacccatttataatgatcttgaatacaactgatacttaataggaatgtttttcattttagagtacaaaatttgcaattgtttattaatgattcttaagcaattattataaatttgttctgaatgatcaagacacaaagggaataattggaaaagtatgattcctagtaggatggaccagaattccaatatcttagactggaccctatgtattgagtaagagaaagaaaaaaaattgaaaaagtatacataatactgaaatgatagcaacttgtatgtatacacaaatacataatggaaaaagcttataataagtgatttgtgtgcatatattattactcaacggtttagagtgataggattacaatccattattgcgtttttgctagttacaaactaaatttttttgagtaatttttccgcaaatatctcaaaatgataatagaaggttttgaaaatggagttgtttagattttgatccacaatcaacccaacatttcacatatatatatatatatatatatatatattggagtttgcactatgatgtaattgataggcacttttgaaatcgtggtgggccaacatttgatgtcacctgagtggtgtcaactgtcaacctttctttctcaagaaactattaaaatttatataaaatccgttctgtactagaaaagaatttaaagaaagaaaaaactctttctctttctctggcaatagtactaaatatggctgaaactgctcttcttactgttttgaaagttttgatgattgtaatatgtgctggttgggtttccctttggattttgaagcctacacagatgtggacaaagaactggaaagaagctgaagatagattaaggcctactgtctttggatattatggtatttaacattgaccttttcattcactcagttttttcttttacttacttttatagctacttacttttcagagctgtgatgaaacactgttgttgatattttgcaggacttaactttgttgtgtttacatttcctgttattgctctggctatagttggatctgtctacttgaatgttcagcaaaggaagcccagaaggtagtatgaatatgttgtttgaaactatatcaattaccaacttgaaacatttgccaatttttcaaaccttacttatttgctcaatttggaattctagactaaggagaaaggcatttcctggtgcctcaaatccagtggttgtgaacacccttttaggcactctaactgctctggaaatcttagcagcctccctctttatcctcctcttagtatggactttttatgctcgaatatcaaacgatttcaagaagctaatgccagtaaaatcactcaaattgaagttgtgagtaatcaatatgttctgcaataaaaaaatacttataacccctgaagagtttcaccaaaaatgttgctcttgattatgtctcagatggcaactgcagtacttgagggtggcgactcgattcggtttgttagcagaagtctgcctagctctacttctccttcctatattaagagggttggccttgttcaggttaattggtatccaatttgaggcttcagtgagatatcatatctggcttggaactgctatgatagcttttgcctttcttcatggggcaagtacattgttcatttggggagtaagccaccacattcaggaagaggtataattcactcattttcttttgtactttgacaatgtgaaaacttgtagtttttttcaatgtacattttgtaaacagataggaaaatggcaaagaacaggcaggatatacttagctggggagattagtcttgttactggtttagtcatatggataacatcacttcctcaaataagaaggaaaaagtttgaaatcttctactacacacaccatctctacctagtcttccttgtatttttcttgtttcatgccggagaccgccacttctatactgtttttcctgggatttttctctttggcattgataaactacttcgcctcgtacaatcaagaccagaaacatgtattctttctgcaaaaatcttccccagcaaagctttagaacttgttctacccaaacacccaagtaagaaattttacttcaacactgaaagatagcataaagaacatttttgacttggttttttaaagctttgttttgtataatttgtattaatttcagatctaaagtatactccaacaagtgtaatctttgtgaagataccaagtatatcaaaatttcagtggcactcttttagtataacttcaagctcaagtgttgatgaccacacaatgtctcttcttataagatgtcaaggatcatggacaagttctctatacaacttgataaatacagagctaaaatcaggttttaataagatgaaaaccataccaattgcagttgaaggcccttatggagcttcctcaacagatttccttaggttcttcacttgaatttttcatctcaacaacatttgttctacacatagcttagtttaagattgttgtttttttgatcctttgcaggtatgacagtttgcttctgattgctggaggagttgggataactccatttctgagcatcatgcaagaaatcacttcagcttggcaaagtgggaactacaatcagtaccccacaagaatacaactcatattcatagctaaaaagtcccaagatatttgtttgttgagctcaatttcagaccttattctaaaccaatcagatgaacagtttcatctcaagttaaaggtatttgtgactcaagaaaaacaatcagttacaacagtaaaagaactactaaatgagttttcacaaggcgaaacagtcgatttcggtacagatagttcaagctatgcaatacatggacttgaatcttttctttggatggctgccatagctggactttcctctgttgtatttcttgccttcctcatatgtttaagccacatatttattcctaaccagaaaaccaaggcatcatcaaaagagaagagtccatcttgggttgctgatataatcatattatcttcttttgtcatagcaataatttgcagtactttagttgcacttgtattaagagggaaaaaacttagcaaagaaacaatccaaacttcagaaaaacatgtcaaatcatggcaaccaagttccagtgaagctgaattaggatttgctactgagaaacatgagattcattttacaggaaggcctaagtttcaaggtttctattttcttaccccaactattaatttcatttcaactattttttatgaactcttcttacttatatggtgcagaaatattggaaaaattcccaactgagactggtggatctgatattggagtcctggtatgtggacctgagaaaatgaaagagtcagtggcagcattactatgtagccataactctcaatgtttcaagagtggtcctcagaagaaaacaagcttcagcttccactccctcaatttcactctctgattggcctggctatacatatacattaatatgtatatatatataaatatatgaagagcacaggtttgattggtagataaaaatctctataaactaagactaatataatatattgtttataagataagcttataaaatatgaatttaacatgtaataggtcaatgtcgtgtaatataataaaaataggctgttttttcttttcaaaaggtcagctctaaatctaattacagctaaagtttcaattaattatggatttgtgaccacaaaatctgggtgtacttatctaaactatttggaaagctgtagcagatggttaaggtttatttaaagacttactcagtttatctataacatgggctttgactattattcctggacgaaaaatctacatgggtactcatagatgcgtacacatgtcgaaatcatattatatatttttaggccacatcaacatcaaattacaatctttttctcttgttttcatattaggctgtttattatgttctctaatggctgcgccatagaaaagggatattgtttgataaaaaataaaataaattcttttaatataaaaggatttattgtttctaaaaaagattttttcattaattttttttttaaataatttctaatttacttataaaatatatatattttttaaatgatatctaaatatttttttttaaaaaaaaattctaaatattttttattaaaaaaaatttatacaatagttgtaaaactatataaaagtttatacatttatcttataattttcaatatatttcttttgctattaggggagtatccaatgtctgctattaggcacaataacaggcaatgttacgagtattgctattgagtattaataatgtctaatatgtcgctttgcaattgattagcgatattttttaaaaattattaaattaaattatattaaacaaattaataagagtataatataaaaatccattaaaagattatatttttttgtaaatataatcataaaaatatttaaaattttatttttttttaatttttttattatttttggggatttatgaaatgatcccaaacaaatataatgcaatttgcaaaccagtaacttgtagttacaaacttaaataataatatatagaaaaatagaaatttctatctttattttcagatgaaacactactttttcttaataacaattttcatcgtgaaatataactaacataaacaatgtgttaatgggaaagaaaaatgtaatgatatgagagaaacaaaagcactaaagcaattcatttagaatttcatcaaagtggtatcctagaaaagcaaaaatataattatgaagctaaccattaaatatacctgtaaagttaaaatttaaataaaatgagaccaataataataataataataaattaataaaatatatatttacagaaccggtgaaggagatggagccaaagccacctccggcgattcattatcttcaccactatcaacgacagctctactatcatcacctccaaccaaaaacgacaacacttctaccggtgccgtcgttgtcgtttgctccccaacaagcacagccaccacctctttcatgcttgggcggcgctgaggatcagggtggcaacaagccaaaccaagcttcaaaatcacctccatctccgcctcttcatactctccactaaccctcttatccgccgcttcaacaaccttaccttccaagtacaaatccctcacccaatcgatcaacaccacctcctcctccgccgccgccccaaactcaatcggcttcctcccacaagaaacttcaagaacaaccacaccgaacccatatacgtcactcgccgaagttggcgccgctactgtggccagctccggcgccaggtaacccaaagtcccaacgacccgagtcgtgtttgggac

SEQ ID NO: 16747 - DNA, 5067 bp, Cannabis sativa
  modified_base (5005)..(5042): a, c, t, g, unknown or other
gaagtcacagcgaccactactgttgttcgatggatggtttggaaaatggggtcagattagagaagatttcggtcttgtttgatgattttcagtttcatcttctgatccctgttcaacaacaaagtaaactgatgattttttttcttcacattagttattgattcccaaacattatcttcttgagattcttagccatctaatacttagtaaaaacattaggagaaacagcttccttcaaatagtttgggaacttataaatgtgcatccagctttacaaattgagagattcacataaatagagcaaataattaatacgacaatattgcaaagggtaaaatttcatctactttttgtattttattatacatataacatcaatgtgtcacacacacataattgtctaatgcttgtttttgaaattttcaattacgtttttttgctggtattctgagaatattttccaacagtagagcaatattcacactttactgcaacctcagcatatagtaagaaaataatccaagtctaatttacttttttttttttttgaaatcgcaagtctaatttactttaagtacctataaatcctaatagttatagcaagttccattttagtgtgtgagactgctcggttatattttttttctttttttttttgctctaagtgactaaacaacaatgtcaaaagaaaaaagtgacagaacaacgaagaactagtaggctttttttaggtatgtgcaattaatcaaagatcatgtagagggttgctgtaaatctgttaatagatagtgagctgttgttagaataataacggttagtttattttaataagcatctagcttgattctcatttttcaaaattgcaatccagttttcattcctatatattttttttatcatttttaattgctttataatattagaacattccacttgattatgtaaatattccaaattgttcttaactcggacactaacaacaaaattatgacaattaaaacatgagtcactagaaaatccagctttgttaatagagtgcaaactaaaaattcatgtatacatccgagattccaaatcttgttatagtagcacaattaattatagtatatactaattctaaagctagctagctaaggcttctaccttatttttcccattagtgatctttacatttagatccagtgtgcgccatattgctggaatcttgaaatcaagaatttccttgaacttcaaattccaatcctcatgatgaacggttcccaactcttcattgttctccttcatcttcttcttgagctcttgaatcttccaaccaatctcgtttagttttgaagaaaatgattttttcatacctcgttcaacagcctcaatagccttcatgctgttaaaccaatctggaaacaatcgagtgaaaatggctctttccagattcgaaacttcaagcaagatcataccaagaacatcatctcccatttcaccaatgaacccactttccatggtattatttttcatataataaaactccatttcttcctcaagaatattgattacagagacgaacctgtcagttatggccgtggaactctttttttcggttatttcagagcgaatactacttttgacagatcgaatcttgctccccattacttcctgatccaattcttcagcaaggagaaagaaatattgcgcaagaaacacagagatttgaatcccaacatcgatagcaacagcccttatcgaattgaattcagttccatgaccatcagacttttgatcttgttcttggaccaactccatccagctccttccattgttttttgcattgattacattcattagagcctcgtacttgctcaaaatttccttgtgctcaggttctgagaaagactggagaaaaattgaaaaatcgatcttgtcaagattagcaatgaaaatttgtttcaaatcatttgtttctttattgataatttcaatctccttcacgaaagattccagtttcgcttcaattcggggctgaattgaagtgtcttcaaggtcaaaacagccaatcaactcgtcgaaaaactgctttgtactcttgtctaacttttctagtaggacttgagttttgtaatttaattcttggagttcctccattgagagagagagagagagagagagagagagagagcagtttggacggtttggtttgtatggaacaacagaacaaatatatatttatatgaacaaaacacagaagtaggtttttctgttatggtcggtggagaacagcaacggtttcaactatgctgatacgaactataatatgaaaatgcatttaataaagaaatattcattattttgtgacctgtcacagggttaatttttccctcaataattttccctgtgatggcctagattcccataatctagttagccaactcaacacccatttacatacacccacggttttatttgcccaacgtaactcaacaacactctctttcgttattatcaagtaaatgaacataaaacatatgaatcacacacaacatacggaaactgcccactcttgttattaacacaatattaagaaatacaatgttcaaacgttgaacatcacactctgatgattcaaacgcatttaacctacttataacctaacattagggtgcggttaacatccccaaccacataggccatgctggaccaaccagccaattacacattagcatcacatgttcaaatcactaacgcacccgtctgtcagccattcaagccttcagcccgaatcattgcatctgttcaccaacagatgtcttttacctacgtttatatccttggataaacatagataactctcagtaaccgtcattcacgtgtgtcatcttcatgcacattgtctgagtaatcaattgtaggcatccccatgcattatcacgtaacccatggaatcacctcgtagactaatcaagccaacatctcacaatgttgctgtaggattatgatgttgctgcatactcccccctgggaggtacacatcactcggctgctgccattcaaccatgcaacaacgagtgatattaaggttcattgagcgaaccctagtgagggtctcacaaaccaccccactagaagaaattgatatcctcgtcgatacaattttgatatagtcgttcacctcatttttgaactgcaacaaggtaacaactttttcccatgtagcatcaactacatcttcaatttcccattgaaccaagtactatgtacattgattctttttacttgctccaaaggcacgttgatctagaaccttaggtaatttcttttcaaattgctttcttacagtaggtagagccctcaccacccgctgccctcttttggacttgtcctcatgaaacttttttagaaatctgacatgaaaagttgggtgaagcttaatacgcttgggaagcttcaatttatatgccattgcccccactttttggacaaactcaaaaggaccatcatatttctgaaccaatcctttatgatacctcttattgatgatcttctttcaaatctggggagtgagtttcagcaacactccatccccaacaaaaaactctaaatctcttcggtgcttgtcagcatacttcttcatccgtctcgaagctttttcaaggctatccctggcaagttctagcagtttggttctatctctcgcaaacccatatgtcgctgggcaaactccttgagatttttgtttagcaacttcatgtggtgtcagcggctgcctccccaagaaaatctctactgggctcattccagttgcagaggactatgaatgttatagcgaaattgcgctacatcaagcaattatatccaactcctctggcttactgttacgtaatgccaaaagtattgttccactagctgattcattctctttgtttgatcgttgagcggggatggtttgtttttgagaattttaagtctgaacccaacatattgaaaaatatagtgcaaaaccttatcgtaaatcttgaatctcagtcacttataatgttcttaggcaaccggaagtacttcacaacattcttcataataagctccgtcgccacatctaatggacaagcatggggtgcgggaatgaatacaccatacttgaaaaatcgatccactaccacgagaatggactgaaacccttttacttctaaaaatcccactataaaatccatgcttatcgactaccatggcttctcaaggattgataggagttgcaacaaacccgcttcctatcttcattctatcttatcttattggcacactagataggtcttcagatatgtctcaatgtcctgctccatctttggccaaaagtaagaattagacagcaaagccaacattctggccacaccaggatgactagcccactgagtattgtggatttcttttagtagttcccttctcagaccaccactattccgtacaaccagtctgccacccttggcatataaaagatcatcctcttcccaatacctcattagttcagcatttctagcttcccctaaaagctttttatgcacgagatcgagcagcgattgctccctcacccggttaatgaaagttgtactcatctgagacaatgaacaaataaaagcctatacttctttacgactcaattcatcaacaacttgattctgttttgtaggtccatgtacccaaacgaaaccaaattttgcttaatactcttgccaacaagcctgcttcgaggttaatttcttgtgggatttaaagtaagtgttgtccacattgtccgtcactacagtaaatttcgtacgcagtagaaagtgtctccacacatccaaacaatgcactactgtccccaatgtgggctgaatacctttgttcgacatcctttaacttttaactctcaaaagctattgggtgtccatcttgtacaagtacaccccccaatgcacggtcaaacgcatctgtttgcacctcaaatggaagatcaaagtatgttatttaacatcctaannnnnnnnnnnnnnnnnnnnnnnnnnnnnnnnnnnnnnaagtataagaaaccttacagtggtt

SEQ ID NO: 16748 - DNA, 3890 bp, Cannabis sativa
tttttaaatccaataattactaattgttactaattggattgaattggattggatcggattggatcggacgaggaaaaaaaggttggattggatcggatgcccacccctttctcatttctcatgaaaagtgttcctctcgttcctgccgctatgtagagagaacgagaaattgaaagagccatgaaagaatggcataaggaagagaggaggcttttgcacaggcaaaccaacatgctttcgaccgtgaagagggctgagactttagggggcctcttcgcctcaatcccagctgggccaataattgacgttgaggctttagaaaagctcctggcacccaaagtggggagtgaagctgcaccttttatggtagaactattggatcaagtggctagtagtgcatccaaactacccttggagacatgggcaacttggagtagtgtcgacgcattttccttaggccatgctaccaaacaacaagtagttagggtaatttttttacctttccatcttttgtcccgccactatatctagtcttctcattttttttttattgtaacagtagctttgctggcagaaagggccactaaggaagtaggcactttagtcgtggatcttgagcaatctaatgcttgaatcgcgagttgcgcgctgccaataggacccttcttaccgaaatcttggaagccaaagctcaactaaaagtcttgaagagggaaaagaagatactggaagacaactacacccaacaaacttgtctcatgtgaggtatgagaataatcagtggtcttcacagggagaccacagagaggatgtggagagaaatcttttggtaataatccaatagtacccaaacacctgaagattgtggttcatttgtaataactttacgcctttatattttttctttgagctttacttctaatccgctagcttgctagactttttcttaagggttgtcgccttaggatgttttgaagtttgtggttccaacggccaacacttcaaactttagactttactcagtttttaatccttttggtgatttaggaagcattcaaatactcttgtctgctatttttagttgggatcgtaactgttataatccttcttagtcattacaaactttggttaattaaatattctaacattacaaactcgcttccaaactacttctagaccaccaaatagttatggagccttagcgcttttcaaatgtcttaaatagttaattactcttttagaatattgctcatggagtgctaattaaggatggttttcttcatggaagggtgagctttcgtgttccaagcattccctgattcttgctctttgtaaagtcgggtttcaggagaaatgtttgaaaatgttatagattccaagcggcatcccttgtctaggaattgggatgaaattgtaacaacaatcaagcaggttttcttatcccaaaccttatcaataagagtctttagctcctggggctacacatgaatcaagctttacacgctatggattttaggaagtatcttgtgatcaagacagggctaaaaatgcatagggggttcagacgaggccttctcattcttactttgcaacaaatcaacaaactaaaccttaggaaacccaccaaattatcaagaaggaattcagccaaatttttccctcctagaaaatttggctgaagacgcatctcattttgatatttacgctaatttttaatttttttaatctcgagaagggattaaagcgcatctttcccttgggaagttttgttgaaaatgtatctcgttttttggtttaatatgcaaagttcaataaaaggcctgataaagtaagcaaacataacgcactgtatgtttttgggggcatgcacagctaggcatagtaccccaaagtgaattgagaaatttggatgtctccaaatattcggtgacatgtttaaaacatagcttgtgataaatctacaatacttagatcaatgaggacgagattaatcgcgcaacaaagtcctagttgggctccttttagggaggcaaggttggatttgtgttgacacctgaatcatgccctctctatccatagcaacagaactagggtcattcgtgacaagcttttcccaattagtgacaagagagcagctgaaaacatggaaggcttcctgacatgcttatttttctcactccttctgggaaatctgccaatcatggtcaacgatctaagcgactacaataattgttcaaataatgttccctttccaaggacaaagttgaaagcgtattgtttgtgctttttgtgagaatcaggttgaattatgcagtagactttggctttcgcgaaggaagactgaagtcgtactaaaactcaagcaatggcttcaccctcgggactaaaggtgaaaccaagttcggtgttaaatagaattcaagcaactcctccttctgggagggagggttgaagatgtttcgaaccccgagcagtgtttttcccaaaaagctttgaaatataggaaaatccaacgccgcataaaactacacatgcttgtgagaaccatgttgaattatgcggcgaactttggcttccgtgaaggaaggctgaagtcgtactaaaattcacgcgatggttttactttcatgactaaaagtgaaaaccgaattgggcattaaatagacttcaagcaattccttctttcgagagggacggttgaagacgtatcataccccaagcaacatttttaaccaaaagcttgaaaagtaagaaaaattcaatgcacggtaaaaaatacacatgctttgtgagaaccgtgttgaattgtacggcggcctttggcttcaatagacatcaagcaactcctcattccgggaaggatggttgaaaacttattcttaagtggtgtttttccccaaaagcatggaaatataggaaaaatcaatgcaagataaaaatacacatgcttgtgagaaccatgtttaattatgcggtggactttggcttccataaaggaaggctgaagttacactaaaattcacggcatggttttactttcaagactaaaggtgaaaaccaattgtgcattcaatagactttaagtaattcatccttctgagagggagggctgaagacgtatcaaatcccaagcaatatttttaaccaaaagcttgaaaagtaagaagaattaaacgcacagtaaaaatacacgtgcttgtgagaattgttttgaattatgcggtgacctttggctttaatagacttcaagaaactcctccatccaggacggagggttgaagacgtatcaaaccccgagcggtgttttcccccaaagcttggaaatataggaaaaatccaatgcatgataaaagtaaacgtgcttgtcagaaccatgttgaattatgcggccgatttggcttccatgagggaaggctcaagtcgcactaaaatcatgtgatggttttactttcaagactaaaggtgaaaattaagttgggcatccaatagacttcaagcaattcctcctttcgggagggagggttgaagacgtattgaacccccaagaaatatttttaaccaaaagcttaaaaagtaagaaaaattcaatgcacagtaaaaatacacgtgcttgtcaaaagtgtgctgaattatgcgtcaacctttggctttcgtgaaggaaggctgaagtcgcactaaaatttaagagacagtttcacttttaagactaaagttaaaaactaagatgggcattcaatagaattcaagcaattcctccttttgggagggagggttgaagacgtatcaaaccccaagtgatattttcaaccaaaagcttgaaaatatatctaccatcaagataaaaacagcaagctaggaatttaagcttttggggcatacacagctaggta

SEQ ID NO: 16749 - DNA, 3411 bp, Cannabis sativa
ggccagaagaagcatgtatgttgcaaagtaaaacatgagcagcagaattagagggatcaatttttataatgttctctgctgcccgttttcctatatcagaattcccatgagttttgcaggcagctaagagagtcttccacaccacaatgtcaggctcaaatgccatttgcttgataaattcctctgcttcatgtaagcgtccagcacgagcaagcaagtccaccatacaagaacagtgctctctagttggtaaaatcccatgctcgatttcaattgttctatagatgttttgtccttcttctactaatcctacatgactgcaggcagtaagaaccccaacaaaagtaacttcgtttggctttactcccgaacttttcatttttctgaagagttcaagagcttcctttccatatccgaactgagcataacctacgattaaactactccatgagactacatcaggactttccattgaattgaatagctttgtagcagttccaagtgtaccacactttgtatacatgtcaattaatccattgatgacagaagcatttagtacaagcccactttttatagaaaaacaatgaacttgattccctacctccaaagatataattacagcacaacctgtaataacattacttaaagtgatatgatcaggtctaatttgagagcaaagcattaacctaaataatctgaaaacttctccagcttcattgtgctgcgtgcatgctgttaaaagggcattccaagataccgaatcagcactactctctatatcttcaaagacactaaaggcatcacaaagcgctgaacactttgaatacatagatagcaatgtgttgtgtacaggaacatttgaatcaaaacccattttaattatgtacgagtggacttgcctaccctggtggattgtccaggagtttgtgcaagcagaaagcactgacaggacagtcacatcattaggtttaagccctatacatctcatcttattaaagagtactatggcttcattggcgtctccactattagcaaatcctgatattattgcattccaagaaactaaatccggcctgtctatatgattgaaaaccgtttttgcagactctaaaaacccacatttcgcatacatatcacaaagtgagcatccagcaaaaatatcacttcctaaaccaaattttatacacaacccatgaatctgccttccatattcaggctcaaagaggctgctacaagcactgaaagcacttccaaaaaagaactcgttcggctggtaagcaccttgacataacatctccttgaaatgaagcaaagcctcaaactcatagccaagttgagaaaatcccgcaatgattgaaccccatgatatcaaatcctttgttacaatacgtgaaaacacaagggaagcatcaggaattagaccaactttagtgtacattgcaataagagcattttgcgcaataagttgatcaccactttctgatttaacaacatgagcatgcagttgcttccccaaccaagcatcactgagccctgaacaagctttggctacactcccaaacgtgaactgatcaggcatatgtcctaaccttcgcatctgacaatacaactcaacagcatcattatattgaccattctgcgaacacccagatatgactgaagtccaagaaataacatttcgttgaggcattacgtcaaataccttcatggcatccttaacagacccacattttccatacatattcaaaatacgattatgaagaacgatgtcctgttgaaacttagacgtcaaaataagattattatggactctcttaccatgttcgagagaccttagagaagaacaagcagagagcaagtgagagtaagcactggggcatatcctaaaagatgtggttttctctatcatgtcaaacacctcaagagcttctctgtaacgtttttgcaagcacaagtgcttcatgtactcattgctagactgttcagttctcaagttgggtaagctccatggatgaaaacttggcttgttatgggttttgagcttggttatcatcatcgctgccaatattactcaggtttgagtaaagtacaagacaatatatgtgtagtgtatatatatttgtatatatatatattttggtcggattttatcttgtaaaactttttttttttgaaaaaagaaaaaactcctcttaatgaaggaaaatgaaagcctctctttccaaagaactcttcttctataaacgatatgtcgttttattgtcattgttctagaacattttttttgaacttaaaatttgtgtttaagaagaaattgaaatagattcaaaatatttaaataaactcgtgctatgttacaaaccattactaataaaaataaggtgcaaatgtttgcttaatatgtttagaaagttgtatctgacatgattagagagagagaatcttcatttatatttttttgttctttattatctcaatttacaagtgtggttattgggtttaaacttatgaatcatccaataagaaaaagccattttataatgatcattaagaaaggtatagttccacgaaagagtccttcatgtttaagtcaattccataccttttgttttttggtgtaaaaattggaccccattcaaaaacagaaatgatcatatgatacatacatatacaagtctctctccatatattttactttatttattagatgtcatgtcattgattcatgaccaaattaagcaccaattgtcaattctcaatgtaatttttttaaatcaacaaaataattatttcatggagaagtgagatgttaagacctcaatatcttgcataaaaaaagacctcaatatcattttaattatttctaattattataatactaagaatcacatattacttactgacttcacaaccccatgagttaaaccactgagaagaaataaaatttatattatttaggtgatgggtttcaatccccaacaaacaatatagtgataccaatcaccaaactcatcaaagctttcactaccattttcctttgacttaaagggacaacaaagctcaaaaccatacaaacaaaaacacacactaatctaaattgagtttccaagtaccaatcacataccctcctgtccttactttatatatatttatataaattttcaaataaagttgtcacctttttatgtctctctctctgtctctttctctctctatttatataccatgatacccagattctgatttaccaagttttcatatcaaaaacttcaattttgaggagaaagaaaagtaaggtaaggtatgggatcagttgaaagatcaaaaaggagggtccatgtatggaaaagagccatagttcatttctgtttatgttttgttatggggttcttcactggctttttcccaacc

SEQ ID NO: 16750 - DNA, 3299 bp, Cannabis sativa
tggacaacctaaatatataatatttaaatttaatataaaatttaaaatttaacctaatattatatataatctaatttaatataatacaatccatccttatataattaaatgcatcatatataagatcataagagacaaaaacattagataaagaggaagtaaatgaaaagaaatggtataatagttgtcaagacagtaagctaattgtctgttgtaacagttagtgtgctggtatgatttgttaggagttagttagattggtggttagattcgttgctcacttaagcttgtatataaacattattattgtgctctaataagacaattcttttctctttttctcttgtttctttcttttcctttactttcttttcccttcttcttctatattactctcttcttgagctccataacaatggtgagaaaaaaatcaaaacttcaacaatagccaataaaataatcacactattaatatacttttataatattaaaatattttttacagtattacattcaaatgatattttcaaagttacacagtatattcaaataattttttagttacaatatatttatttaaagtaacttaaacattgtattaaaattataaaaattttgcgtgagaaaaaatttatatatttatataaagtcactataacaaattagatttttgatatcggttcgaaggacgtttctttgaaaaattgacatatttgatcgaggttttatgaaagaatcgtcgtcttcgattacttattcatgagtaatctcctcaggtgttgttttttatggaaactaaattgtgtgatagtgctctttctcgctttaaaaatgttttaaattttaataatggattagaagttgctcgggttggattgaaaggtagtattatgttattgtggcaagatggtgttgatgtaactcttttatcaatgaatacaaattatttaaattgttatgtcttgcttgatgaaggccctcgttggcatttctttgctatttatggttttcccgaagctattaataaaaagtatacttggaaatcaataaggagattagctgatgtttcaccacttgatccatggttgttaattggtgacatgaatgaaattttctcacatgaacgtaaaaatggtggtccgcatgcaaagaagtgataatcaaatgcaaatttttcgaacgacactcgatcaatgtcttttgagtgacttacatgttgctgctgacgatttcacttgggctaaaaataagaaaaatccatatggtttagaggagagaattgattggtgtttcatttaaaatgtatggaaggacactttagtcttgccaaatctaagtcacttaaactactacggttcagaccatagagtattaatggttgaaattgttttcactcaaacaccaacctgtattgccccaagaagatctcagtttagattttgagaaatttttgcttaaagataaggagtgttctgaaattatttccaactcttggtgtcataatgcatgtgatgaccgtgccactagtatagtgacttctttgaataattgtgctaaaaaactttaaggatgacatctcaggaaatttggaaaaatgaaaaaggatatttttcttgcacagaaacaatccagcaattaaattttgctgatagttctgatccaaattattcccttaatgttcaatcagttgaatctattttggatgaattgttggcaaatgaagaacaatattggcaacaacgatcgagggtcgaatggcttcaattgggggatcgtaacaccaaattctttcactttaaagcttcaactcgacattcaaacaattggatcaaagctcttattcatgatcatggaaatatcacaactacaaaagagggaatctctaacttggttgctggttattttaaaagcctttttactgcatctaatgaggatcattgggctttatctcatgtcttatccacaattccaacaacaatctttggaacaaaatgaatttttatcacaggacttcactacttcggaggttactgcagcttcaaaaactatgggttcagataaaagtccaggtttggatggaatgtcggcaatattttatcaacacaattgggatattgtgggtgatttagtaactaaggtggttcttaatgtcttgaacaatggtgccagtcttgaagccttcaaccatacactcattactttaattctgaaggtcaaaaaaccaaagacaatgaagaattttcgcctgataagcttatgcaatgttacttataaaattatttcaaaaatactagcattacgattcaaagaggttcttcattcggttatctttgaaactcaaagtgcgtttctttctaatcatttgattacggataacattcttgttgcttttgaaatggtgcacagtttgaaacataggacacaaggctctaagggttttgctgccctcaaacttgatatgagtaaagcctttgatcgagttgaatggttttttatcgctgctgttatggggaagatggggtttaatattaaatggatttcactcattatgacttgtctacatacaaattccttttctttccttatcaatggtgtagtttcaagttcagttgttcctcaacgagtcttacgtcaaggtgatccgctcttcccatatctcttccttattttttcagaaggtctttcacgcttgctacagtatgaagaacaagttggaagacttaagggtctggttgtgtctcgacactctccgacaattacacatcttttatttgcaaatgatagtctcctcttatgtcaagctaatgactgatcatatgattcaatcaaacgtgctctagatatctatcatcgtgcttctagtcaacttttaactacggataagtcgtttatgtccttttcgcctaacactctggaggctgttaagcattcttttcagcaaattttgggcatgccgatttgtgagtgtcatgaatcttacttgggactccccgcatataagaaagggataaatcacaactattcaacaacattaaggagagaatttggaaattaatgcatgcttggaatgataagattttttcaataggtggaaaggaggtgctcttgaaagcggttgtgcaatcaattcccacatatgcaatgagttgtttcagattatctacaaagttttgtaagcagattgagactatgatggcaaaattttagtggggtccttctttagataataaaaaaaatacattggaagaattggaaatccctatgtacttctaaacgagaaggtggattggtctttagat

SEQ ID NO: 16751 - DNA, 4546 bp, Cannabis sativa
ccctacgaacatcttagtgtatagattgtgatcatacattgacaccattcatttcatccccattcacgttacgcccgtaaaaaaccaaagccaaagaaacaagttcttaacagtaatgtattgagtaatgaaattgttacagaaatccaagtaatagtgctgaacttagacattaagaaaagggaaacaaatagattaatacaattttctcgcaagcatataaaagatcagtcaaaacaggaatacattcaaaaagaaaccttactactccaaaaagataagagtggataaaaatactcaacactacatgttttggttctcgtattaatgcaaacatggtggagaaaattacagtcactgccattcaattatgataattggaaaaaataaatgtattgatgagtgtgatacaaacaactttgggttgatttacaatggctagtaggaccaaatttcgcagcagttgaagtaaagaaagccatacactgccgagtaatttaaaagacctcagacaccttgcttgcaagcacatgttctcgccgttcaacataattaaacgggaaccaacctgctttccccttgcattcaccttcggcccatccactgcttgagacctgcatgagcacccaaaaaccttgtcatgacagacaaaattcgaaatatcattgtaggcatcaaaaagagggacaccatatgattgaaaagggtggaagtttagttatgagaccacaaccaaacatcccaacatattaatggaaacaacaaaagatgctgggatagaaaaataacgatggaagaaccttgcgaacaacaacataatcgccgatagacagacttaactccacgtcggtgacagcattaaatgaatgcattacctacaatgggaatatacagttagaacttgtaaacaagtctcaaaatttgaaaatctataccaatcatgacggttggcacttcaagtgtaaacaaacagggaaaatacctcccccaagaaataatccgcaccctcagttgattcatcgtaggtttctgaatcaaaggcaccagtgacgtcttcgtatgatggtggtggaggcatactgttctctgcagttggagtggaaggtgcttcaatctgttggcgctctgacgacatctgctgaccacaaatttttatttcatcatattaatgtcaaataatttatacacccaactaaacctctcaaagactccatgaatcttaaaaagacgtaaataaaatatttcatacctctccttcaagttgatcaagaatctgaaggactctttgatggtagttgcgctcagcttcaaccttcatttgaaacccaaaatatcttgaacttaataagacacattttgattgaaaatgaaacagatataagcctgttttcacagcataattagataacgaaaataaacagccttttgtattaccatggcaagaagacgctgaagagtcaacctctgttgttgtccttcaacagccgccatcgccgcagcagcttctttccccattgttgccacattggactttagctcctgaagcctgttttcagcagcttctagcttcataataaaatcaggagtgcttgtggattctcgtaattttgcttggcgtttggatacatcaatagcctgtctgggtgcaatcataatgtaaagaccaccttgtagaaatcatcaatcaagcttaaatactaaatgaacaatatactttacaaaaatccatacattctgaagtttgcctccatctagatttcatccaaagaaatggtaaatccatgacaaactaccgagactggtaaatactattttacaagacagagtagtaccattaaattacctgagcttcagcttcctgtcgcattctatcatatcgttgagcaagatgtcgagcatcgtccaaaggagcgccaacaaccattgctcttaaaggttccgcaacctggattatttttcaagaaaagaagaactcacttggtcgtatgattacttataccaatagctctcttactcatacacattagaattttctaataaacataataccaatcccaacctgagtgccaagtgctttcaaaagaattccatgctctttttccatttgagcacgagctcttccaaaactctgggctgctttggatagcgtattaccactggtacaagtattttcagtaccatatttcctgctgtcttcggacaatttggtacctgttaatatataaatacattactttttatcaatatgtgttatgaaaacaaatatgaaatcacatcccataaataaaagggcgtctttttagaaacttgcctatttcaacttgcttggatccagtaacaatataaccttcaacaccacgaacaatatccctttgataatgctgagcaagtaagagatgaagatttaagaaaaaactgaagaaatggtatagttacattcaagcaaaaaattgaaaacaaaagattaacctttccagcacgagttgaaatgtagagcctctcaagtttctgatgttgttggagttcagttccatcagcgccaacattatctgaacctccgtatataccaccagcaaattgtttgaagacagcctaagatgttcaaagagccatatgcataaattagtaaaaaaaaaaaaagaaaggcaagtattttatctactttaatctttcttaattgcagattacccactacttattaatgcaggaccaaaaagctgacacaagtaaaagaaaagaaaaaaccttctttcttttcctttcaatgtcatattctcaatcaaagaaaaaaaaaaacataatcttaactccaatatataaatgaaaaaacaaaaaaaattgcaaattgaagaagaaggcaattcaaccaaaatactaataattgaattcaataaatttttaaaaatgaaaagtttgaaagaaagctaaaatagtattgaaatcggatcaatacacgtcaccatcaaattgatcaatttcttatttgattgattgatctcctcgatcacagtaattaacaataattaatatctacggaagatctagtcaatagtgtccagtgatctaaattcttgattcataagaacgtaattaattaattaatataaagaagtacggtaaggggtagaagtgaacctgctgttgcttagcgacctggtctcttagcttcgtagcctgctttctgatggcttccatgaatgaaattaagagaaagaagattgggagatagcttttgggtttggggaattagaaatagaattatgagaagactattttgattttcgattagattgaattgaattttgaatttctgaattgtggcttttcgttttgctgattgccccctcaatttttgagtttcgatcgcaacggcaccattccctgttatcctcacctgacctgagttttccgtttctttatttgttaagtcttgaattaaactaatgaaaaaactaaacgtcgttatgtgtcaatgcttctcataataaaagcatatattttatcatttttttttcaatttattattttttttttaaaaaaaaaaagttaatttcaaaaattaacgcaagcatgtgtagtggttgggacactttttgtaagttaaaaagttgcttgctcttgttgccttatggaggagtttgagtcctcttcttgacacttttaacatggccttaaaagaagggtgtcctattagataagacatgaatttcttgtgtggaagagtcttagcttgcaaccaagtaagtaagggaatatgtataagctctagggattatgagatccttaataattttatgtaaaattttgtaagtatctcattggaataaaaaagtttagtttagtaaaaaaaagtcctaatattttgccttgaaattatgggttccattcatgatcttttcttttaatttttaatggagaataaaattaaaacaaaagagtgttaagttgtggctggaattcaaacccaagggccagaaacaagaaagaacttttgttttatgttattattgattaagttttatcatgtaaaaaaaaaattaacttatttttttagaaattttggacacgtgactaacttgcctactcctcaaatcgatcctcgtagaaggaaattaatagggatatggtgtgcaccaattaatctactttcttttcaagcaaaaaaacaaaagaaaaagaattaagatttaccactgttttgatatataatgctgaaatgggatgaatgtgagaatgtgtcaattcaaaagggttgcttttttatttgctctacaactttgaattgttggctatctatgagattaagcatgaacatgaaaaatcttagaaaagagaaagaaagagataagtaaatgagtttttcagagtacaagcaacgactgctgcagaccaaaatgtcgagacttatgatttttccgtgcatatgaacaaagacgagaacgggttgatctccaactatgtcgaccctcatactcctatatggattctatgtgattttttttttttttttttgatcaaaggagaaaattctcattaatcaacaagc

SEQ ID NO: 16752 - DNA, 7856 bp, Cannabis sativa
acatatagaccttaaaggaatgttgccttcatttttctatactctggtctaactctacacttgagcagtcatcacaattttgtggtatatttggaatgaaagaaacagagaacagcatggtaataaaaccaagcctcatgatatggtcttatattttgctttgtcatacttggaggaatttcaatctccccagcagtcgaaggcttcaactaactcgacttctccttcacggtctactaataaatctgagcccccgtggctcaatcctccttcgggcaagctcaaattaaatactgatgcggcagtaaacaagaccacgcaaattaccggttgtggagttgtgttaaggaactctaatggagacattgttgctgcttcttctaagtcaataccgggtgtttttaggccagaaataatggaagctttggctttaatgaatgcattaaaattgctgattgataatcagttgactgctcacatcttagagatagattctcttttagtggttaatggattacactcatctatcgcttcagtttatgatttccattgtctgttatcagacatttcacatctagtcttcaatttcccaggagtgcaaatttctcatgtgtatagatttgcgaatacggctgctcatttgttagtgaagtatgctatttcggtggattctgtttgtatttggttggaggaaatccctcccccgttaaatgcttattgtattatggatgattaatttaatataattggcattttcatttaaaaaaaacttaaattttattcattggaaaaaaaaatcacatttttttaatgttaatatgttgttttttattttgaaaaatatatattgttttttttaaaggtattaatgttaatattagtatctaataaaattgctcaaatattaataaattgatatatttgatatttttatatttatggaagtttttacaatatctttagaaaaattccgagatgacaaatttttaccgtttaagacctaattccgtgtttttagaaagaaaagaaaaaaaaagacccaattccaagtatttgatttgccaccttacttgatccattcttgctatttgacgactttcaacaatactttttttgtttgtttttttgcagtctttttttttttcttaatgatataatacgtttactttcaacaatactttttttgtttgtttttttgcagtctttttttgttcttaatgatataatacgttttcccacttgaaataaacatgccaaaatatgtagttttttattccaactatgaataataacaatgaggtctgaacttagccgagtgggttctctcctattgggaccactggttcgctatgtttcggattgttaactctttcttacgtcacaccccttgtatttgacctttgaccccattcttacggtctcttaccacgagggccccaaaaacaaaaatttgtaaggaaaaaattacagcgatttattccttaatcaatggcaacttgtacgtaatgaaattcagctttttaatttttaatttcttttttacttttatcgtgtgaaggattgaccttattatttataatattaagacataacacaatgattaaaaatgatttattaaaaataaaatcaattagtgcaacttggcgctcgctaataaagaaacgttcttcacagtattcaatattctttcttcgttgcaattgcattaatttttgtaaaaacaactattttttctggctgctctttcaaaagttgtctgtggagtggatcccataacaacgaaccaatcaacccaatacatgcgcgtgtagttatatagataagtacaaaggcttcttaaggagggagttcgaactttggtatcgaagaaagtaaagatttttctaaactaaaagccaataacaatgaactgggtattcttcttctctgtgagtgtgagtctatggcttcttttggtggatgtagctatggcagcgactgcagatgcttacgagagaacacttgatcagacacccacatgggctgttgccggcgtttgcgccgttatcattatcatatcaataggcttggaaaaagttcttcataagcttggaacggtttgtacacttgaattttctctgtttcttttacttctcttatgttttgtagttgtagtttgtttatttattatgttactagaaaacccaagaattaattttgttttctatgtagaaacccagaaaaagttggagttttgtgtagtgaaggtgattttccttgattataacatgcgaagttgctcggattttcgtttgtttgtgttaatgtgtctagatagggtcaacggatgtcgtttactaaatgcttcttagcgtttagttaatagaacaaaatgttcaacctttgattacaacgtttctcactggataatctggaactgattttagctgactttttcttttcctctcgatttgttgtttaaatgaataatctttgcacaaattcccccctttatttatttatttatattttttacgagtacaaacttgaagagttgacttgagaattataccttggttggtggttggttaaatgatttgttaagatgagaatgttattctctgaagttcttctggtttactttgttcttaaccatggtgaatttcattgcagtggtttacagataggcacaaaagagcactatttgaagcccttgagaaggttaaagctggtaatataatctgttattcaatttacattatcatgtgaattgaatgaaatacttgtggatgcttaattgacttcttgatgaacttattgcagagttgatgattctgggtttcatttcacttatcctgacctttttccagagttacattgccagaatatgtatccccattaatgtagcgcagaccatgttgccatgtactcttaaggaagtagaaaaaactgatgaagaagaacatcgccgtagacttttatggtttgagcacagagttttatctgctgttgacgctattcctaagtgcaaaactgtaagcaaatctattgctatgcttgtactaacatccgaattttatgtatttcttaaacaacacgaatttgctcatagtgttgatggaatcctttgatttgatataccctttgttgattagttttaggttgcagtgctgatactgaaaaagattaccacttccctactcatttttgctattggttgagctttgacccatggcactgtggttgaattttttacttttgaatgtttcattcaggtttttcatgcatattctatctaatgagcgttgagtgtacattcatacctatttttctgcatatgaaaatatctgttatttccatggtttgataccctattatatatatatatatatatatatattttaacaaacttaactcaaatatcaaagttattgattttggtaaaaatttggttcctattgccatatgatttaacagcaataaacttttcttttgactaatcttattctgttaacagggatacgaaccacttatttctgttgaaggattgcatcagttgcacatcctcatattcttcttagcttgttttcatgtgctattcagtggtatcacaatgttgcttgggaggctaaaggtatgggtgttgtatgttgcttatttttattttccaatttaaaattatatggctaccactaaacattcagcacagttcaatgatccttttgatgcttctttcccacacataaatttgcatgccaattgtcaattattatgttttcttttttaaattttttttaattttatttctaaagattaaagaataatggtcatgcctaattatgtttgaacagctccatcgactaatttgtatatggttttgattaactttttagaagtgtgtgaaagagaggttttgacaatattgtcactatagttgtactcatttctttttatttttttttgtaagttcggatgaagtcttttgttttattttttattctttttttcagttgcacatctttttcaatccttttcctatttttatgtcttttctctggaaacaccaaatttgtccaagctatcagaatacaacataattgacgattgttttgataaactaaatggttcattttcaccagtagcttatgatatatgtattttagcaaacgaactacaaataattctatatgcttgtatcaactcaactaaattattcatagccatacaccctcacagtaaatttgaaatcaacttttactgtgataagtaccgttctaatttgtgtcagctgaatcaattttttgtacctttattttcatagattcgtggctggaagaaatgggagctggaaacgttaacccatgactacgaattttcaactggtatgccatcctagagttcaaactttttggccccgttcgttttaaatcaatatcttatatcagtcatgatgaccagatttatgtttatgagaaactaaaaatttttgttgtttgaaatacagatccatcaagattcagacttactcatgagacatcatttgtccgagcacataccagcttctggactaggaccccaatctttttctatatcgtaagaaattttgactttcacatccatctttctttggttgttgtctcttattgttcagtaaggtcaaaacatgagattgaattctaactgctacttctaaactttgatcataaattttcaatctacatctatataagtaacatatgttactggctattttttagggatgcttctttcgacaattttttaagtctgttagtaagtcggactacttgacattacgcaacggatttatctcggtgagttttggttgcaaatttatcttatttttgttgattcctgtattctattaagtctaacaagattacatccataggtgcatttggctcctggaagtaaatttgactttcaaaagtatgtcaagagatccttggaagatgactttaagttagttgttggagtaaggtaatattcttctatttagtgctgtggttgttatgttctgacttcaaagtttgctatgatcattctgaaatccatctgtgtcctgattgttttgttcttcaatatttttggcagtcctgtcttatgggcgtcatttgtgatcttcttgttgctgaacgttgcaagtaagccactattctctggttattcatttgaactatatgatattatgcacttctgcttttaaactatgaaaagctgactgaaatgcaataacactatatttttcagaatggcaagcattattttgggcatctttgatccctcttattgtaagtagtggtttcttttatgttaaattttcaaagcttctttggattggtagaatttttaaacattgatatgatcgcagataatcttagctgttggaattgaacttcaatccatcttgacaaagatggctgtcgaaatcactgagaggcacgctgtagtccaaggaattcctcttgtgcagggatcagataaatacttttggtttggtcggccccaattggtccttcagctaatccattttgctttgtttcaggtattgaattctctctacagcagattctgttttgaacttatcttgtaattatgttgattttttatttttttttttggcaaattgtggagtttgtggttatcaaatttgatccaggcacaattttacttttcatggttttgatgttgaggtacaacatattttaactcaaggagcactaggttctttgagctccgaaattttgtattgcttggttctggttatagtagttgatcgaaaaccaacctttgggatctctttgatattgtattattgttggggtttcgaatataatgattaatttgatttcgttaaaatgaatcttattatagtgttttaagttggcagaattgatgaaatgtgtgtgatggtaaacaatgtgtgtggcttattgtacaattaatattgcacaccaacaacaagatcacatttatcaagacttataaattttggaaaatgttcattgtcttatattgtctttttaatggataatcttcaatattcattgcaccttatatcaagagatctcatacatttgagcaatttgtggagtttcatgtttgattttcatttattttcaatacttggggactgatccattttctggttcatgcagaatgcttttcaaataacatacttcctgtggatatgggtatgcacgcttcacccatacttcttctgcttataaaatattttatattctatatgatttgtatttttatttgatatctgtatggtaactaatctaatacccaaccacgaatgacaaaatttctgtttgtgcagtattcatatggattaaaatcttgcttccatgctaatttcaagcttgccattatgaaagtttctatggggtacgggcttttttctcttttgtttccttaatgaaatatgcgtgtatggaatggatatttggatactccattgaaagcaagaataataagctattattatgtttgaaagaagaaacaaattggcaaggcaacaaatcatcaagacattaatatatctattttgttggtttttcagggttggtgtcctatgtttgtgcagctacattacacttccactctatgcccttgtagctcaggtacctttctaatgtgttcttattagtgtgatctaagtagtaacaatacaaagcatactaacataataatggcaaactccagaaagtgtcttaatttgaaatgctaattaagtgtcattcatgctttcgttatcttcaattactaagaccaacatgacatttttcatcaccaaaaatgccttgtcccataatttgtctttttgtttacttttgttttgtttttgattattgttgaccaaactggattgtgattgttgcagatgggttcaggaatgaagagatccatctttgatgaacaaacatctaaggcccttaagcagtggcgcatggctgtgaagaagaagcatggaggaagatcccccaagtcccccagtgttacccttggtgctggaagctcaactctatctaaggtgcattcctcaggacacacactgcaccgattcaaaaccactggtcactcaactcactcaatgccctatgacgataatgagatatctgatattgaatctgatatgatgtctccctctgcgacaacaaacttgattgtaagagtcgatcacgaggacgaaatggaaatgaatgtacacagagaacaggaaaccagaaatgaagatgacttttcatttgtaaagcccgctccactgaagtaattataatggtagctggcttgacgttaactgcacataatttattgtattgaattgttttgtgatgctcattatatatatgagctaaatgcagtatactttgtacattatcagtaataattctttttccataattgtaatgtcttcctaggcttttttattttttatttcttacttaaaaagttccagttgggtataatttatattcatgtttagaatttagatattgcttggttttgtagagtacatgattttgaattccttaactgattacttcaaattccatgtgttaacacagttaattaatcctagttagttttctgttagcttaggttagttaatgattgttatttgattctgttaagagcttattgctttgtccttgcttgtatatatactttcatatcaatagaatcaagtgagcttcttttgctattttctctgtgtttattttcttccttgctttctttctctacatggtattagaagtctttgactcaagactatgtcttcgtctacctccgatcctcaggcccctgccatgactcctgcaactcaagctcctcaggcacctgcctca

SEQ ID NO: 16753 - DNA, 2736 bp, Cannabis sativa
tactttatcttgcttgaagttgtggtgcctttttttagtgtaatgattattggcttaagtgaaactaatagacttgtttgtagatttaggctgtgtttggaattggaagtcactgtaaattacataatattttaaaatataagacttgtttggatatgagatgctaattatatgaattcttgatgttttgtttagcaaaagtagttaatgcttaaaatgaaaagtttttagtaattacagagtataattacttaattatgatgagaggccatgagaattggagagtgcaatttacacccctcaattacatggttactgtgtagtgtgtaattgtacggtcagacaaatgtgctacattgtataaataccttcaattacacaaaaatccaattccaccatgactttccaaacacgttcttagtgaaaatcactttgtaatattaaagagattaagttagtaggagaagctgaactcttagaaatctgacaactcttgcttgttgtagcttccatagtttttgggattttttttatgtatgctgttcaaaatgtagcaagacattattttgtgtctatcttaaagtttgggaatgctactgttttggacccttaccacccctgctaaccttttccatgaatttccttcctaactattttagcacacttacatttcttagctgtgtcctgaacttagcaaaattttatggggctttgagtttttcctcttggctttgttctctactaaggggatgtttggtgtatgagttttgcttcgtgggctttaattagttgagaagagttaagattaagggaatcatctcaaactcaagtgattcaagagtttgaaattacccgaaaaataaacttttaaatagggcctatacaatcacaagccttccactaaaatcataccaaacatagacaaacaccacctaagagataattttatcagttctgattgttaagtttgtgtgagttcatgtgtttcatcaagtataatgattgtttgttcatatttgtcttctttattttaaatgatggatcttgccacttttcaggatgttgaagaattgaacagttcttctcttggtgatggttatgtttcgttgtttgttcggatgcttggactagacaacgacccacttgatagagagcaggcaatagtggcactatggaaatattcacttggaggaaagaagtacgttgatgccataatgcagtttcctggctgtcttaatcttaccataaatctacttagatcagaatctacttcaacatgtgaagctgctgctggtcttttacgatcgatttctctggttaatatatacaaagatttggtggtagaaagtggagctattgaagaaataactggtttgctaaatgaaccttccttgacttctgaggtagaagatggttaatttctaactgttcaaaagaaaaattcaatgtatgtggaaagtgatgcttaatattgtttgaactctttaggtgaaggagcaaagcttatgtactttgtggaacttgtcagtggatgagaagattagactaaaaattgctaaccctgatatcttgccaatactcattaagtctctagatgatgaggatataaaggtgaaggaagcagcaggaggggttttagcgaatttggcgttgagccaagtcaaccacaaaatcttggttgaagaaggtgctattccgaaactggtgagacttgctctatcatcctatgtagagttttgttcgatcgatcaattggttcaaaaagtaaccctgttaagatgtttgagtatactattctgtaaattgatcgcaattatgtaacaaatgcaggcaaagttgttaaaagatggcgcggagggatctaaggtaattagaaaggaggcaagaaatgcattgttggaactatccaaagatgattattacagaattcttattatagaggaaggtcttgttactgtccccttaatcggaacagctgcttacaagtcattcagaccaggtttgtattcctggcctagcttacccgatggcactgagcttgagcgaacttctaaaactccttccaggtttggtgcttccgaattactccttggattaaatattgatgacaagaaggttaacattgaggaagtcaaggtgaatgccattattggaaggacacaacaacaattccttgcgcgtattggggctattgaaatggaagatggaaaaagagaatccgagcttccatctggtcggaaagttaccattttgccttgggtggatggagtggctcgtttggttttaattcttgaacttgaagatgaatcggctttatcaagagctgcagattcaatagctgatgcatctattagtgaagaaatgaggatagcattcaaggaagctggagcagttaggaatttagttaggcttctagactataagaatcaagcggtcaagttatctgtaactcgagctttggagaggctgtctgtaaggtattttgctactgcacatttttctgctatgtttggatgctattgtgagttacaatataaatgttgccattgttactatagcaataacagaaagctctcattgaaaaagtggagtaagaggaaaatatacattctgatggccttatacattctcttcatatctcaaagtgagcatagtatgccacatctttttattaagagggcattttttttttcggggtggattgttttgagtaggggtttttccttaacatgtgca

SEQ ID NO: 16754 - DNA, 6204 bp, Cannabis sativa
aagcactttaggaatatgtttagatctgtgatttatatatttctttgagtgtttttttttaaaccctaacatatacatgtatttatatatatttttttatgtaatttttaagtatgtacataatattttttatataaaaaaaaaaaaaaaaattagaggggagccaaggccactccttagcccttcatagttccgtcactcggtcgagctttatattattattctttagcaatttttatacgtttactaatttcaaatagagttttggcagtggctcactgaattgtacattctgtgtttggttactgggttgtcaatttttttccctaagtcatgcattttaatattatgtagtttgcttgttatgtatcaactactttttttctatcttagtaatgtaactttattcttccttattattttttttttatttaaatatattttcttatcactgaatttaattttttttgaaataattcttattattgaattaggtttgttgtaaccaaaaaaaaagattggggccggttgaggtatccttttgggatcaaactaaaaaaataaatagaggagtgctaccgtcaacctcctattttcaacctcttagtcaactttcacgtctgaaaacttatgcctatattatttttttttcaattttttttttcgtggcgatgttcgttatagctataatattaagcctataaattttcaatttttttcagaataattaacaattttttttccctgaacttttgacaatattgatatgcctctaaaacatacgacttgttaagaatctcccctgaactattatatttaccgaaatttagtccttctgttaggttctgtcccattattttatttaaatggtgtcgtgtctttgttaattagcaactttgctccctaaactttgactactattaaatcgtaccttgtcaaaataaaaatgagaaggattcaatatttttttttagtaaatctttaaaaataatttagatcttaagaaaattcattttaaatgattaagaaaatttaaaaataaattaaaattttaaaacaaattacgcgatatttaaaattatttattttttattagaaaatttatttagagattaaaaaatatattaaaatttaatttgtaaaaatatattaaaaactaaattttacaagaacaagcttgaatatattttgtttttatcaaaaaatattaatttatttaagtaaacataacattttttagtttaatttataatttttttcaaaataattttatatttttactgaatttttaattatttttctttatttgttaaggtatgagtttataaatataaataagtttgactttttcttcaaaaatcttagttcatttaaattacttattagattctcaataattttggtttgattttttaagatacgtgttgataaataaaattttgaaaatattttttaagtaaaattaacattttttaattaatttaatatttttgtcttattttttaataatttttgttattattttttgaattaatagaatattatgatttctttgaaaaagatagaatattatcatttttaaaattatttttttttaataaaagtgagtaaaattttgtattggttaaaattcaaggggtaaaaatactaatttttaattgtaaaagaaacggatctaatcattaggagcataattatgtaactgttacattttagggaaaatttttaacaagtcgtatattttaaggggcaaaatcaggtagggctgaaagttcaaggggcaaaaatactaattatttttttaaaaatagtttacagtatcgacaatatagttcctgatattctaatttaccaccatatgttcaaaaaatttcaaatctatttttgcactgtaaattatttcgattttttaaaaaatttacagaaatgatatcatatattttcaagtgtggaggttgacttaaaaaattgtaataggagattattattagcactcaagcaaatttttaaaattcattcactttccagacaaattatattgaaacccacaatatataatttcttgtttttttaattatattttgctaacaaatatatatttgatatttacatttttttaataaaataaaattaaaactacaattaggactgacaatttgtgttatcgtattatgtttgtgtcgacacgtttatgataccacatgattattaattatgtcaagatttgaaacacgaacacaatacaatttcttagcagattagacgacacgataacacattttataaatgtgtcagacacaaacccgaaattaacatgattaaacatgtagagttaattaaattcattatggaaaagagtttaatgaacttactaagtaattaaaatatattgtttcaacagaattattaaaataaaattaatttaatttaaagttaattttaaaaaataaaacaacaaaaagagattggtatttaagtaaaataaatagattggttataaaacattaaaaaataaagaaaatgtcagttgtgcaacaaatatatatatttttctacctcaaataaagaataaactaataaaatgttaaatatatgcattgaaaaaataagaaaataacgaaaatcatatattaacaagataataaaatagacgaaaataatatacaaaataaaatattcttctaaaggggtataaagtagacaaaaataatactaaaaaatactctatgtaaagaaaaaataaaattataaataggaaacttctttttaataagaaaaagggaaatattaaaactaaagaaaaataaatatgtgatagaagatgtttggagtgtgttgagtgtataggaataacaaaaataaaaataaatttattgccaaaaattaatggcatgagtccatgtttaacaagcggaagaaacatatactttttattaactttttatagtactaatgtaatttagtttttttattttttttactaataaattttagttccctacatataagtatactataaaaaaaaattagtcacaacaaaacttatgactattaaggacaatggttaaagactgttattgtgttagttaggagttagttacttctgtttattttcggttgtgactgtcttctttctctttcatgagtcttgtattctatattaaccattgtactctattttcaattcaatgaaacagtgattcccttctttcattctgttctctctatttgcatcataacatggtatcagagcctccaatcgttcactaatggagaatcctagaaccaacaatggtggagctttaagattgaaccaagctcacaccagaaatcctcaagaaattcccctccctagatcttaccctgtttctttcacccactccctctccattaaacttgatgagcataactatctcccatggaaacaccaagttcttgcctcaattaaagggagtcgtcttcaatgatatcttgatccatctcaaacacatgtcaaatttctcactgctgcagatgaatctactaactcggttaatcttgcctacaaagaatgggagcagcaggataaccttcttgtttcatggcttctttcgtctatgtctgaaaagacaaccaacagaatgattgactgtgacaccacagctcagatatggagttccctcaatgaatactatactacactcaactctgccaacatcagtttatacaagactcaactaagaaacacaaaaatggtgggctccctgaacgattttcttctcaaaattaagggaattgttgatctgctagccaccattgaacacaagcaaacccctcaagatcacattgaagccatattcaatggtcttccccccgagtatgatgtattcgtcacctctgtcacaacaagaaaagaggtgtacacagttgccgagatcgaagctctccttatggctcaatatgttaaaagaatgccaagactctagagataaccaaaggtgaagctaatctttctcaaactaaacctcctttctctaatttccatcctcaaaacactttttcctccaattttcagggtccctacaacaatcgcggtcctccctacaggaccaatgataaccaatttactcaaccaaacatgtccaagaatggtccccccaacaatcgcagcacccaacctaaccctgctggcagaggtggtcccaatcctagtagaggaaaccagggtttttatggtcaaaaaccagtctgtcaactctgcaataaacctggccaccttgttcgataatgcttttacaggtttgataagtcattccttggcccagaataatttgctccctttgctggtcatgccaatgttgcagagtttcaggcctattttgcctcagctgaatctgttgcagatgagtcttggtatccggactcaggagctacacaccatttgactccaaacagctccaatcttgacaccagtacatcttactcagggcaagaacagatcatgattggtaatggcatgggcctgcctattgagaacataggtaacacaaccttttcctctctctttccttccaaaactctccttgttaataatctcttacatgtacctgccatgacaaaaaatttgttgagtgtttcccaatttgccaaagataacaacattttctttgaatttcaccctttctcatgttgtgtcaaagatcaggtcaccaaggagatcttattggttgggaagcttgaaaatggtctatacaaatttgatacccttcatctctcatctccctctgtcaatcaagctaaagctcctcctacaagtctatctacgcagcatattcaatgttttcacagtcatacatttgtacctaatactcagttttctctttggcatagtagacttgggcatccaagtgccaaaattgtaaaacttgccctctccaattgtaatatacatttacctaataaagtttttcctgatatttgcaatgcttgttgtcttggaaagtcacacaaattaccattttctcactccacaacaacatacactgcacctttgcaactcatacactcggatttatggggccctgctcccataaattcctcaaatgggtacagatattacataagctttgttgatgcatactctaggtacacatggatctatatgcttagaactagggatgaagctttaccaactttcaccaaattcaaatcccaagttgaactacagttagggtatcaaattaaagcattacaatctgattggggtggagaatttagagcctttacctatcttacagagtcctcaggcattatacacaaacttgcatatcctcatacacatgaacaaaatggggtagttgaaagaaaacatagacatataatggagacaggtttaacactccttgctaaggcctctttacctctctccttttgggatgaatcttttagaactgctgtgtacttgattaacagaatgcctaccctcaccataaagaatgctaatcctctagagttcttgtttcacacaagtcctaattactccatgcttagagtattcggttgtttgtgttacccgaatcttagaccatgtaacaagaacagactacaatacatgtcaaccccttgtgttttcctaggctatagcatgtctcataaagggtataagtgcatgtcaaaggataaaagaatttacatatccagagatgttatctttgatgaacaacatttcccatatgctgcatccaacacagcctctaccaccactcaatgtcagttcacacatcatacatcaggtattccccctctttcttcacttctacatgttaacaatccccaaatcccaccacctattccacctcaaatacccgtgtcaccacctccctcaccacctactgaagtgcctgtcaacaattcacctgttcatattaatgaacaaaatcttgtcaatgtacctattcaatataatcaacctatcttacccccaccttcactatccgctgcacctaatgtagcagacccaagtgctacaacatccactcaagtcacttccactcatcccatgaccactagacttaaatcaggtattagaaaaccaaaagctttcctagcttcttctacaccccgaactgttacctctgctctcaaggatcttatttggaacaatgccatgtacaatgaataccatgttgggttttatgccctaaataaaactctgtttcaatgtaa

SEQ ID NO: 16755 - DNA, 2877 bp, Cannabis sativa
  modified_base (36)..(39): a, c, t, g, unknown or other
atacttaattgcaccaatagcgatattgacacgtannnnggtgctaggcaccagtggtgccctttagcatttctctttctatattaccacacacacacttgttcactctgtttctctatcatgtgatttgaggctgagaagtcagaatgttatgaagttgttcacaagttttgttttggtgttggtgccaatgctagctacttatgggaacttcaaccaaaccaatgcatgtgacaaataacccaattaaaaaattcttcaatctaccatcttaaaagagttttacccatatatattttttttttatttattttgacatttaaaaaaaaattagtctacgattaaaaataagtttaaacagttaattttataaatgtataaaataaaagaattttacggaatattcaaactctatttttagcgtaatatatttttataaattttttaaaattttatagaatatgttaaataattatataaaaaaaataaattaaatatactcttaaggctcatttggtacgccgtataaagatcgtattatattatttaataataaatagcactatgtttggataaagtaatgtattatattaattattacgaccaaaatttttaatacaatgtatgttgtattatttaatatataacaaatagtctgtattaacttgtattataatatttacaaaagattcgaggtcaacactaatctctgacccgaatccggacctgggactcaaacccgaacccaaatttgtgacctagacccgaacccaacccggactcaaacccaaactcgtgacctaaacccgaacccgggatacggatccaagacttgaacccgtagttggtgttgaggtcgagtttattgaaaatatattataactttatactatctattaatacaagtcaatatcaaatataatattgtattaaataatactaatacaatacaatataacacaatacggcgtaccaaacaagcatgctaaaacaaattaaaagtctattgagggactatttaatagattttgtgccttattctcttatattcatttacatcatataaatacaaattcattatataataatgtataataatgaaagactaaacaattattttattcttgccaatgtagtttaaaagtctaaaatttttgagccagcacaagagaagagaagacagacattgatttccaagtggtggagagtaagagacaggtgtataagcatgcatatacatatgagaacattgtattgggacacatggagagcatgcaatgcataattctctgctctcttcttctcactctctctttctatatatagatacatgcatgacatggctgcctcatcatatgatatcatatcaatcaaacatcaaacaatggacagaaaaggaagctttggctttggtagtagagtggtcttcttctggttgtttttggtgttcattctcttggcttcttcttctagtaagtagtttattatatataatgtacatgtgtgtatatatatataatgatgaaataagtaagtgtgtgtttttttacagagatggggagtgtagagggaagaatgtgtgaatcacagagccatcattacgagggggcatgtgtaattgatcacaactgtgccactgtgtgtaggactgaaggattctcaggtggcaaatgcaagggctttcgtcgccgctgtttctgcaccagacaatgctagtctctattcctagctacctacatcatctctttatcttacttttcttttcttctcttttccttttcaaactagtaatcaatgaatgaacaaactaaatgtctttctcgtgcttactcttttaccatttctcttctctcttttttctaaaaaagaaaaaagatcatactatatgatatatcacaacactaggaacacattttatatatacataagtaaaatgcatatataacaaaacataatatcctaaattgaagtgatatgaatggatatggaataaggtggaatatttataatgttaattttctcaaaccaagccaagattaccttacatactattattatagcagcattgcctcttgcttaattgtactaataactccattgacactgaatgcttttaacatactaatagagcattgttagggtaaataaatatataaataatatacatgcactatttcattactcatcataattgctaataataataataatagtaatgcaacaaaattgactcatcatatgtaatgcaatgtaaagctcgagattctcaatcggctgagcttaaaacatcaataactttcctgatagaatttctaaagaaaactaagcacccattaattattgctaaagacaatatctttagaacatctgaaaatttgtatactaagaacaaagtaagtttccagctagtcacttgggactttaatcaaacaggtggagatcacttcctaaaaatcagaaaagcaaaacaatagtaactgagatggatgtcgaacctatcaatcgtcttctgagatcagatggggatcgtccatgagcgattcagtaggaggattttggtggtgttgatggttttgttggtctgcattcataaaagtctccatgtctctcatcctcgttcttaccacactggtaaccagaactgccatgagaaataataaataggcatggatgagactaagcaacacatgtacaaatgagtatcacatacaaacatatatatatatatatatgtatatatatataataaagagagagattgtgtgtactggctgctgttccgatagtccatatccagaggatcttcaagccaggactggtctcccgcggcataactagttgggagctgttctgggtcggagtagaaaaggaggatgt

SEQ ID NO: 16756 - DNA, 3062 bp, Cannabis sativa
tcctctgtaatccatatacataactcataaatactcagaattaataataactcgtaaagtatataactcgtaaagtatatagattttaattataaaattatgtaaaaaaatttagtgtttcaatatatatttattaataattatatataagtaatttttatttataaattaattgttaacgaaaatatgaattaatgccttatattgttaaaaaaatgaaccttataatatataatcttctatttagatttatatctttcagtactagattgttcttttctccattcccaatttctcatgtttcataatttggtgataatttttttacattacagtggaagaaagttcttcaatttcttattataaatttgttactcaagattttgatagacataattgatttgatgggtctaattatgtttatgtaggtaaattcgtacatgatatttttctcctcttgagactaattctttgagtggatttccctcattattcttagcaaaagattaaggttatctttggaaattagatttcggtgaggaaagcatgaggaggtaagaaaaatgtaagggcaaaaaaatatagaaaataaaattaaaacaaaaaatcaatttttgtgttccatataaaaattttattgaatcaacatttttcgttataaattctttccacaccaaacatgataaattgaaactttttttttcccatatttttcttaccactttctttcccagccaaaatatcaaacttctaaacataccctaatactatgtttggtaggaatgagagtataatggatgaaaatttgagagtaagatggattagagaagatattaactctccattatgtattgtttgatataaataatgagtaaaagtaaaaatattggttcttttgaatggtacaatttacaaatccaaaaattacaaccaccaattcactttggtaaaagctttgatattgtgattaataattctaattgatttcagaaattaagctccctaattatgtgaaaaattgggccttaattcattcatgatacactttttcacacccccaacaagcttattataaaaggatgttaacctcacatttccaaacaaacactaacaaagaatatatcactctacaaatgagacaaaatttgctcataatttggtaccaatactctcatgattttccacacaatatcatgtgattccaattaatgaacttcagtattatatgttcatgtacttcatgtgaccaaaaaacaaagtcattgctttttgcaatctttgcagttgatgaataagataattaagagaataatagtacatatatcaaacatgcatagatgtacggatgcaaaaacaagcaaaatgtagtaatgctttttaaattaataagaaaattacataataataatccagttgaaattgatcatgaccaataaacaacttgtatctggtgattaaaaaagcacaccattgcaagtcacatggttgtagtttcgttacataatataattaaccctataaaataaaggaaataaccatatgtagtaactagttagtatatacatatagtaactagtgactagtgatttttagcaaagaaatgatcgataataatgatcaccaaaatgaccaaaaatctttctttgcataaaaactgtgtatatataaaattatcttaattactctaaaaaaaaaaacttgtcatcatgactgtatatatgtgtgtgtttttccttctaacccaacttattatatatctacttattaacctaataaatatctctcattataatgagattggatcatgagagaggtatatatataataagttaaggttaaaacattattatgtatatattactttgcagaagaggcttttctccaccttgcaagtcgcaatagaaaagtcaaaacttctgaagggtcatgcaaagagttcaaagctttggtctcctttggaatggacgacacaattattggaaacccttgtcctctattccgaatggcctgtaattataatataatataattaaatataattaaccacttttcattacaacttaaccaactccaataatctataatactaactagattactatttcccattgtagtataattcttaattaattagtctatatgtggaagagtgtatataaattaatacatattctaataattaggctaatataggttattatatggaatttaactatatgtttcaaaattgatgtgtttgtatcatcatacaagatatatataaaaaaaataatgtgcaatgtacatgtacgtgtcatacatttcaatccactaatgtatgaatatttattatttataatacacttaattttagaccttgaaaagtgtaggtatataagtttagcttgcctatgcctaaggctggccgtgaatgtgatttatgcattatggtatataaaaatcaactgtgacacatcaactatactggtaataacaatataaattaatatagtataattagtatatatatatatatatataatgtataccttgaatgcgtcttcatcagtacgatcatcaccaatgtacaagggaaggacttcactagaattggtgaagcctaagttgtcaagtagatagttaagtgcattgcctttgttccactctatagaaggtcgtatttccaaaacctacacacacatattatataactagtttagaaatacttaaaaaaaggaaaaagtgatcactaaaatatgtgtgtatatatattaaagtggatctagtaattaatgtaattttttattttttattttcaaaaaatttggaagtaaggccctctagtgagtactacttattttaacttttaaattaatcaaaacataaagatgataacacaatctgttacaaaatctccccaatgaaccataattagtactacttatttagttttggaagaattcttttgaatattatcatggccttattaggattgaggagaattgaagattggaatatgtagagaccatatattttgagttgttgctcacaagaaagagaatttaaacaataacaatactact

SEQ ID NO: 16757 - DNA, 3747 bp, Cannabis sativa
  modified_base (32)..(44): a, c, t, g, unknown or other
  modified_base (72)..(84): a, c, t, g, unknown or other
tattttagtctacaattatcaaattaaaaaannnnnnnnnnnnntctacaattatcaaattaaaaaaattannnnnnnnnnnnnaaaaggcaatatttttgttagtagaggctatagcccccatataagcactattgggtccgtccctgattactcgtactgtgtcatgccaatattcttaaagagtagatctgacacgaactgatattttcgtgtcgtgtcggtctatttttttttaaataattatttataaatattcaaatttttattaaaaaaaattattataataatttaaatattttcttataaatactcaaatttttatatcacaccttataaataaattaatatataatcttaattttttttatattttaataattttaattataaaattataatattcttttagattttattattattttaatttatttattattgatagattcatattttattattattattattaaattataaagtttttaatatgtcgtgttgtgcttcttgcgtttgtagcttgtagtgttttttaggctaatcaattcgtacttattgtgtctttcgtgtttctcatatcgtgtcatgtttaagcacatacttatcgtgtcatttcgtactaatttgtagtatcgtatcgtgccgtactcaaatctgcatttttcgtgtctaatcgtattggtgccaattttgtactgtgttaaagtatttacaacagtaaataaaacatggtggaaagagagggtgaatgaagctgaaagtaaaaactcttatcttccctatttatttttgtaaaacaagagtattgtaatatttgtagctcaataccaaaatctaaagacgaaaacaaaaaagagggggcatgtcctgtcgttataggtctattgtcattattccctacttacattatattataacctattacttataagcaccaaacacacacacgcttataattaaagtcttataccaaatcagaaaaaacagagcttccaacttctcccaaaacccccgcatcgtactcttctcacattaattcatttagccatgaatatttcaattcctcttctccaacttatcactattattgtttgcaatctcatcacacaaatcatatcttcttcttcttcttcgtccatggacactctcattttgccattgaaactccagacggtcacgaagccatccagcaaactctccttccaccacaacgttacgttgaccgtcaccttaaccgttggctcgcctccacagaccgtaaccatggtgcttgacactgggagtgaactttcatggctccattgcaaaaaagctcagaatatcaattctgtttttaacccactcgcttcatcttcttattcccctgttccttgctcctcttcaatatgccggactcagacccgggatttcaccatacccgtttcttgcgacccgaaaaaactctgccacgccatgctctcctacgccgacgcctcctccattgaagggaaccttgcctctgaaactttcaatattgggtcttcgcctcgacccagaacaattttcggatgcatggattccgggttcagctccaactctgaagaggattcgaaaacaactgggcttatcggcatgaaccgtggctccttatcgttcgtctctcaaatgggattggctaaattctcctattgtatatcgggtcgtgactcttctggttttatactcttcggcgaggcgagtttcgcttggctcggaccattgaaatacactcctttagttaaaatgtcacaaccattaccgtactacgaccgagtcgcttacacagtccaactactagggattaaagtgtccaacaagctattacagctttcgaaatcggttttcgtgccggaccataccggggcaggtcagaccatggttgactctgggactcagttcacattcctactaggaccggtttacacggcattgagaaacgagtttgcacagcaaacgaagagtttagctccccttttaaaagaccaaaattttgttttccaaggggctatggatttgtgctaccaaataccaccgactcggcggagcttctctgattttccggcggtgactttgatttttcaaggcgcagagatgagtgtttcgggcgataagctgttgtaccgggtacccggtatgagaaagggcagtgattcggtgtactgcttcacatttgggaactctgaccttttgggaattgaggctttcgtgattggtcatcatcatcagcagaacgtgtggattgagtttgatttagccaagtctagggtcggactagctgaggttaggtgtgatctagcgagtcaaagactaggtttgggcccctaagcgtgttgaaatgatgggaaaaaccaaaaaagagaaagaaaaatcaagcagagttgggcgagattgtttgtcgttttgttcaagtttaggtcgtgttggttggtcgtcctggatcaaggtcccacataagcggaatttaactaatcatgagatgccacgtgttggtctccctggccatggtgtctacaaacgtggtgctccactgttccaaaggtttgcttataggatgttagaaaagaatcttcttgtgtgccattgctgcatatctctctgactctgactctgactctgaggctgcaaagtggaaaaagtaataaatttatatggggagaaggaaaattgaagagtaatgagtgtattgttggtatgttaattgttattaattggtgagcaggtgggatttggcaggtttttggtttatatgattttggagctaaccatgatgttgattggtgccatacagcttggcttggcttgtattaacagagatgttatctcgatagactgtttctttttcccattgaaatggtgccgttcatccaaataggacattaggagagctgttcaacaccataaaggtcacttctatgaaattaatacgactgtggattttactataagctctttataatcaaatattgttgtctatatatttcgaatttcgataagtttgtttgctttgctagaacatcaatccatttctttatgttaaaactttaagcaataatcatcagatacttgatttgagtgtattgtactacacttggatattattaaacgtatacaagaccttgaagcctttgtttttgtttttttttttttttttttttttggtgaacatgcgaaatgtatatatacatcccacttccatcaatttacaactcacactacctaaaaaggcctgcatggttacaacttttcaaatcaatatatatctattttagggacttttttaggtattacactacttatcttattttttttacatccatcttaatcttttttacaattgcctttattctatacactttcaaattccatagagcctcatttctacaaaaccaaatttggtataccgttgtagcaagtgcagcaacttaaacttgtcgtctaaatctgatttctcctttagctagcttcttcagtaatctgttcactgaaatatcccttgctctccaatctagccactgttttactttctttaaacaaccaacactcacatggcacttgaagaacacatggtccttactttctctattaaatccacacataacacaatctttatcttgaactattttgaatctaaataattttctttcaatctcaaacgtctagtaagccaaagaatatacctatgtattacaaaatcaagatagtgagaaatgaaagagttgatttgtg

SEQ ID NO: 16758 - DNA, 2051 bp, Cannabis sativa
  modified_base (1991)..(2012): a, c, t, g, unknown or other
ttgtaattggatcggtcggttctcattggattggattgatttatgcacacccctagcaccaacaacagatttccccattttcaactgtctttttagcaatgccaacctttgtaaacccctcctcatcaacctgtacagacttcctattatcattcttcacaacccactgctgtttagtaacaacattcttcttacagtctgcagcagagtgcccaacactaaaacgatgtgagcaagagacaggtttccactcatatttgatcccaactgaagtgttcgagccaaattcattttcaaattcgagcatatcaggcatgtgttgatccatgagaacctcaattaaaatcctaggatagttcaatctctccctctcctttgtaacagagtccaccattaatggttttcctagctgtctaacaattttgaagagtgatttttgcccccagtacttcaattttaaatcctctagttgaatccaaattggcacacatttgacatcctcctttttgaagttagtatttgggtcccaaggcttcataattatcgaccttctattaaagaaaatgtatcccccatttagtatctgatctctgacctcgattgagtgaaatcgaatgagaaatattccataagagaacattttcaccctgtctaccttatccctccaaattctattcacaaacccttcgagtatatgcagagggggattcacccctaagacatagcaaacaatggaaggctgccaaaaataaaacctcctcctctatgtcatctaaggtgattttcaccttctggtttccttgatcagaatctttgaacgaatttcgcaaattgcgaacaacagagctagatcgaaggatagggggaatcaaattcataccttgtttaagttcactgttacattggttattggctttgatgaaatgaacaaagtcatcacgcacctcatcttgtctctgtatagccttcagtgatgattttggggataacagaggttgaaagcaatccctaagagcaggatcctcgtccttcgttccttcctcatctgagacttccagagagagaatctctgaaagttgattcaatggattatcacaagtcgcttccgatcgcacctttctacctcgtttctttgaaattttagtagcagatcttgattttccaaaatatttcgaccttgttttggccatggcatcagctcaggaactgcaaggagaagagcccgggaaaatcaacgattattatgataacatttaagataatatatcattggataagaaggtttataaatcatctgcttatgatgtcactcgatttttttcaataaaaatgggcggtgcatatgactatattctaaatattctatcccatattgatataaatattcgagcttagaaaaatctcctacttcatatgcttactaaaggcgtcttaaagttagagttgaattagtattttagtggtggtccaagcttgaataattcctcattgtatatttggtataattttatgtctttgactttaaattttaattttcaaatcgaaattttgaatttcagtttccagaatacattgaacactacgatataactttcataagttgttaatatccataatctatcaatggatcaaactatatgttaaatgtatggaaaatgagttttgtgttttgtgaccagaatccacttgagctattttaagaactctttattgtaactaaacctaaagatcatcaaataataacacccacaattatacatctatgacatttgcatcttggtcatagtgattttgacaagatcatactctgtaaagagaaaatatggatcatctgtaatcaaacatatggacgtacatttaggagtggatatgagttatcgttaaattcttagataatcactctggattatacattgaataaagaaatttgaaacatttaagaaattttatgaaattctagtaatggtaaaactattaaggtaagtggttannnnnnnnnnnnnnnnnnnnnngtggagaaatatttggttatgcaattcaaagatcattaa

SEQ ID NO: 16759 - DNA, 4833 bp, Cannabis sativa
  modified_base (50)..(75): a, c, t, g, unknown or other
tatttataactggcccaaattgggacttgattttttttataacaaattannnnnnnnnnnnnnnnnnnnnnnnnntaaatagaggttctactgtacatttaaacaattctcaataaaatattatttatgattattttatattttaaatatattcatttttactattaattattttaattttaaagtgtcattagagttgctctttgaacgtttataattaggacttataataacatgacacgtgtactctataatagtaggcatattcactcaaaattcctcattcctcagcacgtgacaatattcaaacataataataataattaataacccaatttctttttttaaaaaaaacatccctaatctctttttgtttttttgtttttttttttaaagaaatttaaaaatcaaaccttttttgcttagctgaaataaaaatcaaatcttcaaaaatggaaatttatgttcgattaagacctcaacagagaaaccgactttgagctcactatttatacagaaagaagctaatctcttctctgtttaaacggatcaaattcaatttttcagaaaaaaatcacagaaaaaaatcacataaaattcatttttttttttcatttttttttttatatatataatataatatatatattgtcttcttcagttaaccctaaaatatacagacagagagagaatttgagctgtctgtttgtttcatttgggtttccaattattttattaaaccctaattcttttggggggtggggttatttgtactgccctcgttcccaaaattggaaattgcagaaaccctaatttttggggattttgggtggggtggggtggaagtaactaaagtttggttcattggttttgattatcgatgagaattcgttggatcagcgaggaatcatcagcgatcaaaactggggaggtgtagatgcatgtcgccggagtaagtttggatctgaattggttccttaaagctatattgactgtgtttattatagctgtgggattgctttacttggtgaagaatacggcctcgaagtattttgaggtcggtgccaattttgaaggaggagattctactgatcggtcatcaatgcctggggttttattggaggatttggcttgtgccgtttgtggaaactctgcccctaagaaatgttctcgctgcaagtccgtacgatactggtaataaagttaattttgtctcccaacattgtaatgtttgattggtttcttgatgatttgattagtatttgggtaatttttcttttaattattactaaaagttttgaactttttatggtaaatttttgtgatttgatgtttcggttgggggaaagatttggtttttaaagtataatgtgctggctggggagacaacctttgacttagtaatgattgcatgtttagtattatgttaatgattatattttgtttttgtgtgtttagttagttaattgttttatattaacttttttcagttcacaaaagtgtcaagaggtacattggaaaaatgggcataagaatcattgcaaaattgctcattcatctagtaatgtaaattcaactcaaattggattgagggattcccaatcgaaaacttatggtgttgggggtaaagctttttcaggaattgcacttgttcctaccagtggtagtggtagtggtaaacctaaacccattaaacaacctaaagaggtaaactattaagtttttgtgttaatggaattgaaatttatgtattctttacttgggtttcttttaatagagaagataatagtaactgcatttgtgtttttcagattctttttccttatgatgaatttgtggaactattcaattgggacagccgaggattccttccttgtggactcttgaattgtggaaataggtattttgttaattcttaccatactttgctttgctgttaagagaaagattattctccatcttcgcaatgcatgaatgcaaaccacaaccaatctaatatcttttgtattttttttgtctttctacagttgctttgccaatgcggttctgcagtgtcttgcatccacccgtccacttgttgcctacttgttagagaaaggtcaccgaaaagaatgtaaagccataaaccagaatatataacttttctcactgttttatattgtaatagaattcttcttaaaccctttcaattgggttttcaggcattcgtagtgattggtgtttcttatgcgaattcgagacacttattgaaagagttagtcaaagtacacaacccttttctccaactaacattatctccaggttaccgaatattggcggtaatttgggctatggaagacaggaggatgctcacgagtttatgaggtttctgttgtttttagttatttaagcttatcaatttctattccactgtcttgaaataagcttctaaaggatgtacagttagtccaactttgtaacatttcactctttcgtcctgtttttcccttgtattgtaggtttgccattgacacaatgcaatcagtttgccttgatgaattcggcggtgaaaaagctgtcccccctagctcgcaagagacaactcttattcaacatatttttggtggccaccttcaatctcaggttatcttactgcacattgttttgcttcttgcgagttttatcaatttatgttctcatttattgctttatatagatttcattaggatgtagttttcccgatttggataaagcaggaaaaggaattaggagaaattgaacaaggattttgttttactgcttctcatagtttattttctttaatattttctaggtgatatgtacaaaatgcgataatgtatcaaatcaatatgaaaatatgatggatcttactgttgaaatacacggggaggctgcatcactagaggaatgccttgaccaatttacggtcaaagagtggctccatggagataacatgtataagtgtgataggtatggctgcttctcttttcctattaatcgtataaaacctgtcatgctttgaatccagacttctgtaaacatacgagacatccttttaagggttttgtttcaatttatttaaaatatcgagtgacattttatttgaaagcttcgtttctgataatggagccttacttaatttgtcgtgggcattatgagagactatatttgctaccttggcttttttccaaattaaattttaatgagtaatgaccaagataaccatggacaaaaagttagaactggatacattgggatgttgtcaaaagttggattaaattggtttcagcggttttatttcaactggaaactgaatacagtagcaaacatatattaaaacttacatgtccaatgcatttatgtaaactctttttctcaggtgcaatgattatgtcaaggcttcaaaacgtctgacagttaaacgggctcctaatattttaaccatcgcattgaagagatttcaggtttaacattcactcttcttgttctgccagtagtttttataaaattgggcctattgggaaaatgaattatgtatgacataaaccaaatttcaaggaaagaatttatttacatcaatgacatgcatggtgacaaatttgggttgttcatgtttggtgatatctgaaattactatatgcccaaatatttctgcagagtgggagatttgggaagctcaacaagagagtaactttcccagagactttggatcttagcccttacatgagtgatgccgaggatggtatggatgtttacaagctttatgcggttgttgttcatgtggacatgctgaatgcctcatttttcggtcactatatctgctatacaaaggatcttagtgggaactggtacagacttgatgattgtaaggtgggtagtctctcttttatcatttgtatatttgcgtatatatctattcgaggtatttgattagctcatcactaaatacttctcaggttacaaaagttgagttggaagaggtactttctcagggagcatatatgcttttatacagcaggtgagtttccgagattccatgtttgtgatcccgttcatagttctttcatgtaaagttttgtttcgttctcaaatttgttcgtcttctatagtagccttaagagagaaccgttgtctgcttaattcgattttcgttcaaacttttcggtgttgaaaacacctttctacagaaacactgaaacaattgtgcttctctgttatttttgcagggttaaggcacggccatcttgtcttagagctccagaacctccaaaggtggtgcagcagcagcagcagccgatggtcaataatgaagtagagcttagcccgaaaaaacaaattgaaagcttttcccatggcgactctgcagacccagtttgctcctctgaatctgtttcggaggagcagcaaatggacgatgttacagtagagcttaaccctttggaacaaactgaatgctcttcccatggtgactctgtgccatctgaaaataattgctgtccagagatcgataacaaagaattacctatcgaaactgattctgagtctgctactgatgtggctattcccgaggaggcttcatgcagtgaaagagtgttgtgttgtggaggaataaagtctccagctttagaacaaggtcaagaggaccaaaaattcttgaataattaccgagccacctcatcgtgttgcaatggttccaataatccaggtactgtaaacgacgacctggaaatgatcgatgcccattcatataaggctgacgcggatatggatatggttggttgtgacttgagctccttccatgttgcaaagaacatcgaaatttacagtaatggc

SEQ ID NO: 16760 - DNA, 8536 bp, Cannabis sativa
aattgggcgggttggacctattttgaacccgcccaattaacagattgggcggtttgtaatttttttcgggttatcttggtttgtaatttttaacggttttttcggtttagttcgggcagtttacgaatttttttgtacagctctattgggaagtttgtactcgccaagcctcttcatattatttctcagaggggtttcaatgacatcttgagggtgaatatattatcccacttttacttatcttctttgtcaaagtcattttctgaccttattttttaattggtaggcttacgtgggattttcttatgctatggacaaagagcataagaaagttgttaagcttgtagagaagttatcagccactgagcacaagcatctgatgcagagccatggtcattaactttgagaacatagtcagggagcttcagactagtgtctcaaatcttcaagggaccgtggatagtgccataaactgcaaaaatagcttaaataaagagctctcaactgggaggaggaaaacttctgaagtggaagagtccctcgacaaaaaaccttaatttttgtttaattagaaggtcaatttcgtcgtcttgaagaccaagtggctatcctagaggcaaaggtagttgaggatgttacattttatgagggctattgctttgatgccatctaaaattcttggtcggccaatggaggattcttcagcagttagtttattgaggacgttgtcttagtcttttttagaatttagctttagtgtgttagtcggtcatctcgagcgacctttcggtgtagatatgccttagtaaaaactttattagaatctgtcaatttcattagaaattaattccaatatttattttttttattttactttgtctgttgacctttaacacttgcacaatattccatgtgttaagaaactcacttactgggaataaaatcaacattctttaatgtttcattaccatgaaagtactactctggtgtgcaaaattttttgaatgcccctataacacctagctcccattaataagggtgtatttgtcacccaagtgattaagaagtgccttcattggtcacttatcataccaaatctcattgatctttcttgatcataaatcttgaggacttgttacatgttgagaactcgtccactcatctaaagattcatgggttgaaagtgtttgactcactaaagaggtacctgatgttacctcaacaccatctctacaagctttacttagcacttgagagcgttgtcaagtctgtgagctgtaatttcttaatagcaatgaagtatcaaaaaaactttgtttaacatttttattcatcaaaaattaaatacaattaatgttagataaattgaaaaaaatgtgttcacaaacttgcatttttgtcagagatagcttagttgaaccccactacacttatgtcatgttcaactaatagtgtaggagtcataacttggtgatggacctcttgacctatagatgacttcgctgtatatttttggttcaagaggcgattgattcacttgcacgtggaaatgtgaatcttaatgtgaagcaagctgttttggagacagctaatttattagtagtatcatcttggatgcaccctgttctagtgccttggtatgggcattggattcaagtggcaatcatagcgggccaacttgtacgttctgggttctagtgcttcgatgacaacaaatggtccttctaagaaggtcagagtactcctacttttgcatcttttttattcaagaatactcgttgtaacaccatatctcaacacttaaatttcctatctttaaccttggatttgtagtgtcaggcgaccctttgttaatacgtaaccttacaaagctcaaacttctctttgatttcttcaattctgtctagagctccaactttgtccagagactcagccagtaattagtgattggattattgatgataagtgagtctctagtgtgatcatggtgtgatatctacatgtatcaattcttcgcacctataactcaaagtgaatggaggatggccaattactatttttttcgtggtacggtaagaccataacaccttgggtaattctttagtttcctttagctttctccaggcacttctttagagtatctttaacagtttggttaatatctttcacttgtccatttgcttgtaggtgagcgtttgctgaaaaactcttaattattttgtgtctttcatagaaattagtaaagaggtcgttgtcaaatggttttctattttctgacactatcttttgtggaagtctgtagcgacatgatattcttattagtatgaagtcaagaactttcttcgatgtaatagtggctaagtgctctgcttcggcccatttggtgaagtggtccacttccactaccatgtattggactctaccttttcctttaggtagggagtataagaaatcaattccccagacagtaaatgtccatagagtttgcatgcttttaagctcattttgggcagccctaggtattttgaagaatcgttggcacttgtcacatcttttgacatagtccattgaatcttttagcattgttacccttgcctcaatatctttttttagaggctttggtcccagtgtgacaaaaacccacatgtacctcgaccatgagtagttttgcctcttcatttgtgaaatacctcaaaagaggcattgagtagattcttctatacatcactccatccatgatgatagagcgagctacttttctcatcagtttcttagcctcgttctggtctgttgggagaataccttgttctaagcattgagcaatcgaagtcattcatgatggactattatacttagtttgtatatcattcgctaaatatcttctcaatcaatacgcatcgctttcgtcttcccaggtgtaacaaatttgatgtctcgctttatgcatcaaatgacgtatagtttctcgttaatacacgaggtaacagtttgtatatctttacctcacataagaccttatagtcagcgagttgcaagtatactctattatttacgcaattaatgagttattccatcaaaggagatttcatcgatccatattccccataacctgacacgtgtcctctattggaatggtagccaaatttcgagtataacaatttccccttaaaaagttctttttaataaaaagtactttttaataattacagagggcattcttgtcataattccttttaaaaaaatgtgtcctttgatttttgcggttgtacggtttcgagggtcattatgaactatcttttcatcttctacctcacttccaaccgttagattttccaacctttggccttcttgttactggactttgaatataaaatggtggcttaagcttgccatattcaacaaacttctggtttttttggtgaagttcatcttgagattaaattgtcattctcttgctaagatgtcccatccaagttcagaaacttatccctccaaattcgtaacaccaaaatacaccaatcactttccttctctgcacgttcccaagaacctcaatcctcaatttaaattggaaatgaaggattccaagattgaagagcttccgatcaatccaaacccagaagatgcatttgatcgttacaggcgatcctcacaagagattttttagggtaagtatcattccttgtgaatggtggtttgaactggattatatatatacatttttttgtgttgctccattgatcttttatctctgtctccacaggaatggacatagattttgagagcgagtttagaggtcctcctcaggctgacaaggaatccaagaagaaggtagtcccagttggcgtgtcatggattctactaaagaacccaaccgcaccaagacccaagcttgcacaagaagacctttggaccagtcgatctctagtgttgaaaatttcctgaggctgggaatgagttctcgactacaggaaacgggatcttctgatgcggagaatgaggtctatgttacgtgtagacagtctttctcaggctacgtgtaaacggtctttctcgagctatgtgtagacggtctttcttcgagctatatgtagacagtctttctcgatttcatcaacctcccacgaataacctcgtattctttgtttaggaaaatgtcttaatggtttgcccctagtggcatttttgtaaagacaagtttgtaaaccaacttggattttctcttatcttaaatgccttgtactcttttcattcgaactataatataattgtgtttgcttgcgtttttattcacaatgtaaacaattatactttgatcaaatgtaaagtactttttgggtttttccattgctcgtaattttcatgtttaagtagttagttatctaccaaactattaattttagagcagttgtcaattctgtctcgctatgacagttataatatacctcgctatggtagttataatctgccttaagcaaacttgaatatacttttaatgattttatcactttgtacatttttgattgctcgtatgaatagttagattatctatctatttactaggtttaaatacttttatcaagacgtcttgatgtctcgtttagtactttcctatcttgcgcgaattgttaatattcagctttatacgcaagttataacttttgattttcctttcctgacagataggtttttaatcaaaaataatagttttttgatcccttcttcgtcaaaaaggcttgatcagggtgctataacaattcggcccctctctcgtcaaaaaggtttggtcaggaagttataatagttcaacccatctttcctcaaaaaggtttagtcgagaacctaaaaaattcaaaaaaaaaaataatttttgaagtggtgggtttgcattgtatcaagtatttccaaatgaattcaggttaatcatactgaaaggccccttaagtaattttaaagaatgaaaccttgtaattacttaaataatagaaatgattctctttattcataactgaagttaaaatattaacatgagtaatgtgtgtgacatcatttatttattggtaatagggtcgcaaatgttccacgttccagtagttctttattagcgagccattgagtcgagccaatttgtaaactccaattccgactaccgcttcgattacatatggaccctcccagttcgggttgaacactcctacagatgcatccctcgtgtttgcaaatacccaccttagcaccaagtctccaacattaaatagtctttccttgacttttttgttgaaatatcttgtaacttggtattgatacactgtattagtgacttgcgactcagttcgtttttcatcaagtagatccaaggataactttaaaagttcttggttttcttcttgattataaaactctcgtctgtgagtcgatatgttcacttcaacaggcagcattacttctgagccaaatgctagcgagaaaagagtgtgtcccgatgccgtcttctcggtagttctgtgagccaagagtagttgaggtagctcgtcgacccacctgcctttggaaacgtctaacttcttcttgatagtatcctttaaggttttattaacaacttccacttttccatttgcctgaggcctggataccgacgagaagctcttgattattgtgttcctctagcagaaatcagtgaacaagtcgccatcaaattgggttccattatcggatactatcttaatgggaattccaaacctacagacaatgttcttaacgacaaagtcgaggactttcttgtaggttatggaaacgagaggcttgacctcagtccatttggtgaagaagtcgattgctactaccgcgtacttagatcctcctcgctcagtaggtaatgccccaattaggtcaatcccccatatagcaaatgggtaaggcaaggtcatcatctttagttccgttggtggcacgcgaggtatgtgtgaaaacctctgacacttatcacatttcttgacaaactcatgggtatccttattaatcgttggccagtaaaatccttatctaatgatctttttagataggctttgcgaacccgcatgattcccacaaaatccttcatgaatttctctgatgatttcgttcgcttctgtaaggagaacacaccgaagtagaggcatcgaataacctcttctatatagtttgccttcaattattatgtagcgaggcattgaatacaatagttttcgtgcctcgtttttgtcagttggaagttttgtgtcgagtaaataattgataataggagtcatccatgtaggagagttgtctatcatctctacgtattctgtttcacatatacttggctcacttagcatctccaccgaaactaagttcaattcatccaagtcgttgtgcaaggccagtttttccaaggcatcagcgttggagttttattctctcgaaattcgctcgattttaaagtaatcaaatctttccaagttcttccgaaccttctctaaatactttaccatattcaagcctttggtctggtattccacgaggacctagttcacaatcagctgggaatcactacggcagatgagatttttgactttcaatgcttcagctatctttaagccagcaatcaaggcttcatattcagcctcgttgtttgatgcgtcaaattgaaatctcaaagcataatgaaacttaaagccttctggtgcaattactattacccctgcacccgagccttgctcattggatgccccatctagatataacttccaagtgtccgcatcttggtaaacaggcagaatgtcttctgaagtcataccttctattaagaagtctgccaaggcttggcctttgatggatgttcgagggtgatatgttatgtcgaactgccctagttcgatcgaccattttatcaatcttccagaagcatctagttttgataaaacttgtctcaaggtctgattagttaccacttttatggggtgcgcctgaaaatacggtcggagcttgcgagacgcgtggactaggcacaaagtgagtttttcaagtgggggatatctagactctgcccatagtaaccttttacttacatagtaaataggttactggtgcttagcctcttcttgcatatagctgcactaatcacatcttcctagatagccaaatagagaagtaacgtctttccagttattggttttgccaaaattgaaggcgccgctagatgcctttttatgttctgaaagacatcttcacactcttttctccactcgaatttcttgttgcctcgcaatacattaaagaacggcaaacacttatcagttgacttcgaaatgaatctgttaagtgcagccacccttcctgttagggcttgtacttccttaggctttgtcggtgatggcatgtctatcaatgccttgattttttcgagattcgcttcgatacccctcgcgttgactatgaatccaaaaattttcctgaggaaactccaaaggaacattttttcgggtttagctgcatattatacttctttaatattttgaagcactccgcgagatctgtggtatgattcctactttttattgattttaccagcatatcattgacgtaaacctccatgtttcgcccgatctggttcgcaaacatctcgttcaccaatcactgatatgttgccccaacattcttcagcctaaaagacattactttatagcagtaaagtcccatgttggttacaaagcttgtatgatcctgatctaggacatgcatttttatctggttatatcaaaaatatgcatccataaatgacataagctcgtgcctagcagttgcatccactaattggttgatcctgggtagtgggaaacaatcttttgggcacgccttattcagatcaaaaaaaccaatacaagtcctccaagttctgttaggctttgggacaagaacaggattggctatctacgacggttaaaacacctcgcatataaagtcattgactagtaacttgtccacttcctgttttagtgccccttgtctctcggaatccaagggtctcattttctgcctctttgctgggtagtttggaacgacatttaaataatggtagataatgttagggtcgatccctatcatatctccatatatatggctccacgagaactgatcctggttcgcccttaagaaacttattagttgctattttagctgctcgtccaggtttttcccaatgtaaacacactttgtgggatttcctaggtcgagaattacttcttccgattcttcaattggttttaataagtttctttcatcttgaactcgagggtcaagatccttgtccttcttttcacttttttctgccaagatcgccattaattgatgaccggcttttctatgctgcaactctatgcgatagcaatcgcaagctagcatctggtcgccctacaccactcccacaccttctggtgtttggaacttcaaggataggtgcttgatcgaactaactacccctagtccgatcaatgcgggacaacccaacaatatgttgtaa

SEQ ID NO: 16761 - DNA, 3105 bp, Cannabis sativa
tttatatacaagaattagatgcagtattttggtaaaaaagaaatggggaagaacttgagacaaaaaggttcaatcatatctttaagatcgaatgagaatgaaggaggacatgcatggggtttacttcacatcatcaaatatcatcactggcgtcgtgttaagaaaaagctcactcaaaaaaacccatctcttgttggtaagtacacatattttttttgtttcactcattatttcatttttaatgttttgatccattttgcttatatggtatgtttgaaaagatctgatatgggttttccttcaaattacctgtttgtttatcatcagaaaatcatgaagagatgccaagttctaatcctaacaagcaagaacaagatgatgggcatatgtataagcctagtgtaagttcttagattaaagaagccaaaaagaaaaaaacacgttcttagtttcaatttgatatgtcaatactgaaccaaaccaactggagtatctgatttaaaaaattatcaggttgaagaaagaagtagagattcctctccaaaaaagaacaattctgtcaaatcccgaataaagtcatttcttgctgaagagataactcataaaaagggcaggcatcataggagttcatcctgtcctgtaagacaattgacaagaacagattccatccatcattcacaacttccttatttggaacctcttattaaaacattagagttagattatgagcaaaacatcgaaatccattctgcgtccaatgagctaaatccaatggcaatgagtagtgattctagtgaagaaagtagcaccagggttgttgaggatgaaccacaacatgaccactttgatgagagtccaaaacttctccaaggagagttggagaataccacagcatttatgttgaaacagaagtctacaaatgaaagaaaatgcagtgtggatgctttggccagtcatcccaaagagtgtttagatgccttggatataatcagtgtaaacaaggagttggtgatgaaaattttgcaggatccagggtctcctttggctcaccattttagcagtcaacaagcactgagtgcaaaacaaggactagacaagtgtaagacattcccttcatctggttcattaggatatagaggtttagaacctagcagactcaaacatatgaagaaggcttctccagcttctgctaagcaacaaaagaacaatggcgatactcatgctgttgttaagcatttcaagactcttaaacagaagattaaacatgtaattagagaaggaagaaaagagaggcatataattagtatggacgccatcatccataagattccacatggacataatatggaggaggagattgataataaacttaatagttcggcaaattatgaagaatgtaaagacattgatggtactgcttttgaaactgatttttcaagttcttcccttaagaaaaataaagcaaggttgcgccaccaaatgagaagagcctcatctctcactgaatcgttggatcggtattgccagttgtatgagactagcttcaaccgggaagctaaacatcaaaacactgaaggattgaaaatcaaaataaaagaagaaggttcccctaatagtgtcccaaagtacttggcaaggatttactccttacctgaccttaactcttttcttgatccagaggaatctcctgaagctttgtcctcctcaaaagggcaagccaacaatgtcatgcatcacaatgttagcacaagtagttatgatgaaccaaaaggtcttggtgttgcagtaggcattgcaggtcaattgcacatgaatgatgatcatacagccaagagcattatttctaaatcttcggttgagactggtgcagtaaattttgttacagatgatgagttgggtttaacatcaatatcaaatagtgaagctgatactcagttgtgttctcatatacatgattatggaagcttgacagtagaaggtttgcctcttagcctttccttatattaaactattctctacttgcctaccttttcttaaagggtttactggttttatctttaagattaatgcactttacagctaaacatggatttttttttttggtaagaatcagaaaacgaagcaatacttgctgatgaactagttaagttggtaaaggacaatgagcttgacatggctacaccccaagtgtctggaactgaaaaggctcaagaaacacttgacaaacaaataatggaagaaatttcccatcttaaagtgaatgcaaaagacaaagctgagttcagttatgtgagagatgtacttgaactgtctgggttcagtagcaatgcattccttggaacttggcactctgatgatcaaccagttgatccctcagtatatgaagaagtagagggttgcttagaggttgatcctaacacttgtgcaaatgaagattttgaaagtgatcacatgctgttatttgatataataaatgaggttttgattgagatatatgcaaggtcatacagttactgtccatttccactctcttgtgtttcactcatgagtccaatgccagcagggccacatgttctgagagaagtgtggtcccttataagttggtacttgagcttcaaaccagaggttggccaatcactagattatgttgtggggcgtgatttagctaaaagtcatgggtggatgaaccttcaatttgacagtgagtgtgttggtcttgagctagaagacttaatttttgaagatctcgtagaggaagccatattggggtttgacatagttagtccatgactatatatatgttccttcaaagtggtcttcttggcctgtcttttgcttgtttataagccatacaagtcaagagtatggacctatctcaaccctctgtcttggtagaatcgatggttgagattactggctgcttaagggatatatattgtatagcattagcaattttgtacattgtgttgtagatagaagaaaaataatagatataaagtatacttatgagatatatgtatcacaatgtttttatagtgttgagatgagatctgattctatggtaaggctttcctttgtagtttgtagtgctgtcattattataag

SEQ ID NO: 16762 - DNA, 4723 bp, Cannabis sativa
tgatgacctgacttagtaagattggtctgttatcctaattcggcctgtaaactttgcctttgttaattgtatttggatcttggaggtacatgtgtccttcctccgaaaacacaaataacatatatattattttcttaaaaaaaattaatacatttacaatattgttggagcgttaataaagttaataccaaaccaattatcttaactatatgagaacaaatacaacaatactatactatatatcaaaccaattatcttaactatcttttcatttatgtccctttctatgtgagagaattggtctatatatgtaaatatttacatatatagatatgtaaatagtcaagtgattaaaaaaaaaatgactaaacaaaatgaatgcctcatgcttcactgaattgaatatcaatctcgattacttccttttatagtgaaataaattgagaaaaaaatacaaaccgatttgatatctcatcagtaaacataagaacaacatcccttccaaaaattaaagatttgaatgttaaacatttttaataaggaaactccattgaacttttctttcttctttattgtgtggtcgcactcatcaaccgagagaatggcatctgagtgcggccaggcagtctcctttggccagaatgtcggttatctgcatttggctcggaggctgatctcgagaatgcttgagcaagctcgacggctgatgctgctttcccatatcgcattccgaccaagtcagcagcggttgtttttttcggctgctcaactggcttgcgccaggtctctggtgatggagccctttcgggctgttgtggttgcttctctatctctctgttgttcctccgattctcacggctgttgttatcacttcgccagttccttttctgagcatcacctctcgtaatgtctgctcggtgatccctctcccttctatctactttctttgctgcagtcctttgatcaacaacaggaggagactcggttgttctttcattgtagcgtgatgcaatagcattacccgaaattctttctgcctttggagcatgaacttcaaccctacacaatttttatgaaaccgaaataaatttttcgtatttaagaacaacaaatcaatgttggggcaaatagatggggttcttgccaatacctttcagactgctgaatcagatcatggttaattgcaacatcatcaatccctctctccttcagaacctgaaaatatataagccatacataataatacaaaacattatataaggaccaagaattgcttatgatcctaaagatatagactatggactaaggagataatgagagagtttgaagcagaacaacaatgatccaatcgacaaattcaaccgacatgtatcataaacttgttcggtgatatcacaacaaacaaaaccactcactagttctcgtgggcgagcaccaccaaacaaaaaattcctgcaccaatcaaaatatttttaaaatgtaagtaataataagtggtactgaacagagggatatctctaagcttcatatacatcaatgtgcttaaaaaacaaaaaagggggccagggagatctgacacctcgaggtcaaagttttcgagccggctagctacaatataactgtacacgagtatctagttaaggcatttctcatcctgatcttgacacataaacctgaccccacggtgttatctttcatgacacataaatcagatacgaacaaaggtcatatatctaagactgagcccctcccaaatttattaggggatcccgcttatagcggaggaaaacagtggtaacaaataagtcctagcctacaattccattacatcgaatcaaacacaacaactaccaaaggaagattttgaatagcattgctaacctttctttttccgttccttccagtcgttcaactgactgtgaccggggctgtaaattcagttttgggcgctctacggcctgcttctcaatctcagtgctagctacacccgactttaaagagtttgaattttcacgaggctcattaaagttatcagtatgaatatattcagtcacctgttgatggccctgcaataaaccaaatacaaatattcagtcacctgttggatccaatgtgggctgattctctacttttttctcccaaaaatagggtaacatatgtgaatgttattactacctgaataggatcaacactataaggctctgtagtttcaagtggcttcattctcggaagtaacttcaacttgggccgctctgaaggttctgaatgcatttgagtctgcagtttagctccaccaaacctgccactagtgtgatctggttgacccctgtctcgatatcctgatggattcttgtcctttacttcagaattaataagagttctggccctctcataatcaggactttccttcctaccaccctgaacattatcttcaatgtgaagtcccctctcagcatgcctggctaagtttgtgtcataactttctatgtcagcaactgagcctgtcttgttaaaggcattattaccatatcccttgttgtgtaaaccgctttctgtttcagacaatctcataatctccgcatctgtctgattatttgtacaaggcttggattgccatcttccagaagaaatcttttcgagcgcactggcatgagccaacttagaaacagccactggagcagaccacgtagattgttgccgctcagtgccacccgcagcctctttcctcgctgcccacgcattcggatgagtgccaccaacaccatgcccatcatgggaatctaaattctgataaggcgcacctccgtgagccatctcagacaccctccctgaatatgaattgacagtcccactaggcacttgtgaatttgaagccaatccctgtcgactccatgaacctcctccgactgatgcagactcttgcttttgctccgtacggatcggggtcactcgaatgctttcatcactaatagtcctccgcggagcagaaaccccgtcaaggggcttgcgctcatcctcatcaaagttcctgccgatatgcgaagtatgagtgaggaaaggggatttgtcatcaaaattcctcatcgctggagaagtgtgcggacgagaacttcgatgatcggaccgtcccatttggttaccccacgatgctgatcgatcataactaggacgatctgaaggcctaacaattctgcaaaaaaaaaagtgaaatttaacaataatcaactacaagggcaaaatctagcaataacaataaccattcttaataaagcaatagatcctaaattatataacattgaatccaaacttcgagcgcgggtaaaagggacttacacaccaggagcagaagggagaggaagatcagttgggatagagccaccatggaagtccttgagggtcatagtattcccacatactttcttcttcgacattctctccgtgtgactctacctctccctcctaagtaactcttctcttgttgaataattaggtttcaaccagctcaatcgaaaatgtgttttaaatatgaatatatagatataaatataaagaaaattccccacccccagaatatatcaggtatcacaacgatggtggatactatgtatataaatatatatatatatataaaaatagaggtggtggtaggaggaagggagaggaagcagaaaaagggttgtgtctcttgctctcttaattcatatagagcactatacagatgatttcaatttctgcaacaaaaaacatagcaatcgaaattaaggttaacagacagggtatcatatctaccagcatataaattcacatatatcaacataaataacgatcaaacagtaattaaatggaaacatattagatcaagtaacggatgaataaaagccaaaatatacaatacttctgacctgtaaattttttccctaatataaaatcaggacaaaaagaatatatttaaagttacaattatatgttcaatattgtatcttcttgaataatatgagaatgccaaagctgtaacactatataatttcaattgcttaaacagtgggaatattattcattagcaacaggcgccatttttcttattgtcggtgaaaagattccatatgtatgtactcaagctacggtaactagaaattatacatataaaatatatttgtaataaattctaactgatcagtaccaaacaattcaaacaaacaataaatatttgtttatatcacaagtcaaaggagatattaatttgatggaaagaagagcaatgtgttttgcatatatagagatgccaatcttatgatggatgcaaagagctcaaaactcagaacaaagaataaaaaggctaattcgatagagcttttaaaagaattttttaaaagattaaaacttttaaactcaatatagtaatgctaaaaatatagaaaataaaaaacccatgacaaatcttgaagttgctcagttaaaaagagaagcttttcctcttggcctgctctcgaaaagcacaaaaaaatccatcaaaaaaacttaaccattcccatttacattaccttactttacatcaaagcaaacaccaccttaaatccaaaagctcaatagagaataaaagtcaaaacaaacaaatccttagactcacaaaatggtttgctaaatcagaacccattagtcaattacatcaaactattgaatgaaaatgacagcggcatttcatcaaaatgtacttcgtcactac

SEQ ID NO: 16763 - DNA, 4285 bp, Cannabis sativa
  modified_base (293)..(293): a, c, t, g, unknown or other
  modified_base (3953)..(3968): a, c, t, g, unknown or other
  modified_base (4040)..(4043): a, c, t, g, unknown or other
  modified_base (4231)..(4243): a, c, t, g, unknown or other
gctaaatatacgatctggatacaaacaagagctacgagcaagacaatgtgcagctttgtttatagaacgtttaacaaaattaattgtgactaacggcacatcgaccataagagaacgacaaaccgccacctgaaggccaaaaggagaaggaatatccaccgtgctttggactgcctagacaacaaccaaagaatcggtttcaacctcaaccggtccccattgcttcctctttatccagctgaaagcctccttaacccctaccaattcggccatagccgaatccacacaccccnctcgtaaaactgtgaagccttcaatgaaccggccctgatgatcccaagccaccccagccgctccaaaccgtccatcacttgcaaagattgcaccatcgacattaaccttaatcaaagattgcatccgtaaaacaaatgttttgattaatataaatgatcataaatagtttgaccgttcttattaaagtatagaacgccaacgactactttaaccgcatattgattgtttgtatactgacaactaagaactcacaggttcatttgggttgccgtgtataattaattattttcggactaaatcgaagtgaaaggagcgaccttcacacatagcgcgagagagaaaatatttagtcatcgcctatatttggtatacgtctcaactatgcatacttctcttttcgtctcgcttttatcttaatattatgtgatgtataacatgcgactagatgatatctcggtcgctaatcttctcgcatacttctatcataggattcataaattatcgaggtttatagtatatacgtacatgtcattctttttcttcgtaaaaacgtatttccatgttaactatataggagacgatactcattatttaaatgataaataacataatttatttatttttattaattgttaaaaaaattgaaaaaataaaatcagatatataattattattattttttttttaaaaaaaaaattaactagctagctcggcaatatcttaaaagaatatagttattttaaaaaagtgaatatacgtttttttaagaaaaaaaaaaactaatggggggtaaaaagttcattatagtagttaactaattagtaataaacattattattttaagtattaattaagctacttttgttgacattaaaacaacataatcaaagtgcacgagtggtttttgtcgtccatagggttatcattattataaacaaaataattaacaagtaattatatatgtttatacatatataccgtgttgaaattaactttagatcaatcacactatagctaagaaaaaagtaataataataattttttgaaaagcaaaatgatcatggttttcaatagatgctttaaaatattcttatgtttagatagttttgataatcattatattaaattaatggcttcctcacttaataattataagttatatatacatataaaaagcagtgatcacttattaatttaaaacacaaaagcatatacaaaataatttcggctttgttacattcacattttgatgaagcaactttcttcaacctaatgatcatataatattatgtaagtattattttaattaatgtcttttctaaattaatagtatataagcattagtattaataattaattagttaattaataaccaaacataacttaactaaggtgaattatgctgttgggctttagccaacagtatgtctcttatataacaaagataagaaacaaaaaagtatagaaataattatataaatatgtttataataattattgttttgtctttttggagaaatttccatgtttaaataccatctctaataatagaaaaaaattataataaacttttagataataattttttttttatttatgcttgctgagtcagaaggccaaacttgttcatgtctctacccaaattttggagttttggctataatttttaattgtaattataaattttatattatattataggtttttttatactttaatgtatatatatataatttttgtaattttacagaaatttacataaaaaattacatattaattaacaaaacaatctaaatcataattaaaactcccataataatctacatgtaaattattaggacaactcaaactataaatttttaaaaaaattaaaaaaataatatgtaaaacaatcccatattataataaaaaaaatatatagcacaatcaacgcaggaattttcaaatgagaaccggaagaagacaaattacatatgcacatagtctaggagacaattattaattgtttttattatatattattttaatttaatcaattatttaatatattaatcaaaaaaacattgatccattatctacaaaataaatatttttcaacccacacaagtggaaagttatcacttaaagtcctcaaaaagtcatgtttaagctcaataacaatcattttttatttatttatttatatttaatcaaagagtgctccacactccattctacgaagaaggaataatttcactctatattatataattaagtaaaattgttagaagatatatattagtagtatttaatattatacactattaattattaatattaatataatttaatatcgtgttaaaagtaaaattcataaaactcactatactcaaataccctaattgaatttaattatagtaatattgaatactattggtatttgtataatttgtaatattactatactacactaaaaaaaaatttgatattttataataatactctttgtactacaataattgtagaactaactttctatattttaaattaatggatggtaaacaaagtgggatttatttatttatagttaatttttatttgaaaaaacataccatatatatatattcattcatgtctagtatcacatcactaaacacgacaaattttatagcacgctcttatccaagctaattaattaatgattaatgttaaaaatttgatgaaaagatattggtcaatagttagggcctataataaataaagaataagttaaaaacattgaaaacatatcatataattcacttgtataacctgtagcagatttaagatatttgttttttctttttatacatgttaatgaaaattatgcatatataataagaagactaattagtgcaattttcgcctctcaacttttgctattttattttatttatttatttatttatttaagataaatttccattaatgggtaaactgttagaataattaataattaagtgatgttacaaaatttatatataatataataataattatacaaaaattaaatatttatacctgattatgttcctactaatgtaatttcgattacagatggacaaatatttctatccgccaatctgttcaattggattcgtcctgctattaatgtgggcatttagtttccagagtaggattcgcggctcaatttctctctttcttatttattataactattatcactttctatttaaaaccgagccgactaaaaaaaacattaacgtatcagggtagtacgcctggaacaaaaaggttcgtcgtacaatttcggcgattacaaaaataaaggagtatatctctctctcttagtgtctttccacttccgtcattcaggaacaaacgaatcaaaaaccaaaaaggagatatggcgaaattggtagacgcattaattggattgatctataacaattattgtaatttgatcgtacaatactatcaattaattagtcttcatccttataagcaattttatttatttgattatcaaaatgtatacaattctaatcagacaatatgtatttatatagttagggaggagacttaactatataaccctaattggactgagcctactcatcaaatacttccgttaattaaggtgccgtttggtaagacttttgttttctaattttttaatnnnnnnnnnnnnnnnnaatttttgtttttaaaaattttgtttttgaaaacaaaaatgcgttctgtaactacttttgtttttcaatttnnnnaacagaaaacaaaagtgtgttttgtaaagtttatttttattttccttttttttttatttaagtcgggtctaggtccggggtcaaattcggatccgggtcagaggtcgggttcagcacaagggttgtgggagaggatttgggtcccggtcgtgttgttgtccaaaatattgattaagaaaaaaaaactnnnnnnnnnnnnnttgaaagtgattttttttttttttgtttttaaaattgtgatt

SEQ ID NO: 16764 - DNA, 2828 bp, Cannabis sativa
gtggaggcatggaagaagatagtggacgcagtccatgctaaaggcagcatcattttctgtcaactttggcacgttggtcgtgcctctcatcaaggtaaactcataaaatcactaaatcaatctttcattttttattatgtttttggtcaaaccgcaatattcgttttattctatacatatgctaattagttagatcaacaaaattggtttattatttattcaagtaaaaaaaaattagtttgtgatatattgcagtttatcaacctagtggggggtccccaatatcttcaaccaacaagcccatttcgaaccggtggagaattctattgccagacgggtcatatgggacgtatcctaagcctcgggccttggagacctatgaaatacgcgacgtggtggaggattatcgccgtgctgccataaatgccattcgagctggttagttttataatgttgctatttttgttttgttaacactgaatgtcatgaactcagctgctatttatgagtgtctccctctttttttttttttattgttttaaattagtttgaacttacagcggaaaaatgttataatagatcaaaaaaggtcactggtgaatttgtcacactgtcatacccgtgcgctgactaatgattttcactcgtgcgattctatcccctttagcaggaagaccagtctagtctaacgaatatgccccctcttttaacgcgtatatagcctttggacttgtcagtgttaatcttatttatttaacttttagcatgttactatgattttttaaaatctacatcgatgaagattctctagactaacgatattttttaaaatggatatcttttttattatagtagtacaactataatagcactatagtttatgtggtctcccaaaagcaccgtcatttgtcttgacgcgttgttctataatggccatacatgttcattttacaggttttgatggaattgaaatccatggtgcacatggatacctccttgaccaattcttaaaagatggaatcaatgatcgaaccgacgagtacggtggctcgattgataaccgttgcaaattcataatgcaagtggttgaagcagtagcctcagccattggtgcctctagagttggtgttagaatttcaccagcaatcgatcaccttgacgccatggattccgacccacttggccttggtttagcagtggtggagaggcttaacaaactccaactgaagcagagatcgcaactcacttatctccatgtgactcagcctcgatacacagcctatggtgagacagaatcaggcagacccggtagtgatgaagaagaagcccacttaatcaggacattaagaaaaaactacgagggaacattcatgtgtagtggtggcttcactcgggagctgggaatgcaagccttagcggatggtgatgcagatttggtgtcttatggtcgtctttttatctcaaaccctgatttagtattaagatttaagctgaatgcacctttgactaagtacaataggaagaccttttacacacaggatcctgttgttgggtacactgactacccttttcttagcaacgcaagtgggagatcacgtctttgagttaatatcatatggaatatatcattaactatttattgtattgtatggagatgaagtcttggttctcatttaccaaatatgcatatatagtcattgactagttgtagttgttcatataagacattgtctcctctcctgccgcatttttcccgggcaaatgcccaattaagcaacattataataagaaaattaaggggggtacgtttggaagttattgtgtagttacaaagtctaagttgtataattattatagtctattgaaaagacagaatagtaaatattgggtgatagttaaaaaaaaaagattatttacagtatatgttgaatatattttgttcttatttcaattaaaaattcaagcacataacatttgaaaaatataatgtaaatagtgaagttagaatttttttttgaaacgggaagttagaatttgtagcatggtgactctttcaattatatgtgaatatgcaaatttgtccacgaatttcaaaaaaatatcaatcaaattcatatttttttataataactactagcaattctaccttttacactaacttttgtctattttattgaacaaacatttaactgacgaacgtgatgtcaacgggcaagaataaaaagagatgcacatgctatttatttgttagggagttaacctattttcttaaataaaaacaaaaagaaaaaaaaacaaatacagtacgtgtcttaaatcaaaaaagaaaaaaaaaatgggcatatacaacttcagccaccatggaaacattaagaggctgtttggactggactggactagacttggacccagaccccccgaacctagacccgaccacggacccagatgctgaccctgaacccaaacccaaactcggacttggaatatggaccaaaactcggacccagatcctagacccagacccaaaccccgaacttggggctaggtttgagtcttgggccgggtcaagggtccaggtttgggtacgtgtctgggtccgagtcgggatctaggattcaggatccgtgttcgggtcaagggtccaggatctgggtccgagtttgggtccggggttcgaggtccaggttcgggtttgggatctgggtccggatcttggtctgggtctgtcttcaggatttaggttcaggtctggggtttgaggtacgggtccaggtccgaggtttaggccaggatctgggactggggtcggagtccaggtcagggtccgg

SEQ ID NO: 16765 - DNA, 4441 bp, Cannabis sativa
  modified_base (58)..(73): a, c, t, g, unknown or other
  modified_base (4170)..(4173): a, c, t, g, unknown or other
cgctcttccgatctgttttagaattcatattaggatgttaatgaaacatacatggtannnnnnnnnnnnnnnngtaaaatatttccaacagttctatggtttggtggcacctaaaattgttgaggcaatcgggatccacgaagctttgagtttgatcaaagataatcctgggccacatgtgatcttggaaacttattgtctatctgtggtgcaagccattcgtagttccattgttatgatctccatgtttagccaagtggttaatgattgtaaggttttgttaaattctttgaggaatatgtctattcattttgtaaaacgatcagctaatatggtagtttactcatttgcaagagcttctatattatactccaattgttgtttcagcttggggaatgtccctactgacttgttacctcttctagtaactgagttttctattcaaaaaatatactataatattttaaaaaaattccataaatggttggtaatacgtagcacaattcaatattttttcagtacatacaatatattaaaagcaaaaaaaaaaaaaaaagtttaacactccaagaataaacagccaaacgtataagctggtgttgttgagactttcagccttcttagtcattttgaaaagaaactcgagcaaccaatatcctaagtggtattattatgagcaaattatgcatggttgtttatgctttggaactattatactaaattcataatgcacacaataaaaccaaagtaatattgttgccccctttcacattcagaataactagcgaaaataaatttgctactacgaaatcaaaggggaaaaacaaccaagagaagaaaaatgagggagaattcctgcacagcatagcctctttatgatgaagcaagaataggcagcaatgaaagattgctctttcattgctgttgctgctatttcttcaatctttcactcaaggtggtacaactgtatttgttgaggatactgatgctaaattccctcttctgtgccaaaatatgattcgttcattacattgtcttctcggtgtgagctagatcgacagagttcctcgattcgctttgtcacctcagccattgagggacgcttgtcagggtactgcatggtgcattcaagagcaagttgtaaaagctcaaccatttcctcctcaacgttctggtacctaagaagctcaaggtcaaaaacctccgcagtccactcctctcgaaccacagactggacccatttcggaaggtcaactccttcctcattcaactgcgaatgcgtgggaggcttcccagtaagcaactccaaaagcagtacaccaaagctgtacacatctgctttcaaagtaactttgtgaggatctgtgacttctggggcacggtaaccatcaatgcggtggggagtagagttagaactagcaagatgagcaagcccgaagtctgagacacgagcttcatatgatcttgtaagaaggatatttgaagacttaatgttgccatgtgatgaaaaaggaccctgcgagtgcaggtattcaatgccgtaagcagctccaagagcaataccagaccttgtttcccaattaagtggagtcctcccagccccactgtttcctgtggatcaagtgaacataatgttagacttagaatacgtgtcctagcagggcaaatactggctctgataatatcactatgtccctttattgaacttttcttggcagatttttcaagcagagaaaatgatttacaattctccacttctttctttattatgaacattattatctatctattggtcctgttttcccttgaggtacttgtaaggaagtctttaacaggtagtcatattccaagcatttatggaagtaactatgtatttcaagcatgtatgaatcgtctaccatttaataaagtaaatcattaattgagaatgaaggttatttccctttcaaatcatgtgatgaaagaaaatttctgtcaaagcaaccaagaacattttggagtactaagggccagttggaaagaaacataaccacgtcaagatctatcccatagagaatgactttctcttagttttctatgtcgaaaatatggttgaggtggtcacaactcacaagacagacaagtaacagaaaacattgacctttatttattaaaaaaagtgtggaaaacagcgaagcagaataaatgcattttaaatatccatttagatcatttaagatgattacttaatgatcagtggacaactccaggcctctaaacgtgggtaaggttaactcgaccatatctatgattcaatgttccccataccattctttagccagctttccttttctttcttcagttttgcaagctttcattgccaaattgtttctcaaaataataaaaataaaatagataatagaattttcagtaagataaacatgttatgcattctaaggatgtccccaatatattaattaaacagacaagcagaagggaatagtattgacatcacaatcaccacaatactatttgaaacaagatcaacatactaacatcataaagatgtaaattgttattattcaaactatataatcaaataattaagtcaaacaaatgtcagtaggaaattataataaaagctcacttatgcaaataaccaaaactgataccgtaaacatgacaacaaaaacattaaagaaaaatcagaggcgaagttgaaaatgctaaccgtgcaaaagtgcagataagcttcccataggcatgtaatcataaacaagaagcttttcatctctgctaaagtaataagccctgagtagaaccagattctcgtgattcaatcgtccaacctcttccattttttccctaaactccttctcgggcacagttgcttctttcaacctcttcacagcaacagcaacccccatttccaaagaagccttataagctgtcccaaatgtacctttccctagtacctcagccgatgctctcaacaaatcctccaaatcaaacaccctcacagcattgccgaaaaacaccaaactcctattcccaccactctttttagcatttgcttttgccgcagctgctgacgacgaagagtaatcagcagacgagttatcattatcaatccttgactttgcattatgaattccatgctcagtagactttgcggtcatttcctttgaacccttctcgccacgagactttatacgaaagaaaaataacaaaatggcaagaatgaataatagcaaaacaacacacccgatgacgattccagcaacggctccacccgacaacttcttcttcttcttatctacaatctcagcgccattgcagggctttaaaggctttccacagagcgaattcccctcgaaagagttggcaggcaagccggaaagcttctcaggaatcgacccattcaactggttaaacgaaacattgaattgttcaagcgtcggcaaatcaagctctgggatggacccggtaaatctattgttctccaaatagagaacgaccaacttggtcaaattactaaacctcggcgatatctcaccggaaaaatggttttcaccgaggttaattctgaccaagcttttcatatcgaacaagaattcgggcagtggaccagaaaagaagttaccttccaagtgaagctcgctcagagcgagctttgcgatgtcagatgggactgaaccagagagcgcgttgaaacgaagggagagcttctccaatttcgtcaggttacctattcccaaaggcagttctccggagattccagctccgggaagtcgaagttctgtaactccgccggagcggcaggtgacgccaagccaagagcacggcgagtcgagcgagagattccagcgcaacgcgcggccacctagatccctttggaggttcaccaatgtcaacttatctgaaacgagatcggagcttccaccggggaaaaaactcaagcaaaacacgagaacaagtgtgctgaataacggtcgccaaacaccatcggcaaccttcatttcctccacaagttctcaccccgaacagaaaaaccaataacaaaacacaaaagaaagcaaaagaaactcagttgcgggtgtagtatttggaagcagggtttgttgattagatatttgtggcgctgtctgtttggaaggagagaaagtggaggaaaagagagagagagagagnnnnagagagagagagagagaggagggaaacgaggagggagtagactggcattggcaaggagtagttgtgacaaattaaaaccaaaacccttttgctgagctggcattccttagtagtattaataaacgcaatggacccgcccgccacaccctaaccaaagccaatataatacttaagaaaaatcgaaaataaaaaaaaaaaaaattattagaaattacacacattaggtgccgtttggtaacacttttattttctaattttttaatcacaa

SEQ ID NO: 16766 - DNA, 9913 bp, Cannabis sativa
tagtagaattgtcattccttacattgaggaatgattatttcattccgtagtttctaatttccttcgttgttcttcaattttaatcaaatactgcctatctaattttctccctcctccctcctctcaccattttctttatccttttattgccttttctttggtcactctctaccttcacactatcagcactttctcccttctccctatgtgtaatttgtctctcctcactctcaacattacaagtttccttttctgattctctacactttctttcttctccctctgtactttatctagttattttctttcttaccacttgctctccctcattttcccgacttaaaccatatattatttcaacaagtggggtaatttttgctaaattatagtttactgcattagttcttcattcccttctattgcattctattcacgactagaaccaaacaatgcctaggatgcatattgtattacaaattttgattatggaggttactgtagattggattaagatgcctttgtattgtgtatggcatgaatggtggatggataaaggttatcttttgaatttcaacatggtaaaccaccaaagaagttaccttgaaagcatggtaggtcttacaagctgaagagtaggttatagattttgaaagagaataattgattgattaacttatcattaccaaattatgaataggttcaaatttcccatcccttttcagagagaaactgttaaaataatgtttttaccccttttcttttcactataatatattttaatgttttctgtcatatttttcatctttgaaacgaatgaattggtgctaggagcaaggttttggctgtaaataactaaaattaagcgatgttcgttctgttaatactgtatcacattcagaaaactattacgcagatgtaattgtttttgttttttctttttaaagcaaaacttccttgtattaattgaaaagattagttgcatgggtatcacaacataggtgtggaaaaaatcataggtatgacagcaacataatgtaatacatataaacaaacaatggcaatcattacaaaatactacagaatggaaatcctttaaaaccctttcatgaagccaaagggcaacacaagactgattctttcagtacatggaattgttgcatgttttgaacaatagatacaagctttaatttcaaattatccaaacaaattttagtttggatatctgaataattacttcagtttctttatgacatgaatacaataattgcttacaccagtctgtgatcataaattattaaaccatgctgcaaacacctctgaaactcttttctacctttaacaggtctcaacccaggagtcagtggtctacctttaaaggggtggcctttaaccgtaagtctatctatcactttgtccatatgagagacagtatatatcagtgagtaatgacatggtattttccccagggtatcgaccaaatccggcctggtttaggggcacaagttcaaaagcctttccttcaaaacacaaatcaatttcagcttctgccacaacaacagcaacagcaaatcttatcacatgtgcagggccagggaaatcttactagtactactatgtacggtggtgatatggatgctcaaaggcttagaggattacctaggggacctttaaatgcaaaagatggccagacgattgcaactgatggttctataggctctccaatgcaatcaacttcatcaaaggtatacattgactcttggaactaccagaaagtcttccttcccctagaaacctcacattcatgtgaaatgtgaaccccattaaggaacatgtacttgttttgagttcctacttaatttctattggtattgattgattacccgctgaaatatggttagagcttatatgtgtcttgaacttatactgaatgtggttaatatgaagtttgtaacatttttggatttttttaaacccgccaattaaaaggatatatcttctccatttttattgtagccattgcagcggctgaagcagctatcttgtagttcttgattctagttttatgaaaatgttgggtttatttaattgaatgggctttagaagaaactaaatccggagaattgaggatagttttctggtgtatgttagatttgccatgtgtattacatttggtttagttggtcaacatagatgcttgtcagtgttattgttgcaactttattaagagcctacaatagtaaatcatttaattctttttcattaagcagataaacatgcaacactcttcctctcaacaacaacaacaagatcctttgcaaccccagcaagtacagcaggttttttcacttttctcttgatacagtgatgaaaggtcttgaatgttttttttgtcagtacaagttagaaattactatcctggaaactaagtatcacattattaattttcttggttctttaggaaggactatttaactgaagttttaattgatatgtaatgattcaaagctgtctttctgaatatattgaccagtggcttttattacattatagaataaccgaaaaaggaaaggccctacttcttctggagctgctaacagcactggtactggaaatacagtcggtccttcccccaactctcaaccatcaactccatcaactcatacccctggtgatggagttgccatggcacataatttgcagaatgttaataacatgtcaaaaagtgtgatgatgtatggtgcagatggaaccggaggtcttgcatcctcaacaaaccagctggtacatttgctttttatatattttatgtttatattatcttgaaggtaaatttgattgggttgttcacagaccaccctttttaatttttttttcgagaagaaacaaaaattgtattagaggggagaaaaataaaaagatgaccagttaacgtcttcaagtactgaagatggactgtactcagaattccacttggaacatagaccaaccacttattgagcacaacccggtcagaaaatcaagccacataagaggtcggggttcaaacccctggtggactaatttaaacaaatggattgctgtgcttgtaaagtacttgaatccgtcttgtattttttaaagacttggaacaagtgatgatcagttgatttgaagggtcataaacttgatcacaaatttaaagattgtatttgattagtatacttttagcagcattcttaatttgttaggccttgaattttttaaatgtgtcatgatggcctactacaactcgacaacttgattactcgtattgaactcttttgacaattttaattacaggaagacatggatcaattcggtgatgttggctcgttagaagacaatgtggattcttttttatcacatgacgatggagatggaagagatatgtttggcacattgaaaaggaatcctgaacacgcaacagagccatcaaagggtaatttatagcctcaaggtttgagcaataatatatagttgaattaatcaaatgcagtatgacatagttttatccatctcaggtttttcattcaatgaagtaagttcaatacgtaaaagtagcagtaaagttgtctgttgccatttctcttctgatggtaaaatattagccagcgctgggcatgacaaaaaggtaattgtttagtgtatcacgattgtgtgtaagcatagtatagaaaatatgttagtctattaaatttaatggaattaattgcatgtttggtgccttggatagttattattttcatcttttgttaatatcagcttagctgcctcttggaggcaagaaaataaacttggatgtgacaaattttaagattttcagcagatatcttgttagtagtgaaagtatatatgaagaaaaaaagaaaagtagtgaaggtatatatggaacataaataatctagaggaaatgaaagtaaaatgaagttacgaggatgcttaaaccgttttgttttttcttttcttttttccatatcattaggttgttctctggaatatggatacactgcaaactgatagcactcctgaggaacacactttgataataacagatgttcgatttagaccaaataccactcaactggcaacctcttcatttgatacaacagtgcgactttgggatgctgcagatgtaaattttctgtttctttctatttacttattttttatgttttgtcaaaataatcacaatagcaaaatctagacttgtaaaatactttttgttgcatttcatttgtactttgtcgatcaaattcatcctcaatgttcgtccttttcaagtattttttggatagaaactttttaactactttttaactgaaatcatttttacaagacaattacatatagttgaaactatatgctgataaaatgttcttaaataactatgttttgttctggctggtacatgaacccaagcacactggttgatttttcggaaagtaacttgttctacttttctgactttaagttaaacctactacatgatgtaacgaagtatttgtttgtgtctttgtttcctctatcggcattttttacatttagttttgtctaattcaatgaacatatatttaatctgcttttgaatattaacatatagagtttggtaacaatgagctttgttttaggttagccaattttgttaattattgtagtttattgctgcagccaaactattccatgcgtacgtattcagggcatacctcacatgtgctgtcacttgatttccatcctaaaaagaccgaccttatgtgctcttgtgatgcgaatagtgagattcgctattggaatctcagtcaatatagcagcactcgtgtttccaaggccagtattgatattcttctttctctcttattagtttatgaggctgcaatagtgttatatagtttagtatttgctctaaatattgtatttaatgttgcagggaggttcagcacaagtgaggtttcagccaagaactggacactatatggctgcagcagcaggaaacgttatctctgtatttgatgttgagagtgacagacagacccactcattaccggtgcgagcaaattctttcatagtccccagtcaatcatggtttttccgtatttactttgtaattaaactagacaatctttcttttatctctaggggcacacaactgaggtacattctctttgttgggatacaaatggagatcttttggcatctgtcagtcaagatgctgtcagagtctggtcattaagttcaggagagtgcattcatgagctcaattccagtgggaatatgttccagtcctgtgtattccatccaagctactccactctcttggtcattggaggctaccaggtgattttttttttcaatgattatgtttttaaccaatctgcttttagcttcttgttcaatattacattccctgcaaattatgactcaagctttgccagtctaggaatagcaatactcacgattggcttgctggctgaatagtagtcgattgttgcttcaggaattagctagttggccacttgcttataagaatattcttaggatcccacatctactaagtatgagattggtgactaagtatggactagttggtagtatataagtatttgggcaccctcctctcttaggatagcttttgggactgagttctattcaagtgaatgtaacaaatggtatcagagccatgcaccctcagttgggactgatgttgcaggaggggcaaccaatgggaaaaggctagagtgggccaccgtagagtagactgccatgggcatcgactctaaaaggagggtgtattgttaggatctcacatcgactaagtatgggattagttggtagtatataactactttggcacccaagtgatatgggattagttggtggtatataactacttcggcacccaagtgattgtatctaattcctagaaattatgagatttttgtggaatacaattacttacttcaggaattagagtgagatcatgctagttggccacttgcttataagaatattcttatctactaaatactaagtatgggattggttggtagtacataagtacttgggcaccctcctctctcaggctaggttttaggaccgagttctacttaagtgaatgtaggaccgagttctacttgagtgaatgtaacaaatggtattagagccatgcgccctcaattgggactgatgttgcaggaggaacgaccaatgggaaaagcccaaagtgggccaccatagagtcgactgccatgggcatcgactctaactacttcgacacccaagtgattgtatcaaattcctagaaattttgacccaaatagctcaacttttcaataaccttatcatgtaattgttgtcattctctcattaacgttttggcaagtactgatcttgcaaaagtaattttctcaatggatttattatccttggcaggtcactaatttgttttgttttttttttaatcttctttatcataattattatttttcagtccttggagctgtggaacttagccgagaataaatgtatgacgatccaggctcacgagggcgtgatatcggctttggcacaatcaccaatgacagggatggttgcctctgctagtcatgacaaatcagttaaaatttggaaataaatttttcctagtactgattttactgagcacttctattctctcaaatggaataaaaaaagattaagatgatatatatagaagagaagctcaaaaatgtatttaaggtaattcgatttaatatttgtttttcttatttggttttttttttatcttttcattgttttgtactgtcttcacatatacgtaataagaggaagtgtgtgatttttaggtttccaggtactttgatttgaactttcattgttttttttaagggtgaatatatacatactataatgtctgtgtttcaatgctgtaaagttcttattttcttcttcctaggttagtttaatgtctttagattcttgttttcttctcttttgtttgatttgaaattgaatatatacaaatacaacatagaataatatcattatgaaggtcgagactacctccaaatgagtttttgtgaagtgttgtttatccattatgtcggactatgctgaccaacaccgcgcgttgatgttaagcgttaatcattttggtaatcgggtaaatgttgtgtttggtgtgattaaatctattaaaaagtttcggtcgatgttgatgccattaagtttcactcattggtacttccaaatgagtttcggtgaagtgtcgtttatcgattcgtagtgtgggtgcaacatcaagtagtgttggacatctactaagttttaactcttcgataaatattgtgtttggtgtgattaaatttatcaaaaggtagtatgagatgaaaatcaagttatgacaaattagttgaaatttggaagtgaaattctcaaaaactttggtttcaatgaattgaccagagaatcattaatattgattttactgagcacaataaaagattaagatagattaaaatgatcatagagaagctcaatgtaattttgatcattatttgaggaagtgtgtgatttctatgtttctaggtactttgaactttaattgctcttatagaggtgaatatataacaaacataataatatgagaatactgaaaagagtattattggtgcctagcactatttttgttattatatcggtgtaattatgtattaggttttatataacttaagaaaatagtttttaaaaaatatcgttacctaattataatatgccaactataaaaagtgttgggcaccattagtaatcagtataaatggttgaataatataaacaagatagatatttccaaatgctttatgcatataatatatgccatcgaatcaaattaattgattttgttctcacatttcattaaaagattctatgtttttcaaatgatattttcttggccgtagatgatgaagaataagcatttgaggtgtgattcaaattattattattattattattgattttcctaaaattttactgaaatgaataacactttattcccaataatattttaaaataaataggatttatcttctggactatgatgcttgtagagttttgtctctaaacttttatctattgtaaaaatatttcttaaattataaaaactgttacaaatatctctttgaaattgcattgtggtcatttatttaaataatttgttgatatagcactagcataatgttaatctagcatatttaagagttcagataaaaaataaatacttaaataacagtctaatgataattataagagtatgtatgtgcatttttaaagctattgtttgtatgtttaatgtcaataaattagattttaggtaacttaaagttattaaataacctcttgtattgcaattatatccgtaactcgtagtcacataagaaaattgtttaaaaaatgattagaatgtaaattgacagtgaatatttgtatcgatttttatagttcagaaaaatttttgcaacagagaaaaatttaaagggcaaaactctttataaaaaaatcataattcaaagaacaaaaatcttatttattcaatattttattaaaaataataagagtgcaatatatccaattaaagagaggatgtatgagcaatttaattgcctaaagttgaacatgaatacaacataagtcaaatcaaccaatcattctttataaaatataaaaagtaactaaaagggactaaaacaccaacctagaatcactatcaaagttacaacttctctttcaatgactattaaatttcatgcaaaaacatgtatatagttcaatgagaacaattatagagtaacaaaaattaagttgataagaaaaaagtaagaaaaaaatgttagaaagaaaaagaaaaaatagacactaaactaaacttctaggggaaaaaaataagtaatgatatctgtacataaaatatatattaaaatactatattaagtgatgtgacgcttattttttaattacatcttattaagatgaaaacaaccacaatttaaaaaaatattatcacatcactaaatctaatattttagtatatattttatgtgcacatatatttttaaaaaataaataaattatgtgacattacaagcttaatttggatcattcaatttttttccttttcccttttttgaaaagcataaaaccctcctttttttttttctctctttctaatgttgaaaggcttaaaacttgaaagggtcaaaaggtcatgcttacttttctattgttcaccgacaaatatatccctactaagaaaaagggggcatttaattgttttctcatatacatatatgccttctaatttttttttttttttccttttcaatgggaaatatgttgttatagtaataatttacttttgttagaaaatacataaaagaaaagagttttcttattagatattagtaacaccttttaaataaatgtagcgttttataattaattaatgatattttttaaaaactattatattaaattatattagatttaatacttaattacactaatattgatatgacacttaaaaaagactattagatatcagtggtgctaaacaattcgatttgtaaagaaaaaacttaaaaggatgttggattgggattagagaaagaaagaaaatgaatacacgtatggcccaattaatccttggaattaacttcaaacattggaaatgtatacttacatttgtggaagaatgaattttgtctcatttccaacaaaactctatagatattttcagttatatattccataaactttggtgtcgtttggtaacacttttgttttctaatttttaaatcacaaaatgaaagtaaaacttttatttttaaaaaattttcttttgaaa

SEQ ID NO: 16767 - DNA, 5533 bp, Cannabis sativa
  modified_base (1493)..(1497): a, c, t, g, unknown or other
  modified_base (1730)..(1736): a, c, t, g, unknown or other
  modified_base (1799)..(1804): a, c, t, g, unknown or other
ttatatgtgtcttgtttaagacaataacagaatctgtactgatgaaactggaagaaaattacagttttataaacattgggtactcatgccactgaaaaaaatcattaggtttatgccgcttacaaacttaaaactttaggtacttatgccactatttacccttaacaaaataaatagtttaattaataatttttataaaacacaaagtttaaaatataaaataaattataattttttcctacatctaaaataaaaaaaataaaaaaaaaaatctcaccaataaagacaagaatagtgaaaagaatgtttaccataacgtaggcatgtatattttctttggtcaactttatctccgacttctcatcttcaaactcatcaagcaacacatcaagaatatctctattattctcataatcattattgttattattattattaccctccattctcttctttttggcctcaacatgctcctcaataatcttccccatcaacctatcatacctatttcttacatccttaagtctcttcccaaacctttgcaaatcaagcttcttacaaaaccaaatgaaatcttgaacattcaacttcccacccaaatcacacatctcatcaatcacatgtctcatctcataagcatcgtcatcatttttggcacacttttgtttcaacgccatcctagaaatgacattgtttgccaatcccattagttgtgcacccaagtcaactttttcgccctcatttgccaattttcgaatgctatttatcaataattttatttcttctcttcttatcggacggtagaaattcatcatcgaagctccgaggagcttcgatacagttagttttttcatgaacttccaaaagggtccatacggagctagggcaaagtcagagttgccataggtcaaatactgtatgttgactttttgtggcctgtttaagaagcatgactcgttggttttgaggcattctttggctatttcagctgaggaaactagtaaagaagttttgtagccaaacttgaggtaaactatgggcccgtaacgggccgagattttggcaaagtcatggtgagggagcttgccgatgagatgtaggtggcctatgataggtagggctggtgggcttggagggagtggtgggtttttttgggcttttaaggatttgatggctcggcccaataagatgattgaggtgattgatgataagatgattagaagaaagttataatctatgatgaactgatgaccaatattatgaagctcaaccatattggatggagagagaagaggttggggaatcaatcgtgtttataattagtaatatgaaatatttggtgattttacttccaaggaatgttgatttatatagaagggttttagaacaagattattagtaatttgaactattagacatatgattggggtctttttttaatttaagggttaataatatgttcattgtctttctttaaatatatatatatatannnnnatatatatattatattatattagctacatgctggaaatgaggaaggaaaaaacaaataaaaaatattattgtcatgacattattgctcacccaaaatagtttttttttctatttagtataactaaaatggtctatttttaaagttttaggtaaaaaatataaataatgctacattaagtgagatcattcttcatttattcaagactaattagtaatttttcctcccgaacttnnnnnnntaccaaatcatgcctcctgaatttatttggcagttaaaaattttccatgaactattgagattnnnnnntttaaagatttttgtctaattttagtaaaaaaattcttatatggataaaagttcaaggggtatgatttagtacatatcaaagtttgaggtgtatgatttggtagatatcaaagtttgggaagcatggtttagtacataaataatcactgaaacagtataattaaatgaaattagacgaaagtccttaaatctaacaatctcaatagttcgggggaaatttttaacggccaaaaaagttcagagggcatgatttggtacatgccaaagttcagggggaaaaattactaattagtctttactcaaatcaacttctccaatttattctttaaaatactttattaaaatctcattttttgtattttatctcacacttttacattacatcatacatcaacttatttattttttttctataacatttaagtattatatttttattatataaactaaaaaaattaaatgaaaaagaattaaaaaagagaaattatcaaaataatatttctacatgtagaaaaacgctatccatgaattaaaattttgaattattacttgacgaagtccctttataacaacatttttttatatatatatttttaccttttgagctattttagctcatgagatgtggtgctcatagctccaacactattcatactttatatgtagtaatatttttataggtttttgggcttcttcaaaaaaatttcttcaattttttattcatttttctatttttatctcaccaatgattatttatttattattttctctttcaaaattttatttttttcttatatcaattaataaaaagtatttaagatataatattataatattgtaaaaaatataaaaaagttggtgtatgatgtaagataaaagtgtgagctaaaataaataaaattaagttttgacaatgtattttgaagaataaagtagagacactgatttgaatgctcttaaaagttgttaggtgatactaatattgttaatatatcttttacatgttaagagatgttactttgggtgggtggaatgtttgaaggtttttttttaatgatattaaagtttttgttcatctctaaagatatttctttcttatgttagttgcaattttaacattatggtttataaattgatttagtatgctctttagatagatgataaactttttcaataaaagaatcctttcacctgtttttatttctgtactatattataataatttaaaatataatatgtaacacgtgttattgcagcatcgagataaaataatattaattttatacgaatatttaaggtgtagtattacctataaatgaatattattataaaaaaaaaaaaaatagatttttaagcttaattttgttatctaattaataaaaaaaatctcatatttttatattatatgaattgagattgttctatcggtttagaattttttaaaaaaaaaaaaaaaattattatttagcacaaaaaagagataaaaattattgagtttgagttaattattttttatatagtattaaaataaatattttttgatatatattctttttctaattaagtagttgaattaagcataggaactcatatttctcttggtatggttctgcttctggtcagagtgttaacttcatgaaattggttatttgttttagtccgaacattgataacactgataaggataatatggttgcagctcttggtgtggttggtgtggagtgccatgaaaaatatttgggtcttccttgcttcgctagtcagaataaatttgagatgtttaactcagtacgagatcgtatttggaaaaagcttaatggttagaaggcaaagtccttctccatggtaagtcgcgaggtgcttattaaggttgtcattcaatctattctctatggcgaggcaagggggagacagctcaggcgaagaaatgtgttttaagtgagcaagcttctctcctatgtcaccatatagctgctgaggaggaaaaggtgcgcattcgtgttggcatacccatggtcgtccaagaactcaatctcgtccttaagcctagataaatgctcctagaactcacaaatttcctatagacatttcaaatgcttagacattagctggtgatactgtgcctaagggtctatgacatccccgtctgagtcggatgaaagctcaatagggaaaagcccctcgaggatgaaaggtggtatatggtcttctataaaaggaaaaagggagatgcaaggagaaagcataagtatttttcgaagaaaataaatgtgggcaccaatacccgctaaccaagtgtgggaacacacctccaactataactcactcataaaagggccaccttaggcacacgcctagtaaccagaaacaataaaaggagagggtgcatgaatgggtaggatgactagaggaccaaagactaacaagacttaaacgagagttattgtaaatttaagtggtacccgtaagtgtagtaggtgtataaatataaaagagaaaaaagtaatattaatggggcaagaaggtacctgacaagattaatgtgagtaagaagatgctcacaacgtcgaaactcgaaaaaagagcaagcgtcaaagggctcgaaatgtaagaagagtttgggaggagtacgaagctaaaagagataacaagtgatgggaggtaaggttgagatgagaataggtgaaggtgagagcctatttataagaagaagagatggatggagccgttggagcaaaatgagatcgacgaatggggttggtcacatgcacacatgagaagcaacacccacaaacctcattgaatggtctcatcaatattttagtatgtcatgtcaagtgtcacaccagatgaggtgcgccgcaaagggcttaaagaacggctcaattgtagtcataaagaccacttcaaagtgctcttttggattgggggcaagtgctaactgtagaagttcaataaatgagtgttcttatgaacaacaagtaagatggatgaataatacaagattctcaagacagacaaaaggaacaaggggtggtcccctacttctttttcccttgtctcctcatcacatcttcccatcatattacctttttctttcctccgtagcctccacgcactgcctgcgtcagcctccacgcaccacttgcaccccgcctccacgcaccacatgcacccagcctccacgcaccacagcgcccagctcaacgctgctggtgttgaaatatattttatcaggatctagatttattaacaaatatatttattaacaccctaaatatgaatttctaaaataatgaaatttaaacacatataaagttgagaaaccttacattgattgtagtggaatataggtctccttccactcagatctataatccttgttcctttctgtcacagaatattatcaactaagcccgacactccttcaagttgttggattcttcacagtcttacacactatgattgagtactagactttctatgggtgggtatgcactcactcactatagactcaaaatttgatgaagaactatgaaggagattcaaaatagaagaaggaagaaggaggtctcaagaactctagttgtctgacagaatgtaaactaggttatttgagttgttggataatgagacaatcctattccttttatactatcttacctagggttaggattcaaattatatggaataaaaaattataaaataatagcaaattatacactaagt

SEQ ID NO: 16768 - DNA, 5513 bp, Cannabis sativa
actaatctacactcaagattgtgaatgagtgtatatagatatatattattctcttaatatatatttattatattacatgtgttgtatttttcttcttctacttttatatatatatgcaatatatatagtgtatacatgtgtgttgtaacatatatttaatcaatctttttattttagtctttgtattattttacaatagagttgtaatacatcttgattttcttccattgtaataaaatctctaacaatagatacgaaatctatagcttctataatgacatagaagtgaaataatgattttctttgagcttggcttaacagagataaattgaatagctcttattttagtaattatattagtttattgaaatatcatttataggaagctaagtggtttaaggataaatacattgagcagtagaacagtaaatttgtccttactcgatgtaaatcatctatggaggatctttaattatttgaattgaaaaaatagataattaatagtgtatctatatttggaacatatagagcgttttataaaatcaaaagtaaaattttgaatctatggtagagtcaggatgaattaataagtttggaaatttacttggtaaattttgaatttacttattgggagcttgattatatagactatggtctccacactagttgagataatattggcttgtaaactcagttaattggttttaattaaccaattagaattctaaactaggctatgtcttgtttatgaattttcactaggcaagagcttaactgagaagaaagagaaagactttaggatttatatgttaattaacaaactttaaggtctaattaataaataagattatataataattttatttgataattatttatattattaaataaataaatttgatattaataagataagaattaaaatatgacatttgtaaaagaaaagataaatagttaaataaatgataaaattgaaacctatagggcccataaaagggtttggccataaggtttaaaaataagccattattttatcttttttttttattccatataatttaaatcctaatcctagaagaaatcctataaatagataatgataggctcttattttcataagctgataactcaaaatcacgttgtcagacaaaataagagaggctcctatattgaattcaaaattccttctctttctcctctctagaattcaaagtcctatctttttcctcttcaaattttcgagatccctatagtgagtgagtgtttacccacataattcaaggcaatactcaaatatagtgtggaagattgtgaagaattctattatttaaggagatacgtacatgttcagatcttagttgtactccgcgacagaaaggaacaagggttagaaatctgaacgaaatgagtcattatatttcgctgccaccaatgtaaggtttttttacaactttatatgtgtttattttattattttaagaaattcatattttggatgtggatgttagactatagatcataattaattaacatacatgttagtaaatctaaatcttcgtaaaataagctccaacagtttctttgccacttggtggccagttcaaactcactaagaagtcatgtccttcttcggaagaagaaaagtgaaacatgttggttatttcttactcttcagcggttggaagtttgatgtatgcaatagattgtacgagattggatattgctcatgcaaggggagtcgtaacctgtttccttacaaattcgggcaagcagcattgggaggctataaaatggatcttcagatattggacagggacataacaaatgtgcttaagttttgggaaatgagaaccagtgttggaaggatatgcagatgtagatatggccggtgatcttgacagtagaaagtctacatctggatatatatttacttttgcagggggagttgtgtcatggcattctaaattacaaaaatgtgttgctttatctaccatagaagcagagtatatcgctcttgcagaagctaggaaagaaatgttatggctaaagaattttctccaataattagatttgaagtaagaaaggtacgtgattcattgcgacagtcaaagtgcgattgacctaagtaagaatgctacttaccactatagaacaaatcaaattaattgatattagatatcattggacacgtgactcatttgaaaagaagctatactaagtacaaaaaattcatatagataagaatgcagcagatatgctaacaaaggtgatttctcagcataagcttgagttgtgttccaagcttcctgggatgagttctcgatgatgaagatataagacgaattcttcctcatggattgaaataggggttgaattgatgggtagcggttgattttcaaccatgtgaaaatggggttgtatttttcaactatgtggaataacaatggtaatttttgacttgagggatattcatatattcaactatgcatttaatgcaagattgataatttgtgtcttgttcatacatccaaggaggcctataaatagagcttcatccctttcatttgtttatcccatcacaaccatcacaaaaatagtgagaataatacctcttagtgagggaaatttaagggaaaagaaaaaagctgagagttcttatgaaattgttgaaatattttgtagagagatggtgagattatcacactagtgagtgtgaaaattttgagagcattcctcaagtatttatcaaaatatgaaagtgtaatattatgtacctattattattgttatagtggcaagtttactgtgttctttattttctacgagataattttttagtgtgcacttagtgatttaattattatttgtaaagtactatttatattggaagatattcaaaacttctaaatatattctatgattgtagttgtgactcgaatttccaaattctcattatattttcccgcaaatattattattgaaggaaaattgaaatactttctattattcccaacaattatatcatgtgtaaatgtttatagctaatgtactgagagtgcatgctataactgaaaaaaaaaagttacaaaaatatggaatgatgttctcttctgttctgtttttttttaataaaaataattatatattattgtagtgatgggacttcttaccaaccaaccgtatgtaattgtttaaagttctgtttgcaacaaaatttgtgaccaagatgaaatattaaaacaaatatatgaaggcatgagtgaaaaataaagcttgaacagagcaccaaaattatttttagacattgcaataaataagaaagaagacaatattttgtcataatgtctcttctaaccataaataatactgccatttattttttaaaaaaaaaatttgaaacactattctctgatcctctcttctctgtaaatatttatgtgccatttaaattatgcaggatgaagtaattaggccaagtcaatatagctacatatattgtatatatttattcaaaaataaaaaataaagaagacaacaggcaaaattaatagcaatttatttatttacatataaatatatatatttatgataagtgcaataatttagagacgttaaaagattcccaaactaattgttttttattcctaaaaaaagttaaataagaaatgaaataataattattttaaaaatgatcagatgagtactaattaaagctgaaacattatagagtcaattcaggtgatgatagaattgaatgacatgtgacattatacagtcaaagacgttaaatgagagagaatcgatttctgagtcctgagctatattatatatttgaatattaatttcaatatataactactcaaacattagtttcagaagcataattaatataaattaatatctttttattgaatagtgtaatatatcccatatataaaatagaatatacatttctttaaattgattcagcgggaaattcaaatgtaaagtacgtatcagcaaaactatagaaaaaaaaatattaggtaggaacattcttttcgtctcaccagtccaagagtgttttttttttttttatttttttttttatatatattgagaaattataatttaataatgttttaattatatatgaaggatacattcttatttagggtattcataaattttttgtgaaattttgaatagtttttaatgtcaaaagtaaatattgaaatttctcatttgatgaatataaaacaactttcaaagtacatgtttttgaatttttgacaccgaaattgaatcccaatcttttttatgaagatgaataatgttatttattagaatcttccataaatttttaaaaaatttagatactttacatggtcaaacatgcaaaacagaacgttttaattaagtatgttttatactcatatgaaataaattgtttctaaacttaatttcaatactacattatattcataattttataaaaactaaaaagaggtaaagggattatatttctgcacatatcaaaagagaggaggcaaaaggcaggagcgtttagtaaaataaattgctattaaataccaatgcctttggaaataatgcttactaatttttaattataataactaaaatatgtagtgccctttattatttttctttaataaatgtcttgatgcatcaaactatttgtagtaagttagacttaagtttctcattttctgttacatatatctaaattagtttgattcaagatttttgtacctgctaaattgaactagagggtacagatttggtcatatacatgcattattgtaataatgacattcatgctaaattggcctacataaatttattagtgccttttgaaagttgtatacatagggtgatggatatgactatacatatgtatatggtcggctttctttttggatggacagattgatatgaccattttcgttaaatttatcatatctgctatataaatatatatatatatatatcttgttacttatggtggtatatatatatatatatgtaatgtatagctgcctaactattcaagactttagtttgaatcgatataggtaatttgattgtaagagctttagtttgtacttcatggcattcaggtacttttttttttggctaataaaattaaaataaaatagagattacacagtatacagtatggtagtgtctacgtatataaatgatttttttttgttaaagaaataataagctgctttatataaaaaaaaaaaaaaaaaataatcttacataacttattactatccatatgaatcatatggttagattaatttaaagttcctattcaacataaaaaaaacaaaaaagaggattgtttcatatatatgtattaataaacttttttttttttttggctttaagttaattgctttgttattttaatattttttattaaaaacaattttttttaacaaaatgcatatataattttaaaaattaaaaaatatatattagaatgtgttataaaaattata

SEQ ID NO: 16769 - DNA, 4221 bp, Cannabis sativa
tgatacaataaggtactaaaagataaaaaagcattggataatgcctcatctcgcttattataacacagactataattttcaacgaatatcctaaaatggtgtttattgtaaaagttaagtcactaagcgtaaaattttagaaaatcatcgatgaagtttctcgtacctagttgccaatgcatcaatttcatcgatgaatattactgatggtttgtttacctgcaccgagagaaataatagctttctgcattaaagcgagcatgtaaacgcattaaatcataaaggaataatacaccggtaccccgaagaaacaatttaacaatatgttattagtaaagaaagttgacaacgttgttcggtgttccttaacaccgcatgtaagcctttttcgacaactcactaccctttgggagactggagacaagcattcatttctttattttgacaatgccataatatttcggtctcccaacaaaattttaactgcaataaaatcaaaacaattttaaataacaagaaaaaagaaagatcgattaccttggctcttttgaatagatccctaatacgagcagaacccacaccgactaaaacttcaacaaattcagatccagccatttggtaaaatggaacaccagcctcaccagctatggccttagcaaccagggtctggaaacacaaggatagtcttgagatttcaatggtacaatttgcgagaaacatcacataatttgataaaataacaaagcacaaaccttgccacatccagggggaccttctaaaagaacaccatgtggaggttttatacccattttatcaaaaagctctgggttcttcaagtacctcaccaactataaaaaaaattataaacgcatcattaacctcggtattaacaataatatacttgatcatcgttttctatcgaagaacatggagcaaaagatgacacatttaatcacaacagcaacagcttaaaatatctcatcttggaaaaataccaagcagcattacgatttaagagcatggcaaattaaactatccttttttaggaggtattataatacattatctggaaattttctgttttttctatacagtgtagcataaagttcacctttttttctttcttaacagttacataattcagaaatttccaaatttctttctcggaacaaatgtacacgaaaaatataaagcattacagcgagagaaatatgcatgcgctaattgactatttatcataaaacaattccatatgagagacttgaaaacatacctcctggagttcctccaccgcttcatcaatccctgccacatcgctaaatttaactccggttgaaccctgaaagaacatcaacataaaaaaaatttcaaaaaaatttcaagcaatcaaacagggtttcattcagttgttgtgaaatgagtcaactaacatcaacacgagcttctgccttagaacgggaaaaatcaatcccttgccacaagtcctgaaatttataagcaaattgattagaaaggcacgggatcaagaaagtgaacgataaacataagcaattagtagcgaaaagaagcaacatttacccatttcctaaagttctttggtcttctcgaaagtgtgaaacggacaagaaggaccattgtcaaaagaacgaatgtaattggttttaacacctcaagactagcagagacaccaccaaaagtgtaaaaatcggaaaatttagaaaagatgcctccgtcgatgaaaaattcaacaaaattctcccagactctttctaaaatacccgatactatgctaaagaaaagtttgatgaaaggtctgacaactggccaaacaacatatgaagctgtcacatatacgaaactcgtaacagcaaatactgctgaagcaaggaaccctccaataacagcagcggcagcagccattacagcagttgccattccaagctccactatgattctgcttgataccgaagatgccactggatgagggtgctcgggtaattttccaacccaagactgcagcaaaagttcaagccgtaaggaaaatatacaaaatcgagaacctcaaatcgcaatgtttcaaatttcaaccttaatttcaaggacctctctttcctcctataaaaattctgcttttaccttttgcgaaattactaaacatgattgaagaacaaatgaaaaagaagtaagtggggggattcacaagtaacataacctatcaatgattcattgtattatcatacaaacaagtgaacagcttatatctgattcaattctttttaatggaaagagagaaaaattctttatttacatcaaagattacaaaactaaaagaggataaggcattgttgtgaacagaatgaacaaaacgaaaattggcaaaatcaaacagaaaaaccttcaaactaaaagcaagacagaattaccaatacaaattaaaggaaataagaaatcttttagcttctttacagatttcagtaattaatctttcatagttagaaatgcttcaatcttttagcttcttttagctgcaagtttatcattgtggaaagtgattctaaggcggtgatcaattccatcaatggcattgatcctagatgggaaattgtgaactactccttattttgtaaaagaatcacaccttttgttagctgcttattttgtagtactattagaacttgtaattttatggcccataatgtggcaagtagacctttacccactaccggtttggtcgtttggatgtatcggtcatacctaagaacttattttgtaataaccgcaaggtctaactctttcagtctaatgaacgcttcttttcaaaaaaaaaaaaaagattcaccattcaataatatataactagataaagctcatttaagttaaaaattgttcaccatagtttgcttctctatttgataacaaggaccagtatactcttccaaaagattctgagctaaactctcatccagtctcattgccctaagaaaagaaaaaatgcatatgattataagtttgtataatataacataaaaataatccttaaatttagttaaacaatctaaaccaatcttaccattttgttatatgcaagctcttatcaccaggcatttccttcaattcaataatgaaatccctataaccattagcataagcaatactagcagtagcaacatccttccaagtcaacaatgtaaccttatcattcctcatagctttctgaaaatcctcaagctccattattggcaatgcctgaaaatccttatcaaattcctcttcttctgacaactctttcccaaaaacttgctctggtacataaagcttacccttatactctctcaaaatatctttcaaatacacagcttcattttcattcttcaattcactctcattcttcactttcttcaaagttagaacctttttcaatgaacgaaaaatacccaagtctgaatttttcttcaaattctctttttccttcaaagtaaaaaacttttcaccaattaagtaccttggttcaacttggcttggattctccttcaaaaccctagtcacaaaatcctcctcaattggattgccaccttcgccggcggcttgggatttcgataggcacaacaccacggaggccggtgaccggcgaaggaaaagtggttggaaggtattggggaagcgaagcagtgattttgaatgcaatccatggcggtggccatggggttttggaaggtataatatcttaggagataaacgaatatcaatggaagccattgtttgtttgaacagatgaaaatgagaaattacagaattaaaattggatgaagatcaaaaacaaggttagtgagtgatttcatattagggtttatgagaatttggagaagctatcggtctcataatctctgttctatcatggttggttgaagccagagactcaacggtctctggtaatatttgtaaagtttgaagctttttagtattgaagagcattttatccaaaacccaagctaatgtttatttatgagttttttttttaaaggtttaagtgtctcaactattattatttttagggactaaattctatccactatcattttacttgatttttaagtttaaattttgacactaaaactttctaaattactaaactagtagtaaatttaaagtgtcatctgattaattattaccataaactgcttgtgtgtatactcttattttatattggtatattgaatatta

SEQ ID NO: 16770 - DNA, 2467 bp, Cannabis sativa
agagagagagagagagaaagagtcatcatagaaagagaaactgaaacgcacctgcagcgaagtatctttcctggtggaaattcgttccaattcgcgaaatataagccttgaaatctcagcatgcctatttgggcggtgatgacctccatcttcaaagcaaggaatttgtccagtgtttatccactgcataagaagaagatataagaaaagcaggcaggaaccaatgaataacaaaagacagagaaatgatatgaagaaaccttcaaatagatggcagcataaatgagcgcatccaatcgttcctcactttgagaattttcaagtaaaagatcacgtacaatttcaagcttcagcaaagaaagttatattagtgtccgaaactaaataagctactctaaagatcaccataaataaacctaagaagaggcattaaattcagcagttgtgaccaaaagattactaaattccctaatttcagaattttcatatactgaattcagtccattaaaccttagaggatgtgcactgtgcacatatgtttgtagttgtatgaatgagtggcggaatttatgtacacacatgtttttgaaaaacagtatgtaaggcctttcagcttgtactgcccacactcttagattagcaagactagctaaaataaacacttgtcactgtcgttaggacaacaagcctcatagataagcataaaactttatcagaaagagcctgtaatacctttctccaccaatttcttgcatttcgatcaccttcaacaaattttaaagccagtccttcaagacctgaggtgtcccaccttctttctgattcacggtcccgatgctcattcgagcgcatgaaggagatatcctttccttgccattgcccaacaaaaggacttgtctccacctctgaaagagaagcagaagcaccatcagcagttgtagacccattttcaattacagcctctccttcctccagcgccaataaattcatagcctctcctgttgcattccaatggcaaacaattccaaaactaccctgttttggaagcttcacaacccgattatctccaccttcccatttcttcttatcattattcacaataacaaacttaaactcaatgggctcaccccctttgaattccaaattgcacacccaaccactctctgtccacatcagaggcacctccttcttccaagagcccaattcttttgctgaccccaaaataacaacatgctctccaaattcaacttggtgatccaaccgtatatttagcagcactttatcacgccccaattttgatttcttcttagttttctcctctctatttaaataaaaatggaaatcattaactttttcaaaaatacagtaataataaagttatgccaccattttcattagctccaaataactaaaaatacacgatgctcagtggagaccgggtttctctaatacaaccaaatagatcaaatgtactttacgaaacaacacagacaatatgaaagcccatagatcacaatttccctaaaaaatacttgaatcaagatatgcaaaagccatttattcaaattcaatctccaattgtacataaacatgctaagtttaatttcttacacaaacatacacaccactaagagctatgttcggtaacagaaggaaaacggataacttacgtagtttcagtggaagaaacggcagcgacacgaacgactgggggaaaatggcggagatggagtggactagaaactctggttcgggtagagagagcaggaagaagacgagttgtatgagaagaacgattatcagcgaatctgaagtggttctggtgaagaattgagcttcgaaacaaacgcagagaatccattacctacttcagatcaatgcagaggaagagagagagaaattctgagtgagaattccaagaggattggagtgttgttgaagaagaagaagaagttagaagtccaacaatctgccacgtggattcggatttcgaggcaacgaatcaatcaatctactcatcactctctgctactgcgagtgtgagacgttttctttgtttaatacatataactaatggaaaactaatatctattcacataaagaaagatcttgtaagtcagatattttcttccaaacagaaatttctgaaaataaacgtgcctcggttgggtataatatttcttaaaaattctttataaaaaatgaggagcttacttgaagaatggtatgattggacaatagatgcactccaaatgtaaggagcaaatttcgttcttacaaagaacgataatttctggccgtgaaaataaaaaatatgtcaccacatactccaaagagaaaagacaaacaggaaaattatagttgatttttttttaacaaaaatgatcgatcaaaaaattagacctcactctcattacaaaggatttaagtatcgaggataactctacgaaacctgtattgttttggg

SEQ ID NO: 16771 - DNA, 4835 bp, Cannabis sativa
ggagcgagctcacaataatgcgccatatctaaagcttgggcaaaatatgttaatttgcactagaaccgaccattacttttttctagcaaatatttgatttgtactctcatacccttcctattcttccaaaatttcctcatgctaaaagaaaaagtagttgtcaacatcgctataggctgtattttattatttttcttaggactactctctaaaagtatagcaagtaagtattttattatttttcttagggcttagctagagtagagactagtgtataattgtaatcattcatgctttactatcaagtttagacgagtcccaataaaatagtaatatattctagtccaactttaaattacaaaagacaaaccaaaatcatttctccaacttttgtaacccattcaaaacattttctagctattgttttttttttcttcttcttaattgtgagacctcccccctaataatagtaacccatccacgtgaagatttttttatattagtctggaattattggacacgtcattgctctacacatttttgccttagtagtaggttcgctttcctataagctctctcataaggagacaaaaaacaatacacaaatacaaaacgtataacacaaaaggacaacagagtgcgtattgcgcaccacgctgcacttttcagtgtgcgcaacgcggcccccctcggcgtactttagcccattaccgttaaccacaaacccaaaaaaataaaaagttcacaaccaagaaaatcaaaagagctttttcaactttcaagccttaaagctaaaaaaaaaaaaaaaactccatattttctctcactctcgttctctttttctctttctcgctcttagatctcggtttcgtttctcgcttcgatcatttcacttcagggagtcgccatggcgactcgatctctgcttcttttggcggtggtcttagccttcgtcgttgccggagcaggcaatgctgcggggattgcactttcgtcgaagctcattcaccgattctcggacgaggccaaagtgtttagggtttctgggcataggtttgcttcttcttggcctcagagaagtaccgttgagtattatgagaagcttttggccagtgatttccagaggcagaagatgaagctcggttctcaatttcagttcctgtttccttctgaaggtagtcaaacgatgtcgttagggaactacttcggctggtcagtcttctttttctctgctattttagtaaaactactttttttcgtttctttaatatttattatatttgttgactaaactggattatgctcttctattttattgctgtgtcagtggattatttttctgaagtgaaccagagcttggcatttgtcataaatgagcttttgttttggttgttaaaactgccattttttcctctctctctgtagaaataatcgagtgctttttgagttctgatcaaattttttagtgaaggggttgcaagagaaattatgataacataaaaattaacaaacttggaagcagttctctcatgctaacatgatacggttttgaatagttactctaaagagttcttttaattataacacattcgtactgctttcttcacccttgattgggttatttggatttagtgacaaaatgcaggaagaaggaaatttttaatgtaatttcgaaaaagaatattaaaggaatattaaaggttttttttttttatttttttttattttcctttaaagtgaaaaatccaggttcatgatcatatattaattactatgcttttcactatggggtgttctgaaattgcagttgcgtgtttgtaggttgcattacacatggattgatataggaacgccgaatgtctcttttctggttgcattggatgtgggaagtgatctgctttgggttccatgtgactgtgttcagtgtgcaccattatcatccagttactatagtagtttggtaaggaagcgttccctacttgtgttatatctatttatgattgtgataactcgcatgacaatcatttgggtgattagacaaatgttctttttttcagttcttagttagaggatgttcctatttgagataggtgaaaagatgattttatcggggtggttatttgctaagaatcaataactagaccctgtaaataactttgggcaagccactctatagttgttgacgtatatagccaagttaaggtttatgtaagcaatgcggcaaattaattaatagcttttgacaacatatgatttatgcgctgtaggcattgtgttttcactaagaccacttactgagctgttaaattcttagagatgtaaaattttagaatgtaagcgaggaggttttgagacaataacagctgtatataatataatgtatatatatttttgcactttataagcaagcatacggtatatggaattatccaatggggtttctaatatttacaagacaggaggctgaggtaattcctttaacagaatgaagtctatgagaaggtttgaaagtattactagttatgccaagtcttagatggagatgattaatacatgtgaacgtatgttaaacagtgaagtcaagactcatgtgtcaatgcacctttaataactttgggtgcatatgtttcatcaaagtctctctcaagacttggtaacaggtttagcacttatttccagtgattgattggcaggtgctcctccatatttggggcatctattatgcaggatagagacttgaatgagtacactccatctggttcaaacaccagcaagcatttatcatgtagtcaccagttatgtgaattgggtccaaactgcaaaaatcccaagcaaccatgcccttacgtagttaattacggcacagagaatacatcaacttctgggttgcttgttgaggacatcttacatcttgcggcatggaaaaacggcacatcaaacacaaacaattctgttcaggcacctgttattgtcgggtactcatattatcattattattatcctcgtaattttgagcttaatgtaagaaagattgctcgttaaccaacccatcacactgattttggtatttatggatgagttcatttcgtaatagttgattgtatctgctatcattcttcatacatacagttgtggcatgaagcaaagtggcagttacttggatggaattgcccctgatggtctcatgggtttaggactaggagagatttcagttcctagtttccttgccaaagcaggaattgtgaggaattctttctcattgtgctttgatgaaaatgattctggccgaatattctttggtgacctgggacctatcaatcaacattctacatcattccttccttcaccttcaaatggcaactagtacgtactgtttattctttcctctttactctcttagttttattttttgtaagtaaattaacacttgcgagagccgagttttagcattggatgctgaaatgctcccattctttttttgtccagtgacacatacattgttggggtgcaagcattttgtattgggaattcttgtatcaaggaaaccaactttaaagcactggttgatactgggacatcatttacttttcttccagaagatgtgtacgaaaaagtttctttggaggtactttattctgcccttgaacaacatttcaaaaagccataagcatgctctcataactgtcttcctaacagttcgacaagcgagtgaatgctacaaaaactagttttgatgggtatccttggaagtattgctacaaaaccaggtgattatatataatccaaacaactaacaagccctccatgttcttactatcataagctgacattttaatgcgtattatcaagcagctctcaagtgtcagtcaaaattccatcagttacactagtgtttcctgcaaacaacagctttgtggtctatgatcctgtttttccagttaatagcaatgaggtatgttatttatctttgagggttttctatagtgtatacatgtgtttatgtttgtgtttgtgcttgtgttttttcacaagaaaagctgacaaagttcatcaaagctgtaaattggaatccattatacagttatacctacttgtaacttgtttcattgaaattctggatccaacaaaacctgtgggcttaaagaatctagtcttaactgacctgcggttttatttatgcctggggaatgagacctgcaatcacatctaaaatgggaagaattaaagcttgataattgtgattggaaagatgagttgcctttgatgtgaattttgaaaatattgcagaagtaaggcctatttggtattatatgtttgtctgatgtataaacctgttaaatggttggctaaaataattctgtatttaaatctactatctgaaacattgggttagtaaagttacatctaaattattagctttactgacttttaaagcatattacaagtaaaattgtataatatctcttgcttgatatgtttagtattggattttcagatattaatgaaaatatatttgtacctattctctgtgctacagggagttattggattttgtttagccatacaacagggagatgagattggaatactcggacgtaagcatccaacaatgaatttttcaacagtttatattccctgctgtttattatttttattgtatttgagtgatttccttgtgcagagaacttcatgacgggataccgaatggtgtttgatagggaagctttaaagttaggctggtcaagatcaaattgtgagttttccgagtttcagatgcatatgttttgtgtttctatagacagtcactagtagtgtggcttagaagctggttgcat

SEQ ID NO: 16772 - DNA, 3150 bp, Cannabis sativa
  modified_base (3100)..(3124): a, c, t, g, unknown or other
aataatacatactttatttcaaattagaaaattgaaagtttgcatgtttgggatcctgtaaaatttattttcaaaatattacaagtcatttcatacaagccgatctacgtagcgaaattagaattttcatacaatttcatgttggacccaaccctcgtggtttagcttggccgaaacatgtacgattcatctttgaaatcctcaaactcatggttgatccgacactgcttctctatttcttgcacattagagcacccgtgagccaaggcccagtaagatagaatgataatacactacgaataattataacaattacatttcatacattatgcatatacaactgtgccaccgtactgtttatcacattatttcatatataatgatgccactgcatctaatgtctatataacatagattcacgtatcatgctcacacatctcttttacataaaaggccttactagggtttatctcggttttagttaccgagtctaacttggttatgccttgatcgcacaactcttatcatataagcataattcatacattatgctctcatatgggtttttcttgatagtgtttatcaggcctaatccagttatgtcttacacacacaactcttaatataaacatgcatacaattcacttaatacatcctcaaatatagaaacttttgaggtaataacctgactcgtataaccttgttcatttattcacataaaacatatttagggcaataaccctaatttacaatatatatatacttagggtaataaccctaattcacgacatatttacttagggtaataatccaaattcacaattatatacttagggtaataactataattcacatcatatatacttagggtaatgaccctaactcatatttttatctaattaaccacataatataaaattgtgccaccgtgctatactgtgtgtgctcagttcactgtcttacgtgatttccaacgtatgaggagaaatcccaatccacaggtgatcctgatcaagtgtcggtattcctagtcagagtttcacacaatagggttaatcccaaatcacttttcataaatatttacatttaagattccaatattgctcaaaacaaactttctaacgatataaaaaatgtccaaattagagttcgaatcaaaagttatgcctaaaataaaatggcaaaattaaattgtcgatgcatggtcattgcgaccatttatcattccgaccagacctatgctcgccgcaactaaaatgggcaagggttttcccctatttctgggtgaagtctcgccgcaacgaccataggtctagccacagtaagtggacttaaaaacctaaaaatccctattttttaacttagcatcaacataaaaattctattaataccttataccttatataatcaaattatgggctcaaaactgagtaaacacaatcatattatcaacttaaacatacaattcaaaactcacttcaaaaaccaaaactttaaaatcaaaacatgaccatagggcttaaaacaccataacattctttcatgctcaaatatttagttataaccgattctattttagttataaccgatttgagttattgtgtgttagttatttttattcattacacttatagaaccagttatatttcaattataactagattgagttattttgtattatttatttttgtacattatgttatagaatcgattctatttttatttatatctgagacatctacttctggtagtttttccaatgactttgccggtggtggtgacttttccggtgaatttttcagcaacgatgacttttctgatgactttttcggcaaaactcattattacaagttttatcaaatttatttattatttcttttctatattttaaactttaattattttttaattacatatttttttattatttatttatgttatataaaagtaaactctaatacatttttttataattatgaaaaaaacccctaacctaatctgaaaggctactttacattttacaaaacattatatatatataaaaaaaaaaaaaaactaaatgttaaaccaaagtttaattaacaacttttacttcttccaagtttttctttatttaattagtcattttcaaaaaaaaaaaaaatagatgtatgttggtgtcatattctattatatggcataagagaataaaatataaagaaaagattctattgggcaccagtgctcttttatgctataaattataaaaattaaaaaaaaaaaaaaaaattgatattggctaaaatttaaaagtgtgtcaagtggggttcaatgagcaactatttgaccctattaaaccaactccaatgcttataattggctaagtgagtcaagtgggacaaatggagcaaatttttgtttgaccctatttagatgtcctaattaacaactcaaactctacaataaaagtaaatgagaaaccacttaaagaatagaacaaacaaaactcaaacaaaaacacaattacaaagttattgtgagagaagaaagaaagacaatagaagaccatcatccttttacgtacagttcatatataccttgaattaaaaaagaatacacccgcaggtttgtttacctttttcttttttctgttatgaaatttattttctagtacttataaattttaatatttcataaaactcaagtctatttatgataccctttttaatagaatacttcttgattttgccacctgtaactttgtttgggttcttagaaaagagaatgggaaggccattaatgctttggctatttggtgtagacaatttaagcattatactggttttccttctttacgggagttaacacccaatgttattaacactttctagtgttggttttgattttgtataaagtctcctttcttaaaaataaaatatatacattagatttcttcaaataattgttttccattatgtgttattttagacataatcacttaaatactcttctgatcggttattgtaatgggggagtaattcaatcatattggtttttgttataaaggttgccctataaaaaactgctatttttagtggcaattttttagtcacaatataannnnnnnnnnnnnnnnnnnnnnnnntagtcacaacaaaaagttacttgtga

SEQ ID NO: 16773 - DNA, 4733 bp, Cannabis sativa
  modified_base (4470)..(4472): a, c, t, g, unknown or other
gacaacacactatgtacacatggatagtccaacatgatacttaacacctaaaaacagatggaaatgataaattgttaacaaattacaagttttggggggttttccactaaaaaaaatgaattttagagattagttgctagcgaggtaaattttttaggagttttgcctcaatttattcttatatggcccaggtggttttagggttatataatgagcttgtattgtattatattgtattatgttcgattgtattgtattgcattatattatattagtattatttaatacaatattgtgtttgatattgacttatattaataggttgtgtaaagttataatatatttttaataaactcgaccctaacactgactacaggtcaagtcctaggtctagttcgggtcttgggaggtccagtgttcggtcgggtccgacatctgacgtcgggtatgggtccttgatctggtccagggtctgggatctcggtcccaattcgtggttcgagtccctggatctaagtcaaagattggggttgatcccaaatcctccataaatattataatacaagttaatacagaccattttgttatgtattaagtaatacaacttacattatattaaatttttagtcgtaataattaatacaatatattattttattcaaatatagtattatttattatttaatacaatacgattacctaccaaacatactattcatctcttctctgtacatttcttatgttaatgtttaatcatttaatggaatttattttcaaaaagaaaataggaagcattttgtggacttgatggtttaattataaagtatattttatcagggatcaaattgcaaatttacgaggtacaacattacttgcatacagattaagctaaagaggccgaagacgccttcttttctttcccgttttcttccgagagtaaaaaaaagaaaaagaaaaagaaaaagaaagtgaaaaaaagcctccttgtattgtactactagggtttctttgattctgccgtgcccgctttggaaatataatcccaaatacttacaatttcctagggttttactgtcaccaatttctcttccttcaaaccctaaaacctaaaatcaaatcagaaaccagagaacagagatggaagacggaagagaggaagtagggctttcgtcgataaagaagctagcgtcctgtgacaagggtacccgagacaaagctcttaccttcctccttgacacatggcttcccactcacacccttatctctgaagaccttatgaagaagttatggaaggggcttttctactgcgtttggcacgcggacaaggtccccgtccagtcccaactcgccgattccctttctacgttgattcccaagctcgatctttcactctcactccaatacttctccgtgttcttactcaccatgcgccgggaatggagtggaatcgatgtttacaggttagacaagttttatcttttgcttaggagatttctgcataatttctttgttttgttgaaacgtaattcgtgggatttagagctttcgcaacgtctaatgggtgttttggaggagaggactttcttggatgatgataacattcaggggaatggtgttaattaccacattgcttctatttttctcgaggagcttaggccttttctcccgattcggttagaagtgcttgagcttctttataagccttttctttcggttatggcaaagaaacccgacaaggtcttgctggcaaagatcaaatctaatatgtttgatgagttactgaaaatggggaagaattttttggagcttaagaaatccggggaggatgtagattcaggtagtgattcaatgttgcttggttcgatagctttgacgatggaattttcagccaagttctatgaattgggttcttcagccgattgctgccagggaaatagaaaagttctgtttagtttgcacgaggagttttctaagttagagaaagatttggcgtcttcaggaattgatgtttcaattcctgatgttattgagcataatgaagatgaagtgccagatttgattcctattacttccgaggggatggaagtgagtgcttcagaacctattgaggttgcggaggattgcagggtgtctttacggaagtgtgggaaggctaacgatgttggtggcggagataaattgccgaagaagaagaaaaaaaagaacaagaagaacaagaacagtcagagtactgattctgatccagagaagagttctacagttaatggaaataaagacgaggctgaagccaatggtgatgaaattatgagtgacaacctttgcgaaggagatcttgtgcctcttaatgagtctgtaatatcaaacctccagcagcagtttgagaagattgctgctgaagctggcttggaggatgatgtacctatttcctgtgttgtgcctaaaaggtctaagacctctaagaaaagaaaaagagccagagttgtggatgagaagcaatctcaaaattctcttcagactggtgaagaaagtgctaatggtgccataagtgcaaagagtggggagaagaatgcaaagaaggtaaagttttcgatgaaaaataatttgatatggaagcctcataatcctttgcctccacaaagtttgagattgcctccctctgctacaccgagaggaagtgctcttaagaaaggggtacctccaggtcccatcagggaaatcccaacctcagctgcgaagaaggtcaaattgagagcagtttctgtgaaaaaggccaggaagggcatcaagcggttgaagaagaaaaaatctctttctgcttagtggttgtctcattttagtggaaaaaagaatctgctaatgtttgcttgttttaattttttcaagattctctgaaattcttgtccaatttttcttacttacatctccttttggaattgaatcttaaagtatgatttgttgttttttattggtttattcatcgggaaattaatgatgattgcatgaaaaccatacctttaattgacttttctttctcttcataacatgctgtgtagagtatttttgtggtgtttcttataatagaactatgccttttgtttcggttgcttctgctggatgcagcgaacgtcagatggttataataatgttaccaaaatattgttgtggaatggaaaagatctttggtgttgcttataacatattaaacatatgttgaaattgcaatgggagcaggagcagcctagaatgagacattgcattaagcaaaccttactaaatccttataattaaattggatgataatagattagaaggtattgagagctgagatcgtgatgttagttgctagaggttagggaaactccacctattcacatctatttactcccaaagaccttttaactaccgagaaagtcttcatttcagttaggtggcctttcatttgatgaagcaaatgggatagaatagaaaataattaatttttctttttttttttatttgttgcattttaaagtattgtaatatcattctaatggaattgtttttttttttttattattatttttgtgtaatgattattttattttcaaatgaaaagtgtaggcattccagtgtaaaatgaggaaaaaaagttattattgttattattattttctttatgtattttaaattttattttatttttattccaatttttatttctatttatgtattttattcaaaaaaaattattattttttatgtgtcctaaatttaattttattcctattcttattcaaatttgtatttttatttagggaaaattgaagtataagtcctcaaaaattgactttgatgcaaataagttccgaacctcaaaaattagtagtaatggtcctcaagattatgttttttttagctgctatgtttactaatttaaaatcgtcacatgttgaatattattagtacatgtcacaatttcaaaaacccaaataagctactaagaatctttaaaattgttattatttttttttctttttcattttcttcttctttaggatacattctaaccctagccacgtcctcagtcaatcgccgccacaaccaatcgctaccaccaaaatctttaatgccacctacaaagcccctttacaatgcccttagccttgaaaccttgattcaagcgtggatgaactacggtcatcacccttcttcttcacaaagacacaccccacctgcttaaaaaaagtacccaaacccgaaaaaagaaaaaaacaaaagaagtatatctccccatctgcataaaaaaaatacacaaacctaaatttctcttacgattccctcgcctcaccctccatcatcatctgcatcaaacttttgtaaaatcgcacataaaatccataccacaccacagtgacgaagccagaaatttggcttagtgagggcttgaataaatattaagtcaaaactaataaaaataactgataaaagtannntttcaaattttcatcttcaacaaaataaaataaaacattgtcataaaaaaataaaatgaaaattacaatctgcctcgacgacttttcatgttttgaaatcgctgcatgatgacttcattgtcaagactattgaagatgtctttctcaatgtacacaagtaaacaatcattcataaattgatctcccattcgattgcgcaatctacttttcaaaataatcatagaagaaaacaccctatccactgtagcagtaacaacaggt

SEQ ID NO: 16774 - DNA, 5140 bp, Cannabis sativa
aaaaccaccttagaaactcaaacccaaaatttgaaaaaaaaaattaaaaaaataatacatggggtaatttctaaaaaaaaatatttattatatattttatatgatgcaataataaaaaagacctctatttattaccaaattatatagattattataattattcaaatttattattattttataagttttatcatttattttcatattttaaaacaaatatccatgatatttattaaaaatatctctgatatttctatgagtttattgtaatgatatttctaccttgccaatatatgataaagaaacaacattatgaattaatctaacgtacaagataagtcattatgtgttgattgtattttcaattgaaaaaaatgctctctcccttcactatacacaattatcccaccttaagcaaacaacaatatctggaatgcaacaccccatataattacattctaattttttatgcataaaatacaaggaagaagctagtacaaaaataaagtgagcaaaataaatacctccctcgtatctcgacacatcctatactgttggaagtaatgttaaacagcaaaatcttcgccaagatcacaccttccccattgcagacatattcagatcgcagcttcttcgcagattgtaacccgaacatctacaatcacatgactccaactactcttttcaacaaaacattgaaagagcgcgtattttttcaacgtgtatcactctgtaaatgccttctcaacttgaacttttaaaactgtcttctatgtctacaatgaaacatgcttaggcatgtttggctaatatagacatggaatataaatggatttcaaaacaaggaactccagacagctccatccccttcaccacacttatcatgaacatatttaattttctccacggatttgcagatcccactacagctccaatcaaatgatgcaacacagacattgcctgcctgtgccttccactcacaatctgcaatgcatttaagtaaaaggaaatcccagccacaaccaattcaaattattgtacaaggcttaggtgtgagcactcattatttgatgtcatcatagaatatgatggcataaaaactttctagatcttgagcatttcgtattatgttgaaaaattaaagtaaatgaaagatgcatggagaaactattcaaaaaaaagaaaaaaaatggtagaagcaccagatatgctccatgattgtcttttagactcacaatatttgacatttttgctaggtatggcactactagacattcataatcaatcttacttctaaaaatagtacctggtggagtaccacaacacatattacggtcatcgatgtgctcagcttcaagaccaatgaaccatgcaccaagcgatacatcttcattggcgtacttatgcaatataggtctgtagtcaaaaacaacatctgagaactttgaccatgaaatttcaaagagtgaccacatgaaatatgtcaacaatttataaagttgatttttatgtagctatagccagatttctcgctctcaaccacttgtcaaattataatttacagaatacagtttgattagttctaataatttaattataatttataagaatatataatttatatcacactaaaataaaagataagttagttttcagaatattgcatcctgacactagaaaaataatccagaatctttcatcatccaagaataagaaccctaaccacataatagaacaaaaatatagcttactggttgatggaaatatatgtagctagatctttggagattgcatagatctgcccggtagcatgtcgaaagtatttgttcccttcttctccaaatttccagtattctggttcatggtattttacacttctagaaaataagagtttaaaaaagatcagtactgataaatgtattgatgaacaaactaaattcaaatgatagcttcaagggattcttacttttgagaaagaacaggtccagacttcatacaaccaatgtagactcttggctttgaccggtgtcgggctagagtagtagctagcatacctacacaaaaaagatatgtaaaatactcaagcttggtaataggattgaaattgtgtaaacaattatatagaaattataagtatcaaaagagtctgcatacctaaattgatgtgaacatcatcatcgaccttaacatagaaatcagcgtcccattttgcaactgcagtagagaagtaaatttttgtcttggcagataattcatgatatccttcaacatgttcctttaaaataatgcaatatcaataccacattcatttcctatccattttcactttcacacataaagagctttatttcttaccagtctaagaaaatctttatgttgagcatcttctgaatcaatggctctgtctaaaatgctattggatgttgcactgagtgaataagcaaataggatctcaggtcagtttcaaaaggaaggacaataacactataataattggttttcatcaacattcataaatgtataaaatgcataataacacatcagatcatcaaatttatagtacatcttttatacacgcgtcatttcaagctgtgttagtgtcccaacatcatttaaattttaggattgatatttcaaaagttgcaacgacaaaaatttatttcggtgcaacataaacatctgataagaaaacacataatggaaaaccaaaagatttatcgaactatttcttagccacataatctttagttatgtaagtataaatagaatttacctctgcataagtagagagttgaaggatatatagttaacgaacatatagttagtctctacatggaaaaaaaagaatgtctgtcctaattactccatgttgtgtacataagtaatacatatgatttataagctaattgattttctagatagcgaactattggtacacatcaaaagagcaagcagtagaggagtgtaaaagcaaatttgttttacattctagtatggaaattgagttataagagaagatgtagtgaaaaagaatgacaacacaatagattacagatgaaaaatggtacaatattggtatgatcccacagatagtggaatgaatgaagaaaagtttgcccaagaaaaggtacataaaagtaatccattataaactcattaccaatggacatggcaaaaaaactattttataagaatccagtgtctaaagtctgattaatacaaacaagtagtttattcatcaatctaataaacttgtaagagaataaccatagaactgatttacctgtggccaattgtgaagcgaataacaatacccttttcgtgctctaattgcagaagtttttcccctgaataagaaaagaaagcatgaaaattcagccaaaagaccattacaactttaaaatcaaaagacaaattggaaataaaaaataaaataagtacaataccttgaggcatccatgtctctctaactgaatcacgacgcttcctactgctaaaagcagtattgattccaattactataaacattttcttcctcggagtttcttcatgagacaatgtaggtttggtattagaaccctcagacaaacccatctccatattactccgagtggcagccaattccatctgaatcattgccatttgcttgtctagagatctggaacgattccacattcagaatcagccataaaaagaacaaataaaagaacacattttgatgaattgtattgaaagtagaccagatagctcaagttttaactcactgaattgatttatgggtcttgtaaatttcattcatcacatctttttcttgtacaggcttctgattcaaatcatcaaaaacttcaaatattcaatgaaaacatgaaaattcacacacaagatatatatatatatatatgtgtatatatataaatgaaaattcataactaccttcttggttgcacaatcctcggcgatgacttgaagctcttgctcatggcgatgagtcgagatgagttgattgttggactcaggtggcgtccacattctagaagaactatccaaaatcagagcctcatcatttaatattcaaaattataaattataattttatatgaaaccataacaaaatgaatgaaatcaagtcaaacaaacgaaaaacttcattgaagtaagaaaaacaaacctaatagtgatgagaacgcctatgaagaaggaagacataaaaaccaatggaatccatttggcggagatcctcccggagctccgacccttcatttgagagaagaaagaaagaagcactaaaataaactaaaaagtcctttaactgaatttgaatttaaatttaaatttaaattattatttataataaataaaaaatggaaagagaatgcattgaaatcgacatatgatttgtggtttcatttacatttttcttcacttttgtatttaataattgtttaaaaataaattataaaaggagtgttaagaaattattatgttttatatatgagagacttttaattaaatgtattggtctagacaatagtcacgccacttcttatgtttcatgtcttttctgtaaagaagaaaaaaaagaaagagaaaacagaaataaaacttattgacttttctagtcaaaattaggagggttctaactgtattattagtaaaaaagatttggaaataattattattagtaaaatttcgtagcttaatgttaaatccacaacacaataggaaggagagttggacaacaatcctatcaatgtgccctcacaattcacaaaccaactattttccttcacatctattgggaaatagtaaaaacaatttgggattttctattgaaagtttatcaaattagatgaataaatttacaccaccaaatatatagcaatataaacatactcttttcttttaaatggatataaatattttaaatatatatgtgctacttaatagttacatcaaatatgtaactgttaactcagaatttggttaactaacagaaccttatttattactcacaatcatcacgtataaataagaatgataaataatataaatgataattttatttgatgattagttataattattaaataaatagttttggcatttatagaattgaataagaaaatatggtattattgaa

SEQ ID NO: 16775 - DNA, 8494 bp, Cannabis sativa
gaagaaaatcctcttctggttgcgtaactttgttacctttgttattttaacctgtatcggtttcctttcaaaaaaaaatatctctatttattccgtaaatacaatcgttaaataaatacttgtttatttatttatatttttctatcaaaaggttaatttatttttaaaaaataattcaatatatatacataaaatgttattttacaatttaaaagacaattgtgttcaatagcatatttgtaaaattggttgaaaaaataattgtagtcacgcgaacttgaatataataagatttggttttgaatattgtgtttacgcttttttttcagttaattaattataatattgtcgaaaaagtttaaatttgagacgatattcaagttgaaaaaactactaattaagatttcactagcttgcacatcaagtggtaagtttgaatttatgtttaatttcgatgatatatgccaaagggattataataatcagtcttaagtatttcgggcataactcttacctcagaagtctgaactcgggattcacctctatacagtgacagacacacttatagaattgtgggggctatagcccccagtaaaataaaaaattgtatgcaaaaaattaaatatttttcttctcatttgataattatagcacaaaaaattgaaaaaaattccgacaaaaataaataaataaaataaaataaacctaatttttttaataacaattaaacccccacataatgacaatgctgagtccgtcattgcctctatataagtcattttggctaaaaagatagtttttatttacatattttcaaattatatttacaaaaattaagtaatatttttctaattaattattttaccataaaaaatatcgtataaagtataattttttgaaaaataaaaatttaaatagccgcacaaagagcggctgagttttctaattataaaataatatagtcccgtttatttactcaagctccctaaaacatgttaaataaattctacactacaattgtctcttcttttttgaaattgtccttgaaatttaccaaaaagatttgggataccgatcttatatgtctaactctaactcttgagtcatttcctcaatcttgttgtttttcaatagtacttaactaagaaaattgacttattctataagactttcttctcctgatctaaaaatctgaacaagttgttcttcacaagtcaaattcagttgaaattctgaagtttcatagcttagtacacgtgttgaatctgatatgtactttttgagcattaacacatgaagtacattacgaactccagacaacaatgctagatgcaatgccactttataagctacctaacctaaccattcctttccaggatttcaaatggaccaccgaatcaatagttcaacttctctttctttccaatttttttcacttctttcattaatgaaactgggagaaagacataatcaccaacttgaaattctatattactatgttttgaagctaacatacgaattctaatcttatatggcctcagtagtcttctaaactactttagggataaaattacaactatcttcccgagattataacaatggtcttctccaaaattccctggcttaattagatgatcatgttattatgaaaagggtatttttgaaataagacaacatattttagatataataaagatagggtttttttttttaagaaaaagtatggcatcacttcaattttccctttataaattcaaaatactattgatggtacataaattatgtttataatatacaaggaaccaaataaaacaaagttaaagaatactcattccttaactgttgaaaatgagtcgtactaactttactaacattaataaagcaaaacaaaagtttagcattccatctcatagctcatatatgtacctaagagagcagaaaataattccttgtaaattgtaatgattcagattgagagtattgctggtgtcaaacaccctgtgggacattatttgactaattttttataccaaacttaacataaatcatgtatctggagataatttcaacaaaatcaccacatgcgaattttctttcaaagcaaaagcaccactgttactataatggtcacacttcacagccaaacgccaagtaaagaaattgaagacaaatgtacaagataagataatggcaactgaagatcaagtacagtaaataggcaagtagcctagaaaggtaggaatccaatactgggtttcaaagcttccaataaatgccaaggctatgtaatattcctgagacaaccccccaaaacaggatctctgcaaatataacataaagtagaatcccaactctccttgaatgccaaactccaatgaatatgtgcttttggatccagtatatctgcaatgagttagtacaacccatctataagtatttatgtatacttacagataatcactaagataatactaagaattgaaaagagaaataacaagaagcttctttcttctcatttgtgaaaccaatgaagcagaaaaccggtttaggataattcaaatgcaacttaggaaaaagaaatgggctagaacgaggaaggacatgagaacgtactagcgtattatgggggtcatcataataccacccattgatgaagccagcaaaaattccttctgctgccataacatagacaagcatagcattcatgccaatccactccagtggcaaaaataggtacctaaaattccagatatcaacctagtttggcagtatagttaacagattaggaaaattcgatgagcctacacaaaaacagaaaatgacaaccagactaagtgatagaactttactgcaatatagaaggccgagaaaaccagcgctgctgctccagatgttatggaaacataactaagcgtgtacaattgtttatttaaaggaattgctgcagagggaacaagatttagaaagaagagataacatgtaaatacaacagaagctgcaaatcttcaccatcaatgcgcaccatgagtgaaatgaagaataagtcctgaaattagaagagcaaaacccatcatggcccaattcttcagtctttctgaatggccctgtggttgggaatatgggtaaaaaataatgatgaattatgaggtatattgagcaacttctgatgattagctaggttataagaatataattatgaacctgaccttcaaatgtacaagaacgtgcccaaaatgcactccaataatagtggaaagaatagcagatatagagctgcatgccaaagtaaatgttataaattgttactagatgacttcttaaaattgcaaccttgttaaaaacaagtggccacggcaactgcaatttctgtataatgaattgggaaatcagagggtgctgcttcattctataggggttaaaaagggtagatgtaacttagcatcatagtcctttgtcaatattttcccaattcatatttccaagttcggtcggtgtggaatggaaataacagttaacaacccgcttttgagatagactcccgcaatacttaggcaaaagaaaactaaaagattaaaattagcacacaaaataacccttgcttttgaaagcgttgatgttaagcacaaaagtgtcaaacatggaagaccttcaaaccagggagttctcacaaataactgtcatagaacacttcactgaaatgcatgtcatatagtcaaagaataccaaaccaatccaaaccttataatgccttcaggttcaaaaggagcatagcaccatgctggagcatctctccgaaaaggcccctcatatggagagttttcagtgcaagcctataaaattagttagaaaggtttggaactgtgaaaattctatcactctaacttgtgatcctgaattcttaaaacaaggattgtgaaagacaatagctacatacaatagatcttttccaagctggatgatgatacatatgattgattcccaagacttttctgtcaatgtatcctactgcgttacaaggtggatccaattttcctcggacattgcaagttacctaaactcaacatagagtacaggtatgtcaaaaatccaaaaatatgcatgatttgtttgtagtttacacttaaaaactagacttggagttaagggctcacagggaaactttttccataattgacattatctttatcgtgaatggtgaaatgccaatcaggaacatatgtcccgtaaattatagccaagtacactacaattacacctgctcccagaatcctggaaaatcataaaaggcaataatgtaagatttgttgtacacagaaaaaatcaatcaagaagaataaacaaagtcacataccaatgccatgcatataacttgaatatagagaaccatctagaggaaagctcctcggcttgtgattttcttgtaaatatttccacgagtgccacaacaagatatgaaagagctattctctaaggtgaaaaattaattaatccatcatttgatgccatgggaaactgagttttgtaaacacaataatatgtaagaaacattacctggagaattccacaccaccttatctctttcatgtcaacaccataggttaacttgtccggcgcatgtgagaaacctccttcatgtcatagtaatatgtaatgaaagtgaggtctaaccatgccagctgttttcgacactccattgtcatgtcaaagaagacaaatatgcagctaaagttgttttaacaataacaagatgctacagaacctaatgatttcccctttgagttgtccttgatttgaaagttgaaaggtataccatctatgacttctttcccttaattctcattgatctaaacaagaagcaaatgaaaaactaaccttgcaacagaagaccccaaaataggagcttcagagttctgagaatcactcttcttattgctggaaattggtcaggtattctctataaagaaaataccaaggagaaagagaaaaattacacgaacaagtagctatatcaaattatcattaacattctctccatccaataacataagaatatgtattatataaccaaccttgagagaaagggcgatagccattcccacaatgaacaaaaagaagggcattacaaagtcagcaagattacaaccattccacggtgcatgcccaatcatgggccattctccgccagcatcatccacaaatatcatcagctagaatatgcatgtgaacaaaattatacaaatttaaattcttagacatcactaagcaccaaagtttaatcctaaaattggttagctacaagtcaacaagaatttaagccaactccattaaaaaccatcacttacaagtcaaacaaaaatcctaaaagcacctctactgtctgtctactatccaacttgccactaattcagtttcacacacctaaaaataaataaatctataaacaccaacaactaattgaattaccgccacggtaaggccacggaagatgtccaaagaagccaggcgctttgatttaggaagcttttggtcggagatatcaggctccggtaccaaaagactgtgctggtgactagtctccggtttgatttcagtcattggtaatggtagccccccaatttcagctgtgaccagcttattttcttagctaagttcttctgttttttgtgtagcaacaaaggaaaagatacaccaatattctgattcttctgataaagcagttgttggggcccgcataacagcccattcaacaaacgtatggataagacactatgtgccgaataaaattatggctagtaatatcaaagtaaagaagaaagagatgttaaatggagtaagatgggcaatgagggtgagaggaatgcatccacacgcaactatgttcgtcaacatcataaaaaaggagggttttttaaggaacccatttttcacagattaaaaataggttgagaatgtgcaattataaaatcactgtagaataagtttggtcagctaagaaccatttctctaatttatcaccagatggatgcgcttctacaaaagtcatttttaactccaaagcttgctcaagttttaaagaacaaacttagaagaacatggctaatggagcacatcattgtctgatttggctaagttgcatcattccaaacagtacaggtaaaacactttttttttttttcagttaatgaagaaaaaccattttcaagtactggtgccataagcaatataattaattaaaaagagagaacccgtttgggatttcacaaaatcaaatacagcccgaaactcatccggttagcttaacatctgaaaatgtccgaaagtatggattggataaaagaatgaaaccagtaaagaaaggctttccacattttcagtgtcaataataataataataataataataaagcttcatcaaaagggtgattcctttcattgttctttggttttctcggtaaccaaatggaacaaagctgaacgattaaaattatcctaaaaaaaacctcaactatcctcacagttgcggcagaggaacaaactcagtaactttatactcaaaaattcaatacctaaattccaggtcaaaaaagaaaattcaatacctaaattacagttagtagaataaaatagtacatataatttaaattttaatagctcgaagtgaaacatcaatccgttgtcgtccagcggttaggatatctggctttcacccaggagacccgggttcgattcccggcaacggaatattttgtcaaatttttattgatctactaaattttttaacagatattagaatatatataatttcttataaagaggttcacaattccgttgtcgtccagcggttaggatatctggctttcacccaggagacccgggttcgattcccggcaacggaactttttgtcaaatgtaattgatatactaaattttttaacaaataatagaatatataaattttcttatataaaagtacacaattccgttgtcgtccagcggttaggatatctggctttcacccaggagacccgggttcgattcccggcaacggaattttttgttaattttttttcaacaatcattgtcgtttggtgctcctacgacaaataaagtcaaccattcaataattatcacttatcagccatcttttaaagaaaatctaaactttgattgaaaaggaaagggcaaccgatattttaagccacctttgtttatattatataatacaatacaaactacaaactcccacaatatcctctcttttccacaccacaatttgttttcccaaaatattaaaaacagaatcagtctcactgctttgctatacacaacatgaaatttgacaatacattacaaatgaaccaaaactgaggatcagaaacttttgacttcaagatgactgtttgtgacgccaaagagagaaaaagcaatcaatggtattgctaataaccattcaataatcaagataagaccgagccaatggaagaacttgctgtattagtagaatttccatttgagtaagcagcagctcatgatgcacaatgttcactttccgatgccaagttctttactaatgtctcttgtcaagctaaactgcatggtgttatgccacggaaagagtgtgcgtgtaactggaagctttcttcgaaggtcctgcaaaacaactttccatttcaaaacacttgatgtaatgcacaaatttgccttccacaaaactctcactaaaacaatacacttttccccagatattagaagagccagatgtaaactaacagaatataataattgttagtagccctgaaaaagagaatttagttcagaaaggtgagccatgttaagatatcaaacattatagttttctgtgttaatagcacttaataaatgggctcaaacaaagaggaatgtgaagtaaacagatcaagtattaattccgaaaattaaaattttcaataggcaacaatgagccttgcagaccttgaaagtggtatctggcaagtttgaataggatgcctgcaaaatcccaaatgtaatatgtgttagcaagagactctaaagaacaaagaatttaacagagaacaagcttggtatgaacctcaagagaagccaagtactctgtctcatggtgacgaatgatgctggctaagctaattgcacaatcttctgcacactgaaacaatgatgaagcatattaaccatgcagaatggctaaaagacatctacttgtaaccaattaggacatgtttgtttgcaaatatgatgcacaattagccaacctgggcaatggtggaatcctggcattcatgtttggcatctagctgaacatttccctcctcaaaataatgagcacccaccttacagcaaaaaaatattgactaagatgaaaagaacaaaggcaaatagatggaaaagagaacaaatttatcaaaaaattacataaaaaactcaaatatccgtaatttagagcaatcacttgttaggaaatacctgcaacttgcca

SEQ ID NO: 16776 - DNA, 20955 bp, Cannabis sativa
  modified_base (20915)..(20930): a, c, t, g, unknown or other
cttttacatttaatctatgtgggaaaattttctccgatagtattaatctatatatgtactatatagattttagaaactttcatatctattatctacagcttttgtgtacccgataaaaatatagagagcgagtttcaatattattagtttgcgtgcaattttttcagatcgatggtatatatgtactttggtcaaacatgtatacatatttatatattattaagatttgcatgtcattgcatttagttgaataaagtagaaggcgtttacaatagtttatatgtgtagagagttagttattgaatatatatataataataaattaacgagtgtgtggcaaaagaatttgggaagatcagaggagaattaggtggggaaaaagcttaaagctacaaacacggagccacaagaatttaaacaaacgacaattcttcaacatatgcaaacaaatatacaactgtctcattctagcagcttaaatctatagtaattaatcctatatttctatagttttcacttttaagagacatgtaattcctcttgttgaataactcttcttttatctcttatttttaaattagaactattatgtcttgtgtttacaaatgccccttaaagtttggtattctatgtacccaatcgagaaaaactatacattattttgggtacttgcaagttgtgaaatgagacatataataaaataacccagtataaatggaatttcgctataatatatatactaatagttaaaaactacattcttttgtggcacaaataactatatatagtgtgtttgatcgttatgcatatcaagatcgaacttgatacaaaacgacaaatcctaaattctcttctccgcaaccgaaggaagcatgcatcccatcttttcttaaaaaaaatattatatataattagaagttgcataggatcaattctagctttaattaattaaataataatgactttagaaagtttgattaattaatcaaagcctatactagaatcgcctctctctacaagtccacacaaaagcatagagaaatgttaaaggacattattagtgtctagcacctaattacgtgttaatattgctattagtgtaattaagtatcgagtcttatataatttaatataataatttttatgaagtagctaagcaccatttatgccgaagagaaatgctaaaaaatactagtggtgtttaattaatatttttttactggtccaattaattataatatctcatataatttaatataataatttttaaagattattcttagctataattataattaaagcaacttactgaacactactgtgcccaatatcctctttatatatagcttgtaaattttgatatggacgacccttattcactttatatagtaggcaagtgaggcaactggccattcttccttaaatctttgtcattctcactcctcttgaatatattcttctgatattctctcttgtgcacaaaaagagagactatagctaactagttcttatataaactctcagcttgagcaattaattataatctatacacataccacacacaccaattagataaaccatgtcgattattatctcttgttttttcatctttcttttgtgtctctccaaccaaagttcttgtaaggctcgccatgttattgaggctcaccagaaggtatttataatcattatgtattattatatataatatagaaaaaatgatattatttttgtcaaataatgatttgtatatatatatatatatatatgatcagggtagtgtggaaaaggttgatgaattaatggagatgactaaagggccatcaggatcagtagaggtgaccaataataagggagaaaatcattatattatgacttctgatgatgataatgaggaggctgctggttcaaccaccactaccacccctactactactaccgatcaaggaaagatgatgatgagtagtatgaattggataaaggagaagcttcaaaagcatattataagaggaaaaatttcaggtggtgttctcaaaaaacacagtgctcttgttgtttatgtttcgtggcgtgtaccatccaagaaccaagccaaaaaaaaccatagcgatagaaatcattctggctttttctctgattattctcgaccaagaacacgtcctccatctcataattaattatatatattcttgctcttattaattataaatcttgttacttaatttattatcctttttcctctttattaatatataaatattaaccatctgctatttatatacataactaaattaaaaggacttgatgatatatatcatgatgagccttagattgtttttactttgggcattataatattgctatatagctctctgtaaattagttaagtactataatcgtgagatactattttggttcctagctatattaattatatatcatgtatattagcaaagttgtgtattttttattgataaggaccgggcatgcaggaaaaaagatatttgagtctttatgcatatgtgacgtgggtttgttaaaggcaacacaaataaaggtaatgtatagtatatatctatgtaccatattatatattattgcgcttttgttttttcttttaatttacttgtacatatatatttatatataaatggactactggtatatatatatatcactttcattcatcatacatatgtctatcggatacagacgtatgaagccattaaaaataagtatattgtttgagttagtaaggtatgtaattcacttagtctacgtaggtacgttacttatatgcgtatactagaacgcagtaccaaaagaaataataacaacaaaatgtaatccatttatatatgtatgccaataaaagatgtagctagagtaaattaacaaaataatgaattatatagctagttctgtttgtgaacatttatatatataaacaaaataaaacaaaaggaaactattaatagctatatatatctagatatatataggtgtaacttgttttattgtgtgtaggaaccgagaaggagacttattaagagaaggctatctcttaaagaagaagtagataatttcaacaccactagtaaagtagaagaccatcatcatcatgttgtagtcaaagattatgagccaccccatggaacaccccctattcataataaacagactaacatacaaaactagtttttctattttaaggcttaatttacagtactagaaaaataaataaagagatattatagcgtctcatgctatatatatatatgtatacatcgttttagatccaagttcattttcagctatatatgctgatcatatataacttgggaaaatgattgtctttttatgttttattgcttatatatatgttagctttgtttatactaataagaacatcaatcttagcactataatagttgaaagataattttgaatattgtatatatttgtatatactatacattaatatatacactgatcaagaaaaccagaatagagcaaaagaaagaagaaagggataatgaactgaatggaaagtggaaagtattgtgattgctcaactgaaaactgttgagccagactttgtatttatagagatctttgtacaaacaattacaaatgagtgagctaaccaaactgacaataacaaactcaactaacttaactaaaagaagctaactgaattaactgacatattacacttatcttcagcttctaatattccaatatatactaataattataatctcatatcattcaaaaagtacatccttactatatatatcgatatatatatatatatttatacatagccggttttcattgatcacgatccatataacttttatttgttatatgccaatggtgtaacgattgttgagattatactcaaaaacatatttgacatatatattatacactgatctaaaacactactatttattctaggactttatacatataaatgtgtatgcatgtacataatttatatgtgaaatattctactagatatataaacaatatatatcagtatcacacaagtgcaagagaagatcccttgaaatacttcatcatacgtacgtgtcccagtgtttaccaatattttttaagaatgcatggtttcatatatgtatatatattattatataaataagtttaagtgctaaatatataactgcaaaccagtaaaataaaatgacacgcacatcgtttttttatttatatatacacataaatatatgttaatatatatatattgttcaggaactattgttaattaagcacgtatgtccgctaagattaagagtttcataagtctaattaattataatagaaactgcaaaataataataataatttcatcggggatttggatccgatttttattccacaaactctccaattgtgtcattaaaagatgcaaattcattcatgtattataaataacgtacggttggaaactaaagctaaatttagtaagttatcattttgagtacatgttacaacctatcaaaaaacccattctttctcaacatcattggtttttaacaacctattcttctttcgatcttaggactaataatggaaaaactaaagacaaaacatgcaaaacaaagacaaccattcatacaaaactaaaaaagataaataaataaaacatcacaattttttctcctctctttcttgcctggtctggtctcttgatccaggtaaggctctgtaaatgaaagttcaagttgctttgagtggtaagctagagagaacttagttatcatatcccccataataaaagatcatataacgtatagaaaaagaagccaaaaagccaaattgatattggggcgtacaggaagactttctcaaggatacacctttcatttctatctttaccagagcatttcgttttcctgtacgccattttcatggtcgacctttgtttatgtcttccttcattccgtttaaccatgaatatcaaaacccacaaattgtctttccttgttttcctttatgttctcctcaactccttccatggctccatctctgagtcagattcattgatattgggatgtggcactgaaaatgcagccaaagatgcagatgggaggaactgggagcctgatactaaattcatcaatggagaaaactcagtttccgttagagcacagtaccaagacccttctcttctttctgaaactccatacatgacagcaagaatcttcacctccaaggtaacttataagttccctatcaaaccccaaaaaaggtattggcttagactccatttttacccttcagtttacggtagcaacaatgccgaggagtcttatttcaatgtcattgcgaatgatttaactctactgaaaaacttcagcgcttctctcacgtgtaagtctcttacacaagcttatataatgagagaatacacattggctccatctgcctctgattttctgagtctcacctttgagccagctgttggttttgcttttgtgaatggtattgagctaattatggtacctgaattgttcgacactgtttcagtcatgggattttcagaccagaccttagatgccaagaccacaaatatgcagactatgtatagattgaatgttggtggtcaatatatttctccaaccaatgactctggtttaaccaggacatggtatgatgattacccttatttgtatggagctcaatctggggtgtcaattgaggctagcccaaatgtaaagattaattataaagaagtacctacctttgcagccccaactgatgtttacaggacagctagatcaatgggaggcacaaaagaaatgaacttgaattacaatctcacttgggttttccagcaaattgatccaaactatatgtaccttgtgagattacatttttgtgattttaaatactccaaacctaatgagattgttttcaatatctttctcaacaataaaacagctcaatctggagctgatgttgttggttggtctggaggaaaggctgtgcctacttataaagattatgttgtgtatgttactgatggaaagggagatgaggagctttgggtagctgtgaaccctgcaactgaaacaaagcctgaatactatgatgcaatagttaatggcattgagatattcaagatggaagctaagaaaaacttggctggtccgaacccaaagccttctgagatgttggctaagaatgagcaacaacaaaaggcctttcaaagtaagacaaatcatgcccaagtcattggtggagctgctggaggagctgcagccgttggtataatggctgcattgtgcattgcagtttaccaaaggaagaagaggtatactggtacagattcacacacttcaagttggcttcctatatatggaaactcccatactactgccagcaaatcagcaatctctggcaagagcactgccagtagccacctctcagctactgctcaaggtcgttgcaggcgtttctcttttatggaaatgaagaaggccaccaagagttttgatgaggctaatgtcattggtgttggagggtttggaaaggtctacaagggaattatagatgcagggaccaaagttgccattaagagatcaaacccatcttcagaacaaggagttcatgaatttcagaccgaaattgagatgctttcagagttaagacacaagcatttggtctctctaattggcttctgtgaggaagataatgaaatgtgcttagtttatgactacatggctcttggcacacttagggaacatctgtacaagggtaataaacctcacctttcatggaagcgtaggcttgaactttgcattggagcagcaaaaggtcttcactatcttcacacaggagccaaatggactatcattcatagggatgtcaaaacaacaaacattctcttggatgagcattgggttgctaaggtttctgattttggcctctccaaaactggaccagatatgagcactggccatgttagcacggtggtaaagggaagctttggatacttggatcctgaatattttcgaagacaacaactgactgaaaagtcagatgtttactcatttggggttgtcctgtttgaggtgttatgtgcaagaccagctttgaatccaagcttaccaaaggaacaagttagtcttgctgattgggctctacactgccaaaagaaagggactctggaagacattgttgatcctactttgaagggaaaaatccaccctgaaagtatgaagaaatttgcagatacagctgagaagtgcttgtctgaccatggaatggaccgtcccactttaaatgacatactgtggaacctcgagtttgcccttcaattgcaagaaaatatggacggttcaagccattcttcaaagcgtggcggcgagaccagctctgaggatggtagtctaagacatcagaatatggcaatgcattatagcaacttgagccttggaagtgacagcgagctaggaagtgatgacacttctgggcaaaattctactgcagtcttttctcagattgttaatccaagaggacgatagagtatgttgttgatggtgattgctatgctactaaagaaggatccaaagaaaataaaaaaaaaaaatcagatgcatagattacctgctcgttgtttgcaatatttcttttgattttcttccttttttttttcttcatttttttggtattttgtcatttatttcattttagcatcatctattggataggataaacataaatagcactacaaattcatgtttattctgcctggtgtttctaaatgataaaactaatatttatatatatatgtatgccaactagggttgaaaacgggtcgaaacttggttataacaggttcacatgttacaacttgagtctcacaggtacgagttttcatggggcaagtctaacgggtacgggtttcgatttttgctttttttttgtaccaattgtcgagtgagtgtatggatctggtcattgcaaaccataaatctgatggtagttacacactaatatatatcttacttattatataatatttcttacattttgacaggatttgttgtgtatattaacataatatactttttttataatataaattaacattaaaactaacagatccatttgaaaaaataactacaaccagaattttatatcacactttgttatatatttaatctatcgtatatatatgtgagtgaagtattcactgtctctcttctccaaaagattacaatacaccaattcttcctctgattcaacatccggggacctgaaaaactcaggcagtgtataatgcaccaatttagagaccgacaatagcaacaaaagaagatcggcaccaaaaacacacagaagctccacttataacagtaaacgaaaacataagctcaaagcaccgatcaacccgcacacacagatttcaatcaataactaagccaacttagatcgtccttgttaacaccaatcataagaaacataggtacatttatatatataatgctatacatacatatatataaaaattagaaaaaaaatacactgaatatgtgcattttcaatttaatcttaaaaaataaacatctatataaaaaaataaatttcataccaaaactatatcatctttcattctttcataatgaaatgttgttaattaaatatagattgagactatgaagtttcacaactaaaatacaaatataaactgaaaatgaaacattatgatatttttaattttagacatatacactcgaaatgaaaaaaattactgaataatatgaatctaaaaccggttactacaaattatctgttaaacataaataaagataaatgattattggaaaccagtttctcaaatatatagtgaagaaaacacatataatttgaaaaaataataataataaaaagaaatcggtttcttaatacattatatttttttaactatttgttttcaaatattatacatgaatggactcaataatgtgtgtggtgaaatgtggagggcaatggaaagataatacaaagtatgaagactacataatgactggactactaataccagtaaattgtgatctaaaaagtttgttggaattagtaaagaatgaaattaaatgcaacacaacaatagaaatgcattacaagttatgcccaaactcacccccaataaaaataataagtgactactcactgttgttctacttggaactgataaaagacacataatgcagttagtgagtctccactctgcatcacaactgtagaggagacaagattctagatcgttgctcaacaaaaatcagaaagttaagctgtaagacaagatacagatgttcaaaaactggttttgcaaataaaaccagccaacatacgactgtatggaatatgatgatgaaacttcagaaataagcaaggtactggcattaccaaacatatttcaagtagctgatagtgttgttgattgtatcattgagaaaacacaagaacacaaaaggaaaagggaggaagaagaaagagaaataataacagatcataaggttcttaaaattgaaaaaggacagatttacaaggacaggaaaatattgaagattgcagtgggtttttttgctatgatcaacaatttccaatttaaaaccaaaagatctgaaccaagagagtatgtggtgacttgtgtggatgagaactgtaactagtttctgagagcttcaaagttcaagaatacctcaacattcaaagtaaaaaaagatgtccaagatcacaactgctcactggatattgtaatgggagaccacaagcaggcaaactgcaacatgattgcagaaataataaaagagaaatttctgtcaatcaaaagaaatcacagaccaaatgacattatgatagatatgattgataattttggagtgtcaacgagctatcaaaaagcatggagaacaagagaaaaagctttggagttaacaagaggaagacaagatgaatcttatcagcaactaccaaaatacctacacatgctaaaagtagtaaatcctggaacaattgcacaattggaaacgtataagaaggatcgtttcaaatatttgtatctaccatttgcaaactccatagaaggttggaaacattgcaggccagtcattgtaaccgacagaacatttttaagaacatcatttggacgaactctattcacagcttctacaatggatgcaaacaatagcatattcgttctagcatttgggataggagactcagaaaatgactgctcttgggaatggttcttcacaaaactaaggaaaacattcagagatagagaaggtatgctatcaaaaaaactagtttcgtttcatctaaattcaagctaaaattttaaattcatatgtaaatatttaataaatttcatgcatcttgttacaattacaaacaacaatatagtaaaatacttgttatgtcataacaataaaaaacaaaaataagaaaatatagaaactggtttccacaacaaaaaaattattacgtttcaaaaaaaaaaaacaaaaaaaaaaattgattatgattccaacacatacctactgatctcattaaaactggtttccatgagcaggtttgacaataatattagacagacataaaagtatagagaaggcggtgagcaatgtctacccaaaccacttccacagagcatgcatcttccacctgctaaacaacgtcaaaacaaattttggagtgcatggagacgatctgacaataaactttgtaaaggcagcaaaaatgtacaagctgacctcatttgagcgctacatgacaaaaatagataaaattgacaaacgaataagaccatacctggagaaaattggacatgaggtttggaccagcagccattgccctacaaaaaggtacacaatgatgacttcaaacatagcagaatcaataaattcggcgatcctagctgcaagatcattacctattataacaacgattgagtgctttagaagccttgtgcaaaaataggtgtggaaaaatgacaatgaagcacatggaatatttaccgaagtagcatcagatgtcgaaaaattactaagagaaaatttgcttaaggcaatgaaatactaggtacaaaaactaaaacatagagaagaactatgattaaaaaacctgtttcttgatcatgttgcaaaaccagtttctatcactttatttatatttcacacacaaaaaaaaaaaataacaggtcatagcaatcacaacaatccaataccaagtaaaggtctaagaaaaaggggatttcacaatcaacatattggaaagaacatgtagctgcaaaaggttccaactagattagataccatgctcacatgcaatagctgtatttgcaaaaaggggattaagagcttatgactatgttgtcgagaactacaaaacaacaacaatgaaggcaacatatgaaagaactgtacatcctctaccaaatgaaagagaatggactatacttgagagcctggaacagatagtgtggccaccaaaatcaagaaaaccatctgggaggcctagaaaaaaaagaataagatcaaaaggaaaaccaaaagttatcttgaaatgcacaaggtgcggaaaagttaggcacaaccggagaacatgcaataatctacaactttacaaacctccaaaacagaataacaaaaacaagaagtcgaagaagaaggattgatcagctacaaaataaataaatagtgattgagagttttataaaaactagtttctcagcattgaataaatttgaacagactataacttttttaataagatacttcctacaacatttttaaacttttgaattatcatctgtttaaataatcattattttaaatattttttcgtaatttcatagattttttcataaagatacattaaaaacattaaattttacataacaagaaaccagttattaacaaaactagacaaaaaaaaaaaaaaaaaaaaccaaaacccacttaccaataaataaaaacatatacaatgaccaatgaaaaatatcatcacaaattgtcattgttattacacctacaaaaaaaaaaaaaaaatcagttaactgtaaattcaaagaaaataatagaaataaagaaatcagttcttaaaaaaaaaactcagtcatcaaataaaaacttataatacaaagtggcattcattaaacatccagtctttaccaaaaaaagacaaccacttaaactaaacaacaagtatttacaaaaaaaaatactaaaaaactatataacctcatctttaaataccaaatacaaaataaaaccaaaagaaacgagtttcctgttaccataggaacataaatccaacaaaaaaggtaattattataaacatctatccattcatctgaaatcatttgcctttgccctttccctttgcaatatcctttgctttaacatttgccttattatttgcattatcctttgatttcttcacatttttcaacacttcatcatcagttatacaaccaccaatttgtttccttctagcatgaagaaacaaactgacagcaagatcatctctatatactgctaccaaatctgacatcttagatgaaatgtcatcaaatttttcacaaatgaataagtgagcaaacttaatgacaaacactccacagtcactgcaagaaaaaaacatgaattaatatcaaaaactggtttctatgcaaacaaaacaaaatctgacaaaaattataaatagaataaaaaataaaactagtttcaattaaaaaatataagatcaaaagaggcaaaattacctattgacctaacttggaagcccatcaataaacttgaaattcaatggttctctttttccaacaaaatatggaccttcaaccaaattaagatcaggtctagaagaataaacatcaagatactccaaataaaatggcagcatagtagaataagctttgacatgatccaaggcgtgtttcttattgatagcaccagacattgagttatatacgtttaacatcctctcattgatatcaaaattgaccaatattcaatgtttttgcttttgaatattgacatatatataagaacatgatcagtaagcacctaatgagtattgcaaaacaaatactcaccaacaatgtatctaggaatgacattatcaaaatcaatcttagaagggtcagaaccctatttcaagaactgattgtatgaattccatatgacttgatcaaacaaacaattagtagtaatcctttggtttaaagtatcatcttgctttatgttcttccttaggtaatagaataccacatctaaatgctacaaaacataaaacaaacagcaaaaaaaaacatgtatgagaaaccggttttgcaaaacatagagaacaaaattaaaaactaaacaaacaccatacacattaaaaataattaacagaaaacaaaagtataaaaaaaaactagtttcttacactgtcacacagaaattcaccacaagcatgaagctggtagaatcacatcttctcaaaaatttcaatgaaagaaaaattcataggtggcgataacaagttgtccgcatcggagtacttcttcacactgctcaaaacaaacaacaacaaacacaaaataaagtcaatcacataaaaaaacataaaaagaaatttaaaaaatataaatatatatacacaatatactaaccccctattcatgacgatgttctcaacaatgaaattggaaaatttaactaactgctcaggaccaatattataaccaattttatctttaaaaggattgattccatgcacaataaatttatcatcttgcacaatcctcattaagtcttcctttgaagatgaagatgaaccaaagtccacaacatatggcgacaaaacaatagagcttggttttggctacctcttttgaatctctggagacaaatatgattcatcgtataacaccaaactcatcttatcactatatcatgaaacgaaacatcatctgtcttcaaagcactcttaacagtgctatcaaccacacccttgagaaaatcaggatcgacaaaaatattttcaaaatttaaactgtctctttcctcctaaaaaggttaaggaaaattagttagaacaaataataaaattcaaacaaggtaatgtaaaaagcttgtaccttagcttgagcagtttgaacagataactgtaacccaccaccatcatctgatatatcctgatagtatgcctgaacaagaaattaattaaaaaccagttttgaacataaatgtagaaactggtttcatacagaaaatatatagaaacaaagacctaaaacccaaatcagaaactagtttcaagaaattgaaaaaaaaaacgtatcacaacccaactcaattcagaaactagtttcaactaattgtcaaaaatcatataataacacacccaaaacagaaactagtttcaactaattgataaataactataatagcaccaaaaacaacaaacctataatcaaataacactaaacaaagaaactagttacctctcttacaggggatgaaaaaaattcagaatccttagaatttccatcactattcttcttcaatccattgagaatttctcctaatttagaaaactcacccaaaaactcaatcctcaaactagaaattctatccttaatttgttgttgacactctttgatataattcagatctacacaaatctgaattaacttttcatgagaaacatgaatattagataaaaataaatgaaagtaagtaatgataaaaatataattaccaaaatacacaaaagaaataaaataagaaactagtttttaataccttgacctcatgaataacttcatcagaacacatagtatcaccaatcctttagggaatgtattggggattaaacttaaatttaaaaaaaatgactttgagacttttcaccacacaaagcaacaaaatcttttataacaatacgaaaagataaaaatacaaaacaatttaaaaaaaaactaaagaaaaataaaacaaacaataaccaaaaaaaatgaaatttgaataaaaaaattaccttcggattgttaaacacattctgaatcaactcactaaatttcgaggtagggttattctcccagttcaaaacatgagggctcttgttaccgattcttttacaaaaccgaggtgacaaagatggaatgatctcgtacagccaaattaagaacgaaataggaaatccttcaagcttgtaacccttctcaatcttccttttcttagcaagctgttcaaaagtatcgtttccatcattcaatgcaatcttgaggtgataaaaagtttttttccacaataactttccccatccaaacctattcaacacttcaatataatcatccccatcaaccatagcaaaaatgaagttatcaatcttcttgccttgggaataaccatacaaatacccagaaaagaggtacacaagagctatcttcacttaatctttatcatctttcaatgcaccgctaaacaaaacactggcaacatccctcaaagtaaccttctcagtagtcccatgcatagaaaaaatatcctccttgaaaccaagtaacttctttgatttgaaaaagatcaacatcataggatttcttacaatccaaactcgttattaaggaaaactcttcaattccaaatcgcacagtcttgtttcccaatttaaaccacaattgaacatcatccctttcagtgtgaatctgacgcaaaagaacaagatgaatgagctgtatctgatagttgaagttactaacatcaagaaagtggccaaaatgagactttcgaaacaactccttctgatcatctgaaagattctcattgacatccttgatgacactataaggattgtaaagttgaggtttcccagcaaacctcttcttaacatcaactttgaaataatattcctgtgagagaaaaagaatataaacaatgagaataaaattagacaacaacaaaaaaaaacaaaatattcaaaaactggttacccaaaacaaagagaaaaactaaaaacttaaaataaaaacatatagattaaagaaactagattcatataaaactataaacaaaaaacctaaaaaacaacgaaaatcataaaggaagaaactggtttatttagataagaaaaattacccaaggagcagcatcaacaggagtgtcactcttcttctggccatgggatttggaaactggtttctttttaactttcttaacaacattaaccagtttctcatcatcagcaacattagattcacacactttatcctaaaaacataaaacacaattcaattaaaggaaaatgaaaaaaaaaactattaaaagaaacaaagagatcaagatatataaaactaaaaaataaatattattcaaaaaatacaatacacaaaacaaccaaaaaatataagaaaacaacaagacataccaaattagaatcctccactgcatccttagttttactcttctttgacgcactagcgtcatcactaacaaacttcttttttttttggttgcaacaacttccaagacaaccttctcagtcttaaaatcatcataattgtccgcttgaaggacattaggagccttcttcctgaccttcttactccggtgtttctgagaaacaaaatctgcatcatcaactttaacttcttaattatcatcctgaaaaaataaaaaataaaacagaacaaattaataaaacacaaacaaacacaaaaaaccgattttagataacatactcaaaatcaggaactaacatataaaagataaaaaccaattttcgtggaacaaaataaaatgagtaaacaacaatgaaacataaaataaatgcaaaactaaattcagtaaaatttaaaacatactttaagtttctggggagattttcttgttggtgctttgatgggaatatcttcatcaacagtagcagccttaaacaaaacaacaacaaaccagtttcatccaaaaaaataaataaaggaaaaaaatgaataaacaacaaaaaacagattcaataaaaatatagaacatactttggatttacgaggagatttcctcttttcaacttgaacaggttttcttcttcaacagaaggatcctaataaaaaaaattaaaaccagtttcatgaaacaacaaacacaaaaattaaaaaccgatttcattataaacataaaacatactttagctttacatgaagtttttcttggtcggcctttagccttcatagaaggctcaaccttttcaataacagatgggactttggattctgattcactttccatctgataaaaaacaaagtacaaaagaaatattagacacaaataacaaatcaatcatgataataaacatgaaaaccagtttcacaaaaaactgaaacaaatcaaaaaacaaaacaaacaaaaaaaaacataatgacgatttccttaacaatagatttgtaaacaatagaagtaatagcccagcccaaaggagtcccactcaaagagccaagcattttgcaatctcaaccttaaaaccactcacacacccaatagcccaggctgcacaaacaacacaattctaaaaaatggatcaaactctagaaactgatttttcacatgttttaatttaggtatgatcaagttagtttttaaaggtatgatcaagttgaaaaaactaatttttaatatgtgtattattttgtaacctcaaccttaaaccactaacacacccaatatcccaggctgcccaaacaacccctgtatcatccctaacccatttttaaagtacgatcaagatctagaaactggtttttaatatgtgttttattttgcaacctcaacgttaaatccactcacacacccaaaaggccatgatgtctaaacaaccgctgtatcatccttgatcacaccaccacaaccaataaaaactcgaccataacaaccattaaaaccaatttgaaaaacaacaaaaaaaaaatgaaaacaataaatatgtgctaaagagggaaactaataataaagagtacatatgaaactttaacaattttctttaaaaaataacacagattgtaaatgcccaataataaacaaacaatgaacacacgaaaaccctaaaaaccgaaactgtttaaatcaacaaacacacacaaaaaaaaaaaaaccagtttctagaaattaatgaaagtttatagctaaaaccaacacaaatcataccaaaaaacaacaaaagttaaaaaaaaaacacagcaacaacaccctgattcttaacaaaaattaaaaaaaaaataaataaaaataaacaacaaaatactaaaacataaaacaaaacccaaaacataaaatactcacataatccaatatgaacaaatacaacaactcactattcacttcaattttttttaaaaaaaaagaaccacaacacactaaaaagcttgaaatgctaatcagtaaaagaaaaacaaaaaaaaaaaaaagaagtatggaagatcgattaacaacaaaggaaacttcaaaaaaacacaaaaatgaagaggaacaaaaaactctaaaatcagagaaatagaagaaggaaaaaaaatcataataccttgaagaacacacgagaaatggccactcttactcgaagcacaatgccaccattgtcgtccgaaaatcgagaccagaaaaaaaaaaaaacagaaacgaagaagaaatgaagaaagagggaaaatgaaacacaacgaaatgaaaaaagagagggagagagataatcatattaggcggtttagactctagagtgaattgaaaactgtaaaagtaagtatagagggggaagcaaccatcaaatcgtgatgattatatgcaaaacccataaaaagtaaacagttatgtacataaaaaattgaaccaaaaaaatttaaatacataaaattactaaaataacctactgaaactacaaagaataaaatatgggcttttcaaaaatacattccaagcgtacgggctttaaaaacccataaaacatggccaaactttaaaaaagtcataaaaagtctccatactcaactatgccatatttatcataaaatatttaaaaaacccatactgcatgtaaattctactttttattttgaatttgtatctggcattttttttgggggaatattcataatattctttttttttttttttggttttttatgtttatttataattttatgacctaaattttttataataatatacttgtaaagtttgaaaattacaaaaataatatttggttagaaaaaagaaaaaagataatgagaaatcaatttcacgacaatgataaataaactataaaacaaccaaaagcgacaagaaaaataatcatatgacaactataatacaattatcaataaactatatataaaaaagacagtttattatttttattgaaaatatgtttttgtaaataaaaaaattgaaagagtaaaaataaaaatactctgtgagagagaaaggatacaagggttagagatctgaacgaaatgagtcatttaatttcgctgcaaccaatataaggtttctcatactttatatgtgttcatgattcattattttagaaattcatatttaggatgtaaaaaacatacttgttagtaaatctaggtcttggtaaaatatattataacatattgttataatgaataaaaataaataacacgaaataactcaaaccgattataactaaaatagaactggttatataacataatgaatataaacaagtaacacgcaataactcaaaccgattacaattaaaaaataaagagaaaatcagttcctaaaacactaaaacataaattaaaaaacaaaactagttccacaacaaaatacctcataacacataacacttcaaaaatctattttattttatttttttaaaaaaaggatcaattccaaaaaatattgaggcataaatatgaaaagaatcggttccataacaaaataaataagcacaaagaataagacacaacaactcaaatataatttaaagaaactggttttgtttatcaaccagttaaaaatttgagacaaaaaaatagttccataaagtaactaagataaaaactcacacaccaataccagttaaataaaataactcaaacaaaaacattcattcaacatgctctaacacactaaataattacacacataccatatttatccccaaaatatccattcattatgttatataaccagttttattttagttataaccggtttgaattatttcatgttatttatttttatttattatatcattgttgtaaaaccgattttattttaattataactagtttgagtattattgtgctatttatatttattcattatgttacagaaccggttatatttcagttataaccgggtttagttattttgtgttacttaatttaattcattatgtaatagaatcagttctatttttatttatatttgagacatttatttctcgtgactttttcaatgacttttttccggcaacaatgacttttccggtgactttttcggcgcgagtgatttttccggcaccgttgatatttctggcgtcggtgactttcttgacagaacttattattattttacaaatataagatttctatctttttttacaaaaatatggcataaaaaatcccatacaaatgtaaaataataataataataaaaaacccataaccctgtagtattatttatttacgccataaaaaagtaaactcttataattttctcatatattgtgtaatttctacttatttttatgtattttttctattgtatagttatttttagtttatgtgcatttgttatgatgtatatttttagattattctagataatcttttgttgtatagattgttggaattatatttatccaggatcttnnnnnnnnnnnnnnnnatgttgatttaacaacctaatattg

SEQ ID NO: 16777 - DNA, 5747 bp, Cannabis sativa
aagcgacactacatccgtccctatataagctatattatgtaatttgttacctattataaaatagtaaaattttacaatttcgtcaaattattttatcttttgtgcccgaaaaaaatacaatataatataataatctttacaattaaattttaaaccacttcttattctttatccctttttaaacaaaacttcttatccttttctcttcctttactcttaataatagcaaaacaagcaccactttttataccattgcttctcaactctttctagtgaaaaaaaaaacaagtttagagtaaagtcttaatcaaaatttttatttatgtatttatttatttttctcaaaaagacattacttaaaacagtcacttactaagtgtaagaaaaaagtttttaatgtaagcctaaaatatagcaggaattgaagccacgtagaaatgtagtacataacatccaaagctaaaggtcaactcaattccaggtacttaaaatgttgactttttgaaatgtagtagattatctatttattatataatcttgatgaaaatgggattttaataagtaaagtttttttgatcatcttcatcaatgcaaagaagattaaatataactatatatgagaatgaagaaatgaacaaaatttaatatgagcagcaaagaaaaatacttgaacagctagataacttgttcagttacaaattgattgaaaaatataaactttaacaaatcaaggaaacccaagtattaaatcaaaggcaagtgggtttttctttttcaatatgatgattcctatacatgcatttttcttgtatataaatgtatatagtaaggttttatggatctgtacaatacatattttgagcttagaaaaatgggtattactactaacagtgcaagattcatttttgtaagctttttagctacttgggttcttggagttgaaaaagtgaatggtgattcagttcattgtaaatatccagcaattttcaattttggggactcaaattcagatactggctctatatcagctgcattttttccaagaccagctcccaatggtgtaactttctttcacagcccagctggaagagttggtgatggccgtttaatcgttgatttcattggtaacccatttgtgaatttcacctgtttgttgttttgtctcaaagacttgctttttttttttggtttttgatttttctgtaagagatttattgatttacttaatccgtaattggtatttgtgttatgtatttatgtagctaagtactttggattgccttacttgagtccatatttggattcatttggtaccaaattcagacatggtgccaactttgccactggtggagccactatcaggcgttctaatgattctttgtttataagtggtattagcccatttccatttgatatccaaactgtgcaatattccaacttcaagaacaggaccactatgctttacacccaaggttgacttttgaatttgaccttgttatatagatagatggctaattaagatttttactactaaccttgacgtataacaaatcgtaactcccgaattttcagtccgttaaaaatttcactccaactattgagaaaattgttggattcaattttagatgacacttgatattgacggaattttgggagcacgatttggtacatgtcaaagtttagatgacacagattactgatattccaagtttagatatttagacataatctgttcacaatgttttcatgtttcaatgttgtgatctgcagccaagagaaactcagatataagaaagaactttccaagaccaaaagacttctcaaagtctcttttcatagttgatattggccaaaacgaccttgctgcaggtttccggaacatgatgatgactaaagaaaaacttgttgcagaaatccctgatatgatgaatttgttctctttaggcatccaagttagtatctgcattgatatatagtttaatctgtccacattaataaatatgagtgtttatattgagattaacaatatgtcttacagtttctgtatcaacaaggagcaaggacattttggatacacaacacaggccccattggttgcctgccatcgaccttgttcgatgttcgaaatccagtccctggttttctcgatggaaacggctgtatcaagtctcaaaacgacatggcaaaagagttcaataggcagctgaagagaaaagttagtgaactaaaggcacagcttccttttgctgcattaacatatgtagatatgtatgctgcaaagtacagtttgatcagcaatgcaaagaaactaggtaacaatactaattacatacatacatacatcccaagcattttgaattctttatagttataatgttagccatcccactaacaataacacccatttgattcactttggagcctaaaattctcaacttctgataggtaagattagtgattggtattgctgttagaaattcttaataacttcaatcaatattttgcacacaggttagaacattatagtaattactaagtctgaagcagattatcagaacatacaaatgtgaggagagaatatgtatttatagagttagagaagaatctaattaacacttctgcttcaataaatgttaagcctattaataaaagatcacttaaaacgcctaggctaaaccgagaaagagtttagtctatcactaacttgaccaagaacttgcttttgacatagtatttcttgctcatttctcttatcttgttgtctacttatgcaggattttatgaaaacttgaatatctgttgtggttcctttaaagatggggttcgtaaatattgtgggaataatattctaaagaatggtactcagtattttgttaatccatgtaaagatccttccttgcatatcagttgggatggtatacactacactgaggctgcaaatcgatggattactaaccaaataataaagggttctttctctgatccaaagtttcccatctcacaagcatgtattaggcactaactaatctatgtaattatactataaacataatccatttattgattaatgtctttctttaacttgatcaaaagttcaaagtggttaatgttcttaattggccaatattgcttagtatgaaccataataataatagtgcactaaacaagtggcatatgtttgatgtttcaaaatctcagaatttgttcatggttactagtcatgaatattaaaaaacattttgcaatgaatgaaatgttggatattatatatacctttgaaaacgaaaagaaatgttagtagatttgttttagtattttatccggtaagagctaaatgaaagaaagataacgtgaaatttgggccggtgataaggcaaaagcaaatcccacccatctttgttttgtccacatattatttatagcagaaaacgacataataataatattaataagcaattatatatacatcaccgacttcttttaacctaaccatcacaatcaatcatatgatatatatatatatatatatatataaatcaatgaaaatcaaacataattagtttcttagtccatatccatttttacattttgacaaggatttgcttctcatttaaattcatgatttcatggtccctcattccataaaatatcacttatgatttagtggctggtctcacatttattttattttagtttagttttacaccccatagcaaacaacaatcccatatgaacaagaagctaattaataaaatataccatgagaagcatgatttgaggaccttggaaagtgtaacactttatttttatggacagtggtagattttagaagattgcaaacagataattgtttgcctatcataccactgctcagtgcagtgcagtggtctgtaataatatttaaatattaatttatttattcattataggtgggtgtaaaatatacattattcattataaattggctaattagaatttttttcctctaaactttaacaattacaaaattatgtccctccaacttttttagttgttaaaaattctcctgaactattgagattgttagattttaggatttttatctaatttcattcaattttactatttcagtgattgtttatgtactaaaccatgattccctgaactttcatccatgttagacttttttttactaaaattggataaaagtttttaaatccaataatctcaataattaagagaatatttttaacaaccttaaaagtttagggcatgatttaatatatatcaaaatgaaaaatggtaattagctttatgaatatgcatattttacacacacatcaatggtgatgttaataggtgcaaaagggtcaaaagtagagtagaaaaacagtggtaaaaagattacatgagcacatggaatagtcattattaatgcctatttacatgaccccccttttgtccccacctgtaacagtaacattgtctttgtcttcaaacttgttctcactctctcactcgtacaatactcattatccttaaaatgggcttctgatcacatgagtcaaactcgattggcagctgtaaaaatgggattttggaggaaattccttggtgggtttttggttttatgcgttttgggagtgggaggagaagtagaagaagaaccaccaacagcagcagcagcagcctcaccaccttgctcctttccggcgctgtacaactttggtgactcaaactccgataccggtggcatttcagctgcttttgaaccgattcctgcgccgtatggcgaaggcttctttcataaaccatccggaagagactgtgatggccgtcttattgtagattttataggtaagatttaagtgaataagaactaactgtataagattttgtgtattaacaacagagttggtgttgtttaattatgcagctgagcgcataggattaccatacttgagtgcttacttaaactcattaggaacaaattatcgtcatggagctaactttgccaccggaggatccaccattagaaggcctaatgaaaccatttatgagtatgggattagcccattttctcttgatatgcagattgtgcagtttaatcagttcaaagctcgaactaaggagctctatgaacgaggtagtaaactattgcaaaagacaattaaggaaagaacatttttgtatgttttgctaagatttgctttgaacatatacagctgccaaaacaccttctgaaagaagcaaattaccaaatccagatgagttttctaaggcactttacacatttgatattgggcagaatgatctttctgttgggtttcgaaaactgagttcggaacaacttctggcggccttaccggatatcgtcaaccagttagccaaagcagtccaagtgagtagttttgaactgtaatgttgtttaaagaaaagtgaacatcttttgatgagtgtgattcactgactgagtcaatgaatactgttagaatatatatcaacaaggaggaaggtcattttggattcacaacacaggtccaattgggtgcttaccagtcaactttttctacaaccttaatccacctcctgattttgttgaccaatatggctgtgtcaagacccaaaacgaaatggctgttgagttcaacaagaagcttaaggaaagagtaatcaagctaagaacagagctaccagaggctgccataacatatgtagatgtctatgctgctaagactggaatgattggcaatgcaaaagctcaaggt

SEQ ID NO: 16778 - DNA, 3084 bp, Cannabis sativa
cacagcaacaataaaattgaatagccaatatatccacatgcatcatttttttttcggtatcttgcatagcatctctatttagggcatgccccaagcacaggaaacattaaaaaattgtgccaaccttccataatttgtatttctattggagaatatagttaaacttaatttctttaacacggagaaaagaaaatataggaattacattataaaatgttattggaagtagcacatgttaaacttgcatatttaaaagaatatataaattctatataaaataaaataactaaatgaaaaaagaatttaatttaccgttctttttcaatcattcttaaaaggccggtaacagttttgtgctcaacttctggagacaaagaaagatgtttgcggaaaagctgcaatcccatatcccacagtgaacggacatttggtgtttgtttcacatatgttctatctaggtacagagctataccacggatcatcaacatttggttacatagatcctgccagcatctctcaacgagggatagaaaaaccaacaaatctgggctttgaccaaccaaggattgcaatgcagcagctatatgcgtttcacattctctttcaatccgctgataaagatttccccccatcttatgaaggcatagatcattgacggcctgagagcaacacaaatggtttacactcatctacatttgtaatgtttatttattcaaagaaagaagaaatcgtgtagaaaatacctgatatagcttctctagatcacaagaatcaggttgctttaagaatatagcacaaatagctgatttaagctttccccatgtttcctcttcaaaatttgtgggcaacataggttttcctaacataacgaaaagtgctatgtatcagccaacctttaaatacataattttactttaacacttgaaaaaccaattctatgagaaccttttcaaagatgactgtacagaccaatttccacaaaccacttggaattcagatatccatattcaagttcgagcctagaagtttactttcttttaatttatttttaccatttaacaactgtagtttatgtgaaataagtacgcaaccataaaagaagaacataagggaaacaaatactaaaatcacatagaggtctgtaccaaaatcccttttaccaccttagttgagatgtaaacttaaattggaacttggaatctaccgcacaacgatatgtgccatttcagagagttggggacaaagaatagtcaattggatgttaaaaggataaacaatatcaaaggatcacacatcaaaagataaaaagattaaagaatggaatagaaatttaggaacttttgatgttacaatgctagaatagcaatcattgcactcttagtaacagtaaaaatttgcaaatatgcttaaagaccatagaaagaaagagagataagattgttagatataagtttaaagtttcacaacaaacaaggaaacacaaaactttaagaaatcttaagcccgggtgaaacttttcaggttggcactagagcacatttctgcaatggtaatatttgacaagcagaatttcgaaagtttagtgacataaactttatattttaccaggaccctaagttgagttttcacttttaaatcaaagatttgaagataagcatttcgacagaaacaaagtaaccaacaaataataagcgcagagtcgacatcaacaataaaaaaactatgaatcggaaacaattttgaagataagacattggatacgacatgtaagatctgctcatctcttactactttagaaaccattttatattagcaaaacacagctcccatatcagtaactaaccaaaaggatgatcactaaattagagtaacataacacccaaaaagggtagccaaattgtcaaacatgtggtttgctcctacaaggtttgaggttcgagtccccaaatattgtaggattaggcgggatcctagtttcaaaaactaagttagagtaacataacataacctgtcagtcaatcaaggtaagcagtgttcagtcataagaagaccctgaaagtccaaaagcacaaaactttcacagaacccaaacaccaatgctagctcaatagcatataagttccctgagtacgaaaatttcggatccaatttgatataaaatagtaatactagtgtcatttcttatcaatagaacagaagtaactcgtagaaaaattcctcatttccaacacaattgaattcataaaacctgtatgagaatctaattacccagccaagaactcatttccagctaaacccacaaccaaaattaaaaccccaataccgaactaagcttttcaatcccaaataatcaaacctatccacaaaaccccaaaagcacaaatcaaaaaagatcttcaagaaaggaaaaaagaaaaaattcggaaaaccccacaaagcaaaacaattcaaaaatcaatattgcgaactgaaaaatcgaagaagagcagaaacaaaccaaacctttgttgagcttgatgacgagcttcttagcgggctgcggcggcgtagccttcttccttgacaaattagcagctacggctcgaccagaggagtcttctggcttaagatcttcgtcgagggtcattgaagaagggtcgaaaacgacgtcgttatcagcaggtgaggcaaaatcatgagcagcagcagtaggaggaggaggatgttgatggtgtaagccattcttagctgggtcgagagagcaagacttggacttcttcatgggaggagctgaagaagaagaggaggaagaagaagaggtcggaggaggaggacggaaggtggtggcggccaaacgtttggtggggtgagacatgaaaagtgtgatcaacaacagagcattgtaagtgagaaatatacacaaagattgttgatttgattatgagacaaaccagaaacccaaacccaaaatcaccaaaccaaagccaaagccaaagagaaggagagaaaggagaaaggaagagatatccggtgttgttgttgttgttgttgtgattgtttttgtgaaaagagtgaagagagattttatttttattattattattt

SEQ ID NO: 16779 - DNA, 16729 bp, Cannabis sativa
tatacatttggtttggtttataagttttgattttttttactctgtcttaattaaggagtctatgtcaatttttttttgttgaaaagatagtccctttctttctcaatccttaatttaagattgttataaaaaaaaaatccttaatttaagaaaaaaaaaataaattctcgccatctttcgtgaagaattccacaagtcttggttccaaaaaaaaaaattccatatttcttcgttgtttctcacgcgccaagtaaaccattggaatcacacgtgccagcgggaccagcaaagtcgtgccctcgtacccaaacccaatcatagtagcgcgttagcgcgtgtcgttactcacaaagtataatgtttcttttggggttggcagtacgtaccagtacgtcacacactttcgccctcaatgacgtttatacccccacgcaccgtcccccaaaatcactaacaacaaactctcttctctctctctctctctctcttcttcctcattttctcgtttttttttctttctcttttccccaaaccctaaccctaacccctctttgttctttcagttttttctgtttgaattttcctatttcataaacgccacaacctaaaaccctaaggctattggattattggttttgatggattctcagcagagtaatctgttcgatacgtcttcgcagcccgacgcgggcaacgacgcctacacattcctcgagttcaacacgcaaggggaggacttcgattacccggagtttcgggactcgattcggtcccctgttgcttggcctacgccttccgattcgttggctgaaccaactgatcgcgtcggtggtggagccgctggtcctgggtccgatcaccagtctgatgcctcgccggtttcgactgcgccgggtagtgcaactaaggcacgggcgagtagtagctcgaataatcaggttgtggatgctttggcgaccgggatgagtgggcttaactttgaggatactggggatgatgataattatgattatgccaagggggatttcacggagcatgcttgtagatattgtggggtgtcgaacccggcttgcgttgtgaggtgtaatgtgccttcgtgtcgtaagtggttctgtaattcgcgggggaacacgtctgggtcgcatattgtgaatcatctggtgagttgcttttcgttttctcgatttttttaagtttggtttattatttaatagtgcgaattgggtcgagaactttgaactgagaagtgagagtgatgatcaagattttaggattgaaaacttcgggcattttggatttttaagatcataattcgttttgataattagggttggggtccattttttaagtataatagaacataaacatacacggtcatctaatgatttaagtcttttttttttaataaactttagttagaatattttgcttggaatttggggatgcgactcataggaagtaattgcagacataataactttacacaaatatgttgctaaagcagaacttaaatgcaatgttgaaagctggttggacgacttgtcattcgtaaggcttctgggttttttttcccttattaagagttgttgttccgtgttaacttctcttgatgaaggaaggagcctcggtggtctattggactatattccttgaaatttgggtggtctgcctgacctattgacctgaacttatcaaaagactttgtttgtaatttgtatttgatggttcccaaagtgcaatgacaagcaattgtaggttcttaagcctataaattcttagaagatattttcaaagtaaatgctgattatgtaattaaacattttgatagtctcgtcttgtgctttgttaactattagtgaatacattttcatatggtggtattctgaatgggcctattatactccagcttataaatatttgacgggtttccttgtatacatattaacagttccgtagtggcatatccaatatgattatatatatattttgttttttgaagcaatatgattatgagtatattttctagtaacacagcaatatgttaaagcaaatatcagtatgatctttatctgatatttgaaatagtaagtatattggtccccttgtgtaggttcgagccaagcacaaggaagtctgccttcataaagatagtccgcttggtgaaacaattcttgaatgttataattgtggttgtcgcaatgtgtttctacttggatttatatcagccaagacagagagtgtggttgttcttctttgtagagaaccttgcttaagtgttaatgcattgaaggatatgaattgggacttgagccaatggtgtcccttgattgatgataggtgtttcttgcagtggcttgttaaggttagtaatgttttccattggctcctcagttgttacagtattatctaatgttgctccccctcttataagatattgttctttgcaggtgccttctgaacaagagcagctgagagcacgacaaatcagtgctcaacaaataaacaaggtagaagaactttggaaaacaaatccagatgcttcacttgaagatcttgagaaacctggtgtggatgatgaacctcagcctgtagttttgaaatatgaagatgcttaccaggtgaacttgtagtttctcaccttgcttgtattgcatttgaatcattatgacaaaatccttcaatgttcgttaattttatcaggccggttaatgataagttggtttttttatttcttatgcagtaccaaaatgtatttgcaccacttattaagcttgaagctgactatgacaaagtatgtatctgtctgtgttcttttcttttctttttaattattgttaaggtgttgtttttttatttaatatcatgtggcattctatgttccctattttgtgacagatgatgaaagaatctcaaagcaaggataatgttaccattcgatgggatattggtctaaataaaaagcgagttgcttattttgtttttccaaaggtgcttaactatcttgttatttatgagctacacagaatttattcgatgccagacttatttcaatgctttcttggtttttttattgtgacgatttcacataaagtagttcataatctatattgtcataggaggacaatgagttgcgtcttgtacctggagatgagttgcgattgcgttattctggagatgctgctcatccagcatggcaatcagttggacatgtggtatgtatattttatttatatcaataaaaaagcagtgccggactttagatttatgttagtacactctggactgtagtgaaatttatttcatatacaataataaaatattactttcttgtcgtttcagattaagttaactgcacaagaagaggttgcacttgaacttcgagctagtcaggtgaattttagtgatgcactagtatttttcttttgtaataattatatatatttattctggtgttttcctaatgcttgtggatactgtcgcagggagtacctgttgacctgaaccatggttttagtgttgacttcgtttggaagagtactagctttgataggatgcaaggagcaatgaaaacttttgctgtggatgagactagtgtcagtgggtatgttttcttttcatttttttttctttcaggggagtatatcttcttatttgtccaagaactaacttagtaccctattatttaaataatatcacatgttatatttattaaatcagttttagttgaaaatatcttttaaaaatgaaatcttactgctatgtgatacatatgtatatattttttaatatgcagtaatcattttaattactactattttttttttataaaatatatttcaatttttaatcaaatataaattgagatagttttgattacattcgaactatttttatcaaaatcggtgaaaattgttcaatattgaattgatttaatcatatgcaaggtactaaaataattttagctaaaacaataggtaatatgttggtatttagaaaaataacagggtgttaaaacagtattgattaaacagtaggtactaagttggttcttggacaaacaacagggatggtatacttccttcatttttttaattattattttaattttcttggaggttgctgagcagaaaaaatcgtgatgtctatctgttttctttggctggtatatattaagctcttggaaaatgcacccattctttcaatgctttgatagaatataatcctaaacttcaaataattgaatacttcttgaaaatattatagagttcattaagttattaacatattactatgatattgcttttgtatgcatatgcggttgcattttacatggtccaaggtggtgttcattgatgtatttacaatgcttgattaatgaccctgatatgaaagcactgaattttataaatgttatctgttgggcaggtatatctaccatcacttgttaggccatgaagtagaggttcagatggttcgcaatacgcttcctcgtcgttttggtgcacctggtcttccagagctaaatgcatctcaagtatgctgcctgattacatctgaattctaattttctaaccttgatatatgtttatttgtcaaaccatgttcttgttcactgatttgatgctgctcttgtttactcttggtcaattgatttgaaaaggcctaaattagaaaataattgttgctacaaacttaaattatgtcagaacacaattttcttatgtgtctttctagtgtaatgcataacatgcattattagctttattgaatatgggaaatgggagaattacatttggtacaagagctccaagcaagcagggccaaagtatatatttgttcgattttgcctctttctccttaacattcagggatacacttttgtgttttggcttctagtttttatctagattatttattttatttgttcttcactagttggagttcttgttggatttgttgtgactttattttatgttcttttgatatatttatgtgttcacttttgcatgcaatatggcttgctttgtgggtatcttgtatcacttcgtattttaaatatgcacttttcttcaattctaagagtctaagtttcctttatttttaggtttttgctgttaaaagtgttctacagaagcctataagtcttattcaaggacctcctggtacgggaaaaactgtgacttcggcagcgattgtgtatcacatggcaaaacaaggccaagggcaggtaggtttctaaaatgatttgattctttcctgcattttacacatctgatgctacttctactttaatttgttgtttcaggtcttggtttgtgcccctagtaatgtggctgtagaccaactagcagagaagataagtgccacaggattaaaggtaaaggttacaactttgcatttttctttatatacttacaaaatgctgtccttttgactgtttgtctgaaaatatttttgattattcacattcacattaaactataaataatatattctgttctggtctcttgtgcatactgcataattacttgatgcttaggcattagatatgtatttgacacataatgaaactactcgttaacaaatcttcatgactacgtgttaacaaattatatttattttattggacttttaatgtggtttattaaatcttaatattaattcaaaattgattcgagtcgtgtaaatatttcttttctgctgtgaaatattttacttgtagtacgaagccaattatatcacatttttaccctcgagactgttaatgagttataatgtatatttatttgattttgttctcggagtaatatttcagttctcattttttgtgttcttaattgataatgcatttttttaaatagcataaattattttatggtcatgcttttgctcaaggggcttagaaattatgtttgcctgatacttaatgcccattatactcaatgtatgctctacttaatgctacatcttatttttcttctgcattctaggttgttaggctttgtgctaagtccagggaagctgtaagttctcctgtcgagcacttaaccctacactaccaggtctgttgacttgtactcttcatcaatatttgtggtattatcaatatagattctctgcttctacgttatgcataacatttgtgaatattgcaggttcgccatttagacacatctgaaaagagtgaacttcacaagttacaacaattgaaagatgaacaaggtctctctttctttccctctattgcacttgcatatagttgataaatcccatttgaggaataattttgacttgttttgtattgtattcatttgagacgacctttttaaaattaatttttttcaactttgaggaagacattatttttggaaaatctggatagaaattttaggtgtcggtggggggattggagagaaagggttttgtttgagtggctccatgagagaaattaatgaagtatggctaactttggtctgacatggaacttttttcttttctttttcacttacaattgcaggtgaattgtccagcagtgatgaaaaaaaatataaagctctgaagcgagcaacagagagagagatttctcagagtgctgatgtcatatgttgtacttgtgttggagctggagatccccgattagcaaattttagattccgacaggttggacactattcatgaatagctgggtgatagtgaacttacaggtgctaaacaacttataaaaaacagtggttaactctcccttgctttatttcaggtacttattgatgaatctactcagtcaacggaacctgaatgccttattcctttagttcttggtgcaaagcaggtatgcttatacacatcttatattgccatttatgcttgattttaaagaaattttctaatagtttcgaaaataggtggttcttgtcggtgatcactgtcagcttggtccagttattatgtgcaaaaaagcagcacgtgctggcttagcgcagtctctttttgaacggcttgttctacttggtgtgaaaccaattaggttgcaggtacttgttcttttcacccaactttctcttttttatttggttaatgtatacatacatgcatgtgctgtgcatatttaagttagcttgtggtattgtttattgcattttaatttatgaatttccaattcaagagcttcattagtttttgattcagaatctatgatcaatgaagataattatatgattattgtctttcttacattattattttggtcaatgtttaaaaaagtgtttttaagcctgaaggcattttgtttttgtaaggaaaagctcaaaaagtctcaaccattgtcacataaataatctaaaactctaaaataaagatgaaaatttagtttctagaacttgaatggtggaagcagctctcctctcctctgtttttattttttcagagggttggagcttatttttatttcacttaattaatttcgggcagggattttgtaatcctaataatttaagtacagttagtgggcttttttaaaaaagcccagcttgtcaagcttttaagctggctttatggcatttaagaccagctattaaattgagggaggtattcaccttccacaattcgtgacccattctaaaggtggcgcctcacctcggagaggtgtctctctgacacggcttaaggcatttttctgcttcaaattgaggcacctaaacaatgcattttccaattatgaatttggttatacattgtatatctaatggcagttctatctgtcctttgaatggatggtttgaccttctcataattacaatgtcttttttatgttttttcctttatttttgttgttatttttgaaacaaaacaacttgtatttatatgggaaaaatatgcatggagagtgactggaagacagtcactggaaaatcaaacactcaaaacaatagaagaattacatggaattacaaaactaactccaatctctgagaaaacagagaaggaatttgttttaattcttttactattttgccctgtaaagggtgctaattttccttcagaaatatatatatatatttctatgtgtgtgtggttgatcaattttttttgcttagttctgttctttcaagttgatttcttttttaaataatgctgtaaacttaatgtattattctatattctttatgttttaggttcaatatcgcatgcatccttctctgtcagagtttccttctaacagcttttatgaaggcacactgcaaaatggagtgactatcaatgaaaggcaatctactggcattgatttcccttggccagttcccaatcgtcctatgttcttttatgtacaggtatagtatcaatgtcaagtcgtttgatatggttgagtgtgtgtgaacagatttgcatctctgtttttcttctgttattttgccacttttatttctctcatattaccaatgagtttacaaaggctgttttccagatggggcaagaggagataagtgccagcggtacatcttatctcaacaggacagaggctgctaatgttgaaaagattgtgaccactttcttaagaagtggtgtagttcctagccaggtaaatataggatttttcttttgcatttatttaccatgctgttcatgtttttgtaatattttaatgctgtacagataggggtcataacaccatacgagggacaaagggcgtatattgtgaactatatgtcaaggaatggtgctctcagacaacaactttacaaggaaattgaggtaaaaatgttttgcgtaggttatgtagatactttttttctttttcattctttgatgcttgccctttttccgtctttaaataatttatccattgttgttttctttcttccttcaagttcaaatcttttagtgttagtgtttggaagtaaaagatacatgtttaacatgtccagaatataattgattttttttactgtaaaattattgtttttttcctgcaggttgcaagtgtcgattcatttcagggtagggagaaagattacatcatcctgtcatgtgttagaagtaatgaacaccaggttggttaatttactctttatctttatattgtaactaatgctttcagtaagcatatgtctggctatcatttcatgaagataaatactatccattattggttgactgctgaaatccttctcttcagggcattggttttctcaatgatcctcgaagactgaatgttgctttaacacgtgctcggtatggtattgtgattctgggaaacccgaaagttttaagtaaacaaccattgtggaatggtttattgactcactacaaggtaatatatctattttcttttggtgaaattctacttctttatttgaaatggactcttatgatactgaaaatgatgtgcctgttgtgagtaagaaaagtatattggtgtttttctggtatgtctgtagctgttatgtttgtctagtattgtaaattatcatctggcttctcatattatagaccatattactaaagtaaattagaattattatccatgagattgtgcacgaaaatatttcattcattattaagcctttttataacttggttttccttctcgccttccattaggaacatgagtgtttggttgaagggcctctaaataacctgaaacagagtatggtccaattccaaaagcccaaaaaggtgagctgctacatcacggcatgattttctttaatcatgcttttccatttgttgaaaatttgggaactatgagcttataccatgattgtttcttccatattgatgcagatatacaatgatcggcgtcttttctttggtggtggtcctggagttgtgcctagtgacagtttttcatctgtttcctcatccaaccaaaatgctgaaagaagaagtgctcgaggaaggggtatgttgatcttataatgatgaacttttgttgcattaatgtattagaatgattgatgacttgttgactatatctgatatagaacacataataatattttgcttcagtgtgctcattttcattgactaaggtgaagaaaattttacactgagtgcaggttcttatatacctcctagtccaccaaacggaacccataaacctggcttgcatccggcagggtatccaatgcctcgagttccccttccaccatttcctggtggccccgcatctcaaccatatgctattccaactcgtggagctgtacatggaccggttggagcagtgcctcatgtcccacagcctggaagccggggttttggtgctggacgtggaaatgccggtgctcctattggcagtcatcttccacatcagcaaggtgcccaacaatcttttggaaatattggatcaacttttaactttcctgctttggaaaatccaaatagtcagccatctgtgggtgggccgttatctcaaccaggatttgtcaataatgtaagttctgctgcctttattttgctgtcaacttttggaacctgtttctctaccttctaggccgtgcccttacagtatgttcttttatgtaacagatgccagttcaagggccaagccaaacttttcgtgatgggttttccatggctggcatgtctcaggatttcttgggtgatgacttcaaaagtcaaggatcacacgttccttacaatgtagctgacttctccacccaggtatgaatttggaggtctttactaatgttttacatagtggtatttattggtcatcaaaaagttcttacttttggacggacaaatttatatacgttgatggaaaagcatgagtatttacttgctgctgcctagaaaagtttttttctgtacagaactatagatttatacaaaggtttggacttggatattatttgcaaactggttatcggatgctgagttttgtgtaggaggatataagatttacatgcatatacaaacatttaaaacaacaaagttgctcattacacatttctgttgaagagtgttgacttgctgataacctggtctgcaggcttcacaaagtggatatggtgttgattatgttacacaaggagcgcaaggtggatttccagggaacttcctgaaccagaattctcaggctggttattctcgctttggcactggaaatgacttcatgtctcaggttggtggagttctgtctcacagtcacagttgccattgaaccctggtttttcatttttgctaactcgtttttcttcgaaaattttctttattacacaggattacatgcctcatggatcacaaggtttatttactcaagctgcctttaatgacccatcacaagatgatgcatctcagagtcattatggtgtggctaacgctagtcagcttcagtctcaggtttttacttatactgatggatcttgatatattatgtgtaaaatttagcatgccgctttgggttttttttctgtcttgaacacagacgatttaacatctttttaaacttgtttgcagggattgatgaattcactctactctcaacccttcactcattacaacacacaaccactgaacttgcaagccccacagcagcagcagcagcagccacctcaaccgagtcagagctctcaaaatcagaaaatccactacaatggttgaagtgaagggagtaattgatgtgatgggttaatcttttgcattcagctactctggttgtgctctcttgtgtgcccaaatatgtgccctaaagtgcagaatggattgccgattgaggtcagtttggttatctatctacatcacccgtatagtggatacaaatacacttgttgggttttttggaataagatttgtgcgacggagccaaatgactgagcatcgtttttaatcaaaacacaagcagcaccacatcagaggctgagaaagaaaatgataaccccgattacaagcttaaaagttttgtgttgagaaaaagataaaagaagtgctcaagaggatgagtgcaattacatgggatggttttggcataaagggcggcattggacgggttgaaatagtaggcagggcaagggctatttaacataatatgatgagacttagagggaagacccaatttttggtacagaaagcagtttttactgaaagaatatttttgtacagcatgccgggaaaggttgcctatgaacacccaccccaccccctcctttctgctcttcctgacatgtaatttacacactctatacttgcatagaagagggttattcactaaaaacacttgctttgcaatacaaccctttggtggtatataaagtgtgattggtttttaattgtgtaatgggctaaattattagctactattaatgaccttgcttctcagcgcaattcgctattttttgtggtttttagattttttacttgtccaaaccagtgtgcatattttatttcatttgtttccttctttctgttttatttttgttgctccataattattacctcttcaagactagtagtttaaaacttttcttttaggttacgtttggtaggaggtaatgaaatagcattcaataggaagaaaataaattaatttttattctatttttttgtttggttacattttaaagtattaaaatgtcattttagtttgttatttaaatgattattttattttaaaatggaagaaaagacttccattacaaattggaaaaaaaaaactaattattttttatgtattttaaatttttatctattcttttttaatttctattttttatttttatttgttttttattccaacaaaaataatttctgtgagttttctgtaagaatttgaagtttaggtaaagattccttttcttttattttatttaaaggagagctagaactttcattagatagaagccaaaacaaaggaataagctaacccagtggatgaaaagctaaaaggatttatatatgtgatatatatcttagataacagagccgaaaacacaggaataagtaatgtgatcaggccaattttggtagagagtgagttcccatattgggtgagctgttgcatgaattgcacaagaaaaaattgactatcagattccaaatgatttgacttgtattgtaggctcagcccagaataagccttgtctcactgcttctttaaatatgagagccttcacaactgaagcaaagataagataataagataagataagaacagaacagaactactctctcaaccaaaattccaattccaatgccaaccttcatgggacttattcttaaaatatctctaatcgagtgtcaactaaaaacaaaatagagctaaggtgtaaacaactattagattctatatatttatatttaaaataaatttaatttgaattatataaattcctaaacttaattgtacaaaattataaataagaatatgacatattgtttagggtgtttttttttttgagtaaaaatacttagttattataaattagaaatagcattcatttacaataatagagtaaattggaggagggatttcctcaaaccaagaacaagcctcatccacccctaaagtaaattttgccaaatcgtgagcagccatattagcaatacgtttgacatgtgagatggttacattagggagaaaggataaaagacatgagatatctataatcaaatcattaaaggatgagattgaattgaagggagctcgaatagcattaaccatcataagtgcatcggattcagcatgtgacaatggcagttgttgttgaattgcccaatttaagcaataaaagagtgcagtggcttccatttcatgcgagctgaagttgccaattagttttttcgaaaaagcagcaacaacatgaccatttgaatctcttataacagcatctactccgattacattttggctagagtcaacaactgcatctacgttcatcttgaagtgattgacatcgggtagtgtccacagttgtaaatatatatttctttatattctcaacaaataaaagaagttatacacaaaaaaatccctaatgttttacatttttatatttgggttttattattactatttgttttacactgcccaacacccctctatcaatctttttcgttcattccttcttcaaattttcatgagaatagtggttgtgatgttaattttcagattccttttgcaacaaattatttgaagttgatttttggtttcactaattatttagaattttttaaaagatatcataatgtttattataattataatatacgttgtcatataaaaaatatatataatttaaaattctcaatttttaaataacaaaacatgataaaaaaatgaactcctcttaaaaaaaatgccaatgttttagctaggcatggataatggcctcacctatattaattttatatcaagtttcttattaatattattcttattatttgttaattaaggttgaaaattatacacataataagtacaaacaaaactcaatcagcaattgtatatatcccattgcaaattatttatatatttatgtgtatatataagtatatatataaatattaagtttctgactttttgtgcttgtggtttagagtacaagcacatatatcttcatctttattattatttattcttttagaagataatctaaaaaatatgtgggaaaaggaaattattattaggatttgtaaatgttgtcttgctaagctttcctcaaagttaatactgtttttttttttttaatttccttccaggatttttcatcagtaataatcaaattatccaaaagttctgtttctttttttttttttttttttttttttcaggttttctcctatcctaaatatttgtataaatatttctaaataattttaacaataaatctgattgtttaggataaaggtggcgtttgggaatagaaataagaatggaatggaatttttattcttttatttggtagagactatggtattgtatggaatggaatagaactgttattattttgactaaattaccctttactcttcaaaaattatatttgttttattaaattaccattattttataaattgaacaaataaataatattttaacaaaaaaatatatttatcatgtgatggaaatgtgcacattctaaaacctaattatttaaaataaaataataaaattacataaaatattaaataattagtatcagtacaaatttcattcatttaatttaatccactatatatatatatattatatctatgtaattataattatgttcaaagttttaatataattatataactttaacattagtaatatgatggtaacatccaaaaaggaaagaaggggagaatgattgatagggtaaaatagacttttgttagtatggaattagctttcaagtgattttatagtggaaaagcaaatccctagtgtaggtgaattgtaattatatattatattatttaatacataactaatgatctgtattaatttttattataatatttacaaaaaatcctaaatgtgggcgcagatttcgaacccgaacgtggaccctaatttggatcctggacctcaaatgggtttgtggttagggtctggaaatagagtctaagtttgggtcctagtcgggattgagattggaattggattcgaatttatagtaaaaataatataattttatacaatttaataataaaagtcaatactaaaaaacaagtatggtattatattaaataacagtaatataatataatacaatacacgtgtatcaaaagagtcactagagaaaaattaaaaaaaagtaccattagtcattaaatttgaatttgaatcaatgataaattcttattggtagaaagattattctagagaggacatagaacgtaaagggcggtaaaggaagagaagaaagagtaggataaaagatatataaacaaattgattggattctttatagttagttggtatttttttttattggattatttatagatggtattgtgagtaggttctccattattaattttgtttacattgtggggtttcacttcactttccccatagaatataggatgcatgcatgccctatttgtttgttcttcttacaaattattctttgaaaatcaaactcatgaaaacattgtaaatttcatttggtggaaaatttagatgcttatttatctattaatatatatatatagagcattgctattagataccagtggtgtccatcactttttataagtggtcccttacgattagttagcaatattgtctaaaaattatttttctaaattatatggcactagatacttaattacattaacaacggttttacattgaggaaggtgttaggcagcaaacaccagtagtgccttttaataattctcatggatatattgatcatcaaaatcaactttaattacaaactactagcacttttataaaaataaaaaacttaacaaattgactaattatgacaatttttccaactaaattaaattatcttgtttaatatttttagacataattttatcaattctatagttaatttttcttgaattcttcattgccacttgttattaattccaaaatacttcattacgatttctaaaaaaaaaacataaaccaaacctagtattattgcagctcacacttattttcaaaacttgctcattggcgatttttcaatctttttaaataatataagaaacttgaaatattattttaatagactaatatttttatcaatttggtagaatagtaataacatgcatatatgaattgagaaat

SEQ ID NO: 16780 - DNA, 2322 bp, Cannabis sativa
actaatgccgaatcttttcagaccaacctgtattttaatagttttcacagacttctaataaactacgaatttaattcgattattttctaaaaaaattatatatggtatatagctcatctcatctgccttttcgaaatctcactaaaacttaattatgttgagggtaaatgtatattgttgtgtctcttattatttaaatggttttgttgggtttgtaataataaatttctcatcattcatgtacaagtataaaattgctaaacttatcatcattcgcatattacataaattcaaggacgtcctaattgttagaggcatttatgagaataagcgtactgctaattactaaccacatgataaccaaattgtatatattagaatttatatgatccatttggaaaggaatataataagttgtaaagaaagaaaaaggaaaaaagaaagcgtgcgcaccacatataaattcaatttatattatatgtggaagacattgatttcgaggaaaaagaaaagaataagaagctgcatgcatgcagatagaaagaggtaataagttggtataacaataatgtttgcagagctgttccaaggttgtatattatttcttggacggccatggccagattaatgtctcaggaagctcgtgatgggttccaaataatgttaacctcttttaataccatctttgtaacttgtaccttttgattcacacccattcatttcagaaacaatatattacacgagcgcagaatattcacttccatttttaattaaggcaagtcaattcacagcgaaaaaaaaacttcaattcttcggatataaattaatgttatttgttttatacatgcataatatatataatttataaatatgtgcgtgtacggtcattacacttcaatgaaatgttcgggtttaaatcgaatttttcaacctgtacaacgatatccatttaatagcctcttctttttcagtttaattttcccaggcctttaataaaaggtattctctatcgaaatatatttagtgttttattaacaatatatttgtgtttaattagtttagagagaagtgacattgttttcgtcattcacaacacacattatatataaaaatcaagttaacacacatacttctttcgtcagatatcaattagaaggcatgcatataatatatattataattatttttttaaaataataaataaataatggtccttcaaaatactttcgtcaatatatatcaacaacaccaagggaatatttgagtagaccatgtgtgaagtatttatactgccaccgaaacacacaagaatatattaagcagagatcagctatagagaagctaattaattattttccaaacttaatattaactgttttttttatctgctaaatgtataaactaagaatgaatcatatatatgtctggtgtgatttatcacaaaaaaaaaaagaaaaagaaaagagagaataaatcatatatttattttcaaatactctatagctagtaataacatattccataattttgtctctaacattctttcttcctatgtgagtgggtttttcatggtcaaattctatataggtagcagttagagcgcatatatatattttcaacggcatgacattagtagtcatgatcaattaacacacaaaccatatatttaaattatatgaaagtgttagattcaatataaataaataaatatatacattttaaatgaaataattatatatatatatatattaatatacatacttatttatatatagaaagttagaaactacaaggcacacaccaacccaagctagcccttgggtaatctaaattagttgacttaaataagagagaggacaagagtccctatatggggacaaccgtgattcttgacaaatgaacagtattggcattattttttttgataaaatattatatgataattaattaagtttaatattgttgtgagtgacgggccagcaataccaaacaaaaaaaaaaaaatggtgatcttgatcctacttaaattagggactatgcatatatataatttatatattttatctttttgtgatgctctgtgtaatttattcatatgtaacatgtctttaccaattcacaagtcacgagcagacgaactaataaaccctttttatttaaagaggcacaagattcttgattcgtcgaagttgactactttgtccctgcagttatttaattataactacgaagattctttaacatattaactttttgtagctactctaaaaatgaactattattcttttaggtttcacatcaaaattatgagaaatgttgtta

SEQ ID NO: 16781 - DNA, 8312 bp, Cannabis sativa
aaagtgagagaagaagaagaagaattactatacatttgctttttatataattactaataaaatagataactagcttctcattttctaattagtggtgcaattatttattcataaaggcttgcgaattattggataggaaagcacttcaattattgaagaatcttcttgatgatgacagacaaaggctgttcgagagtgcccaatcaaaggtaaatttaattaagtccatactattttgtacatttcaactatcatctcatatttcatttttcttttcttttttacagatacttatattgagtcgtgattttaagagtacgcacccaacagagttaaactctcatcatgaaggagttgtttccaggtcccctaaactcagtgtctcatccaacaaggctggaagcgaatattgcagaagtaatcatattaatggcgaacaatccagcacgaaaggtggcgaaataacgaggagaataactgattttgaattatccaatccaagttcaaacaataatgtcacgagttcagttggctgttgcactgggaaaaagtctgatgatgttagagagattaatgacttctctaaggaagtagcaaaagcaatcaaacaaatagattcccacgttttggctttgcaaattttgaagactggtacccctgttagaaacaatgacaacactttgtttaaggcattattggagagcaagaaaaacggtggtattggtgagtcaccttggggtggaaatgcactgttgagtcgccaaaatgaatcgaagagccaacccgatagtggtgccactcaaaggattagaaatgttcaaggcttaagggtgccactccatcagaatgatgatccaacagtcaagaaagatacaactaagaatgaagcgaaaacagtagtacctccgcttgtgtcatcttctgatcatcctgatcaaaagttgagccgtagattgaatcgtgagtcaaatatgaagaagaagagaaagccattaactcgtcagataatcatgaggccgactgtactggaccagatagataaaggtagtcagaaaagaaagaaaacccaacaaaagataattatgtcttccagcaagcctagctcatcagcaagttcatatccttcatcttcacaaggcgaagaaagtgaaagtgggtcgtatttgactccaagctctgcagaggatgacgaaaatgagcgacaaagtagctccagttccggaagaattggagaaagacggactaaaacaaatgtaccaaaagaaaggccagataaccgtaagtcaaatatgaggaagaagagaaagccattaacacatcagataatcatgaggccgactctactggatcaaatagataaaggtaatcagaaaagaaagaaaatccaacaaaagataattttgtcttccagcaagcctagttcatcatcaagttcatatactccatcttcacaaggtgaagaaagtgaaagtgggtcgtatcgttcatcttcacaaggcaaagaaagtgaaagtgggtcgtattcttcatcttcacaaggcgaagaaagtgaaagcgggtcgtatccttcatcttcacaaggcaatgaaagtgaaaatgggtcgtatttgactacgagctctgcagaggatgatgaaagtgagcaacaaagtagctccagttatggaagaactggactaagacagactagaacaaatgtaccaaaacaaagggcagactcaaaaaaaggaatcggacgattgaggaggttgaaaaacaagttagggttcatcttccatcaccaacatcatcatcatcaccaccaccaccaccatcaccatagcaactggaagctattgagaaatgtatttcactccaagaagaaagataagaaaattagacatggagggtttgaagctacaagaaataatcagatgaaaaaatcagtggtcaaaaggaataagaagcacggcaaccaggacaatgttgagaattttcaagctcttgtggaggggctaatgcggcatgtgggtggccaccattcaaaggaaaagcccgaggtgaaaattgacactaataaggtgttggtgaagaggattcatttgtggcaacagcttcgtcgtcgtaagggaatgaagctacctaatagacaaggccgtgttaaggtagtagggtttaaccgtaaaacaccaaacctaaagatgtgattgtaaaacaagagcttattataacaaagtgcccttctttatctaaaagagtatatttatttatgaataggttttaagaaccatgccttctatgactgatacatgacgtgatgctatatcctatatgaatgccatcttttctaaaacaaagaatcgtattgtatactgtttttgtatactgctcaagggcattgtaagaaggtaagcattatggaaattttaatcattaacagggatcaaacggggcagtaaattaggataggttatactatttataataataaattcagaatcaactagactgctcaagaaaaaacatgttgtgattaatgaacatggcattagaaaaaacaggtgaacaatgagtgaatagtatcttcacaattactacactgtgaatctaagggtagttttcaccccaagtaagaaggaagaagtggggtaaaattaaaacacatcccacctttccaggaaataatacaaagaaacatttaactttacctgtgtgttagctagctggctgctaattaagagtgagctaaggacgagagttgtcgccaactgtatatggcaaattttcggccagaaaactttttacttattttcttgtgtttttcttctttttctatgctctacaaaatttcccaatactcatgaaactgctgagtgcccacttttctgcttccatgaaggggttgagttttgagaaccttgctgaagttcttccttcaatcgtttagttggagaagattgtcgtgaactagaagaatataacagaattcataaatataaatacaagttcaaaagtagccatcataaaaaatcaactgctaaaatggcatcatgcaagcaacttataaaagctgatgaagttatatatattcaattaattaatgacatcgattaaattatatatttatctagatgccagaatctatctctctcctattgcccaacgaaacttgatagccttagcacaaacagttacagaataaaagatttcacatctgtgccaccttacctcggggaattggcgcgcttttgcacttgctgattgactgctgtggaagatgccctcccaggctcaatgtcagaagcctgcagtaatttcacacttgtcattaatgtgtatgaatcaataagcaccaatcaagagagagaaagaaaatcagaagaataaggacagacaaattgctttaaaaaaatcaatacatagataacagaactctttatatcacacatttggtaaaaagaaaagctattcagggagcttgtgttgcacatgaagagaaaaaaaaaatcatttttcaatccactgaatacattatttgggcacaacacaaacatacaaaatttgacaagaaataggtggtgtttggttggaagaacataacaatcggaatgagaatgggaataggaatgagatggaattaaatttaaaatgcattaaaaaattgataaaaaaattattaattttttttctattcttgcattggaatggtcttcccttcaatttaaaagtggactagttattctaccaaaatgataaaaaaattattccattagaatgaaactccaatactttaaaatgtaacaaaaaaatgaatggaataattgtttcctttctattccattccaaatcattacctccaaccaaacgccacctaaattcataaatgattcaaaaagaacaaagtgcattgaaatatagtttttacaagcaaaacactaaaaacagtgtgaagacagcctagcaaccatgggggaaaagttacttttttcccttacaaaaagataacttgtgtatcaacaaatgatgatgaacaacattattgataccaaagccaaaaaaaaaaaagaagataaattaatcatttgggaatacttggataaggggtcgaactagggactgaccaccaagctcttaccttttaaataatgagctaatggagcaggaaatggcagcagtagcagacatggagtcagctcactcccctttttcagtgttttagccatcacattggtccaatgcaaattttgaaaaaggagtggttttcagtagataaccactaacctttacctggaaatgtctttgcccacataccctttatccaagcatcacctatgatcttgagcataaaatatcaaatcaattactgaaagcatcatttaagaattcccacctctgaagtgctttctttggccaactcatcttccccaactgcttctgttgatccaggcttgatagtatcccatagaaagccattctcatttccaagagaaagcttattaaaatccctgtctactgcagctccagagcgaggtgcaatataagccacatatttttctgccattcaatgcatgaaaagttacctcagcatcttttagcatatacttcacacatgtgatactttgtccagattcaaaatcaatttaatatacatgcatcaaaaagtatcccttcatttcaagccccatttccccaaacaaccaccctattctacaggaacagaagtcccacctcaagctcaaaaaaacatcttatttctatttcaagggggaactaactttgaacaactcatttcaaaatatatagagaaggaaaaaaaattaacaatacagatcatgtggctacacacacaagaactcatttagcacgacttagggaaaaaggaaaaaagaaaatcaatcacaggatgttataccagctaagttatgaagggcgttctcggcggcttgttgttgggcatcctttctagtcttacccatcccaacgcctatcttctcaccagtgaacagtacctaaaagtgccaagtcaacagtaagcatgatagattcaaagaacagataaagatagttccttagaacgtacaagttaagcaaaaggcttatttgtatgtacagtacccaaactgtgtattaacaaataggtcctcattatagttaaaaaaataaataaataattgtaaatattgaaaaatctaatgagaattttctaaatgtataatctgataaaaaaaattatattaattaatataatttacaggttgagatcattcttaaaacacatatgagatccataataatattgcattttgttaatataaactatagatttaatccttgcagaaaaagaaaaaacaaacaaacaaactttagttttgttaattcgtatttaatatttcactttatttttataattaatttaattatattgttaatatttttgttaaaataaacttatatattttttgttacagttggcatcaattttttagtatttagttcttgtttattttatatttaagtttagttttaattctatttttaacatatatatgtatatacataataataatatggtcggaaaccaatttgtcaatacaactcgagaccaagctcagtatatttttaatcattgcaagatttttttaaggtggtaggcctagctcctagggacatatttgcattaaaatggcaagtttgtaaaccgactgccaaatataattgtatggggacaaccttgccaaaaacataatttacggactgtgataagcccaaacataactttaatattaaaaaaaaaaagaagaagaagaattaggaattctttagtatcaccatttaattccaatctcattgcaacaataacatgcacattgcctatttctacagttttatttaatttgatatattagacatgaaacaaatttcagaaacactaccttttcctaacatccttgtgaataaatttatgattggtactacttcaacttaatgaatacaaactaatgttttattttttgctgaatagaatagaaactaatgtatcatgcaagaatatcactgaccataagtacactaaaggttaaacaacatagagacttgagagaaagaaaaaggaaaatgtctaccaacctccacagaaaactgcaaatccttactggtgctcagaacagacttaaattcaacctgtgaagaaaggtatatatgatatacaaaactttaaaaacaaaaaaataataaaaaattaatgtaatcactcggtacccttgagctgcatctacgtgcaatttcttgcaggactcctatagataaaggagatggtaacaggttcagctttccaccttcagcatggagttctctattggtagaagatacctgattttgcaatgcaccagaaactgcaaaaggcaataatcagatagaacataaaattaatgataatatcacaaatggaagactaagaggaaatttatgggatttgatttaaaagggagtgacccgtggtcaccattttcactaaaaggttcaatgagtgaaggaaattcctatgtataaaagaattatgtgatgtgtctggaccaaaaactaataaggaaaaaagcaattaagtgggaaaagaggtggaagcatattttttataaagaccaatgataacaaactttaccctacacgcatacaagtcaatgttaacaagtggggcccatcttacttttgttttggtgaatggggcccatcttacttaaataaatttagttgaatcttttagcaatgtaaatgtgtaaagttgtgtgtgatttgtgtgaagtcgctgattaactactattcacatcttgtaaaaagcagcataatgtgtttgcttagaaaatactttgtttagctgtactagttcttttctgatctgtttgctagtgtgtacatttgcttccgctgagggcacattatcatcttctttcttgttttcttcttttaaaaagaaaaataaactccctctagcaaagaaagtaacataattttcttacttgcaacctaatacctaagtttgttgtgtgtaaaaaaaaattatcacgcaaattttccaattctcttcagttgtttgacataaatttttccaggaaaaaaggataaaacctaccaggtagctgactggtaagagaaagttttggcatctgcaaattattcccaatgtgtgcctgccaacaagaatatttcaaccaaataaggcaatctatagctactggtaatttcttcagctatgctgacaccaacagcctctcaaaaataattgtgagaaaattcagaacaaacctcttcactcttcacctcagatgtttgtgaaagtaaaccagtagaagtagagctcgaaggcatataagaagttgagttctgatgagcccgttgtttgtctagctttaatgcatcagactctggaagaggccccaaaggacgattctttacctgtcctttattgatgtcgtcatctaccaaccaaccaccttgtgaatgtactggaggtgctgaaattggtgcaggaaatctagacagaattggaggttcagcagagctattgtttcttaagtctataccatacttcaaagaaccaactcctcgtttcacgtcatgatcagaaaagctatctcgtctaacaggaggtccaagcaaaccaggtcctaaaataagaagtacaaagaacttacaatgtgaatcatgcataacaccccaaaatcaagacatcataaccataatagcagaaagactccatactctgcgaaggcaggagtggtcccaaagatgcagggttgatagcatttggaagaattggaacagaagcctgaaaggtttcagatcttatctcagcattgtttgtcataggatgtgaattcgattccataatttgcctatcatcctgaaagaaaatagaaagaaaataaaaatatgttgttagtttctcacccttagacatgtttagcaaaactagcatatagtaaaggttaatccttcacaaaaatcttgcaaagcgtgagaaaacagacaattcaatagataattaacaatgaaaacttacagtctggcccaatctacgttcaacttcaatcccattcattccctcattgacaagtggagccccatttggcacaaaaccagcattctaacattcaccagttcaaagtacaggttatatattttaaagatagtgaatgtacacattccctataaccattaaggatatgaaatatttttttaacatcacgtacctgtgacatcaagtaattgctcacatcaggagatggaggtaaagtggccacatcatcttcataaaaaatatcagagattcttcttaa

SEQ ID NO: 16782 - DNA, 4406 bp, Cannabis sativa
tcttggtaaatgtagaagcagttattttgcggcatagagctcacttgcaactttttttatttcagccttcaaagtggacttttaactcgcacacaattttgaagaacagcgagcaagcaccaaggtgaaataatttttgcattacccactctttgcaagaaattttcctttaatgtataattagttaagtaccctcaagatttggtaatttgaggttgtatttgttgtttgatgccaataggacccattaagcaatcaaaaatgtttgttactagtttctggttgataacattagcaatggtgttatgtattgttccagggccccaatttttaccgaggacattcttggtggtgagggtggagagggtgaagctgcactgccccaagaaaggtctttctgggctaaatatgtgagttttcaagcattcctcattttaatctattgagttcgtttaatttaaaattcttaatgagctctatatattctatcagtggatgtacctcattcctctcggactcattgtcatgaatgccataactcaagcaatgaatctgcccgaggaacaggctgctggccaagctcagcagcccactgcaatccagcgtggtggcccaccttctgctgtgcggagaagatagagtatcagctcaactccatctgagggaagttgtaggtttcataggtttttaacttgacttctgcttgtatcattatttctgtgggaaaccattatgagattatgtaaatttttataagttgttaaattaccaatagggcagttttatgccaacagttaatgcacctattttgggaaaattttcataacatttaaatgagctgcaaattgaagcttttttggatctctaagactctaatagtcgatttttgctgaaatacattattattgaaagccgcaggctaaaagcctttgccccatacagttactacagaagaatagctgtcaatcgcagcattggtttatgtaaaaatatactgctaccataaggtaatctagcaagcaatgcataagaaaaacacattaagcgtcattgctctggccaagatggataaacttgactgggtcttaaacgtgaactacaatggatgaaagacatttttttggcaatgaaacgatttggaaaacagacgcggcaaaaccaatcaaagctcgtcctgcaaatcagaatagtaaatcatattaagtcaatgctcaatgaaactatcacaaaattaaatttggaatttctatgaacacttacatgataatcatcccagtagcgatcataacgctgcacaagagaacatgaggatcataatttggaaaaccaatcaaaactgatctaatgggtatcaaggaaaacaaattcaatccaatggtgtgacaaacctttctatatttgtccctgtatttgtctcgccgccctcggtggtcatgacccctctctcgtctccttctttcgccttcttctctagctcgccgagcttcctgcacagagaaaggtccaaaccaccattgattcgagttcatccaaaatgaaggactacaggaaaatttagtcagcagtaaagaaatgaacctcttcttcctgtgcttttctcattttttctgcttcctcgaaggaatccttttcagcctaaaagattcagaaaaaggccaaagtgatgaacggcatatgccttaatttttaagtatggaatatgtattacttctcaaatacttacctctctatgggcaaatacatcctcaacaacttgttttgcatactcaggatcatcacagattaaaatgttgtcaaaaactgaaccagccttaacctgcatccaaaggccaaaacccgataaatatatagtaatcagaaagctaacaataaacaataccctgaggtttagtatgacatacctgccaaacttcaatgcccacatatttgattggcttaagcacatacagatcagggtcatcttcaaactctgcatattaaaaataaaaccttgaatatttctgcacaagttcttttcttgtctgtcacattagttttactgctatatacctggattatcaatatatggaaccttccattttcctttgtagttgggattcttgattttctgtcatatcaaaacaagttaaataaatgagtaaatgcagggggaaaaaaaagagggaaaagatcaaagctttaagcatgataggtaagatgtaaatgcagtattgatgtaccttgcgcttccacggtcctttgtaagctggatttggtacctttggtggtttccatacaccatcctcatcttcatcccagtgttcaggctaatcaaatcaaggaaaaaaaagttacacatcaaatcatgatgactgtagtaaattaattaagaaagtgaaaaggaacaaagaacaaagaaccaaagtattagtaatcaaatcagccttgttcgggttcgattagcacattgaaactaagtgttccataaaaggaaactaacctctttagcttttgggtcaggaatttctcttggaatagaatcataaccctgcaaatcaatatatgtattatttatgaaacgtagtttataaacacgtaaaatgagttggaataagaaagaaataattaagaaactttgaaattacaaacctcgggtttgaagtcgttaggatcatcaatgtactctttatcctcccagtctgcaggctgcaagaaacagaaaaaagtcatttccaagtttcaactacagtcttaggataactaaccataaactggtttatttctttttacaattgaccgattgctgattgatgataatcatagagtacaaaggtcataatacatggaagtaacctcattttctatctgaagtgtatatctagctcaaccatgagcagcggtattaccattgcacaacacatgagccaaatataatcataaactagtttaatttgaacaaattttgagtatttaagctcttcgtttcaccttctttgctttcaaatctttaatctttcttggaggaagaatatcccaatctgtgtacatgcttcctgagtctctttctctgttgtccacaaggacactgtaggttgcatcaggcctaagaatgaatgtgtagaaatgagtcaacttatcagtttcacactgcaaatctttcttgatgggataattttggccctggtaggatagtataacatgaagcttctttgtgtctgtgccacatagatccggtccgaacattaagctacacaaataaaatttgacagtcaacatgaatgatcattgacacatgtaacaacagattagactagagtaagaaacattcttttcaacaaacccaaatgaccatataagatcacacaaacctataaggggtgtcccctccaaatttcttttgattgacaaatccggagagaagctttatatagcccccaccacattcaatctcctgctcaaaccttacagaatactgtaggaccaatgttttgtttttattggagaactctggtatcttggcagagatggcaaaatgtttggcatcactggatgtttgaatacctgccagaaatccatatttttcttgagtaacaatgaatttaactgcatttacatatttgaggctttcgcaagttaaatcaaataaaaatttacccctggattatttagcataacagaaattccccttaaactaattaaactgctagaaatagatctactgttgaaaaaacttaacggaagagtaaacctggtctgctggagaataacagttaagatttttgctccctcaagtaatgtaattgcaaaattgccctccaaaagagttgtactccagcatttttacaaagtgaaataattgggaagcacaattatgcaagaatgaaaattaaggaagaatcctatttgtccactaagttatatcaagctcatcattcttatgactctatggtgttctaagacaataaagacctcatcctaagcttctatgataaccacttcctatgttctgccttcattctatttttaaggtcaaagattactgagcttgaattgatatgcatagtttaatactaaaccacattttgtattttatatagaaagtaagagaaaacaacacctttatcatctgggtctccatgccactttccctgtgtgtgtataaaagaaccagcttttccctctgtccttttccagtcagattcaacccagcgagattgccagtcatcttttgtaacccaaaacaaagtaaaatcataagatcttagtgataaaatctcagctctttcatacagtttcgtacattttagtgataaacaaaggaacacaacacttgcccagttaaatctaagtactttcaagtcaaaagaacttcaaccaactgccaaacaaaccaaataacttatatagaaagagccaaaacagacgac

SEQ ID NO: 16783 - DNA, 4077 bp, Cannabis sativa
  modified_base (46)..(46): a, c, t, g, unknown or other
ctgcttcacctagactttactcacagatgctaagcccattaacaantgatcaccaacaacatgggctaacacagcaaaaaactatccaatctgaaaacaaaaaaaaccagcaaggagggggaataaaaagacagggagttatacaaatagtgtattagtgtgtgtgaaaaaacgacatgtcgtctatactatgaaaacagtacaaccgaacattctagcatgacaaagaacgttatttggggacacgtgtcgctttcgcagagtctcgtgtcacattttatataacttccacagagagacttcgaggtccgactgagaacaacccagaccgttctgcttctttccctcccattttcctaatcacatttcacaactttctcaggtaacctctctctctctctctcttctacgctatgatttgtttctgatgcatgaatatctttttcttgttcttttctttctttctcagtatccaaacagtgatctaggtggacctctaaagaatctgtagttttctaaatacggtaatattttttcccttgacatggaatgttctgatgaatggtatgttcctctgatgttaatgctgttctatcaatgcatgtatgattatctttcttctaaaagtaaatttaaaaactacaacggaaattattctgattgaaaatgggttatatgcatggtaattaatcaaatcgtaaagcaataatagaatttgaagtgaaatcaataatgagtagttgtaattttatgttaaagtatcaatcaaaggatatcctgaccaatattttttataatttgtgtttcaaaagttaaatgaatgatgaacatgttcttgttcaaaaaaaaataaaataaaattatgaacatgttctgaatttgtagtagtttgaagaactacatcttccaataacggagttaaaaggaaaaaaattgttgacaagcaagccccaaaagcctgaaaatgtttttgatttattttttatactccttacatttggtttgacattttttttctccacaagaagagagttcacacaatatgcagagggaaagagaaggttcaaacgattttttcagggagtctggttttgaaagaagtatgtttcctagtctttttggcgggaggagcccatttgatgattccttcttctctcgcccgcttggaagcttgtttgactctagtatgttcggtcctagtgctgcttctggtgctgctcaggacagcttcatagaaaagggtattaccatagaagaattaacctctgataatgaggaggaacaaggaaacaagggccctgaggacaacaatgaaaatgagcgaaatcaaggcaaggcaagcagagaaccatcggttgaacatccagatgatatggttaatggtaatcaagctcgaatatttggatcattctaactttacaaggttaattatgtattattaaaccctcgatggtttccttggttgttgtagaagagagggaaggcaatgtgatacttcggaatgagccttataagatggaaaggccacagcctcagcttcataggtacaatgttcagacttgcaaagtcacttacggtggtgtagatggagcatattactcctctacaagaactaggagggcaggcagtgatggggtgagtagaagttgtgactaaaaactttactgtttcttatgttattattgctattgttcacttttttctttcttatgtgattatgatccaggtagtcattgaggagaccaaagaagcagacaaaacaactcgtcaagcagcacataagatctcaagaggaattcgtgacaaggtttacattgtttggttattatttgagtgcttagtcatagaactataatacttgtcaagaaatatagctatttcaggatttaactgtcaaccaattcatggagttaagtatgagaaaatatattaaccgtagaactctcacttttgatgcattattagtttctagtcaatgagctatgcaaacacaatggattttcctcaacatctccttccaactttatgttgccatgctcatgtgttgtgtcacaactgttgttaaataatgttctatatgcagcggtataatccttctcatctaaagtacagcaatagcaatgaaagaaacaaaaagaatttgtacattaataaaattgaaaactgagatgaggtagttgaatgcttatgcagggtcactctgttacaagaaagcttaatgctgatggtaaggtggatacatcgcaaaccttacacaatttgaatgaaggtttgtactagttgcttctcattatggatttcttgcatttaggtaggccaatattataaattagctttgttactgcagatgagcttgctggatttgaagaagcttggaatagtaatgccaaaggtggcatggctggctggagagatagatttgatatgcatggtaatgctggtgaaattggttgatgtatttcattttcacatgtttagatgtatattggtcatttcccatttacgtcaaaagaaattaaggtcaaaataataagttaaaatcaaagatatagtaagattaataaatagcatgatgattgctcatcattgctatatgcacaatgtagactctgcttgatagaaaggattgggaagatagggaggtggagctatggaaggatttgtgataggataatttgtttggtggaaggatcttatatgggaagggattaggtaatagactgtaaaatcttattaaatttggaatacctttaaatttgatggatttaggagagatttgcttacttttcaagtgattaatttatttcatatatatccactttccttcctaccaaacaaaagcttgtttttcacctcttactacattgccaaacattcggaagaaaaataaaggactatttcctttccaaataatcaacccctccttcctattaaacatatggggtgtttggtttgggggctggatttggtgagtagagcggtaagagtactttagactaaggtaatgtggaactcaagtttggcgaaattagaggtaagaggagtttagattaaggtaatgtggaacttagtgttgaagggttcaagattttcttcaaatagagctaaaaatgggatccacttgaagatacaaactttcaagtcatttaatataaatttagtttggttgcatttgatattttcattcccagaagttactaaatccccaaaatgaacaccctcagtgttttgtaatgtatcactaccaaaaaaaaaaactaaaacgtttaccttttagtcaatttttaaattattatttacttacaaaataagcatatatagttaaactattctgtatcagattatattcagacaatagtaacaaaaagtgtaaactgtaatcaatctacatttaaattgaggtgttaggacttaacaaagaaataaaccctcctagatttagcttagtttcaactatatataaaatatattttgtcttattcaacttatttaccattacctgaatttcaaaagtatacacggtaattgattcaatgtaggttctggtagaagtgaacaaaagggagactctttcatggcaggttggctcctaccttcttcagaaggcacacaaaagaccagaggtacggcaccacataacgaagccagagccaaaaaagttgtcagaatcaatatagaataaagtttcttccatatgatagtgagactctacttttaccatagagttaatccaatcgaactttgccacctacacctacaattaaaatatagtatacgctgattatcttttaggtactgaaatcatatgtgtgttggaaagccttgattgaatgatgtattattgattctatttggggtgtgaaagatctgaattctatggatataaactgtaccatttttgggggattcaaatatccattccaaaaattgtgttccaatatctttcttaccaatgacagacaaaaaaattatgaagcaaaagtgttgtgatcgatgatcaccttgcaatcaagtttgaaacaatgaaaaccaacagcagcaatgctgtagcagtgttgcagcaatactggtataaaa

SEQ ID NO: 16784 - DNA, 2052 bp, Cannabis sativa
ctcctgaacagccaggtgacaatgcaaccaaagctgttaaagaaaagttcgagcgttggcagaatgctaacagcaaagctcgatacttcagccttggggcaagattccccactgcgtgacctacttcagccttgcctaggtggaatatatttcctcctttcatcttttggcaggtcttgtaactggtcagtcctaccatatgcccttttatgaagaatttgttcatcattcggccaaacgggaggcggtcttttttgggaagcagtggagcccactgagggtgaggttcgcccacaatccctagggcatttattttcctttggcacataaggggactttccctgaacggggtccctttagagtggtcgttcttcaacccgagatctagccctttcattgagctgtctgatcagttcatttgcctccttattctgatggttaattctacctgatgggcttgtaggatcacaacctactgatcttttctttcttggaattcacatctctgctgggtgaaagaatcactcatggcaatgcgtgtttcttcttgttaatgatggagaatgtttgtttgatctcgcacttgccctatggcgtatcttagtctggctagcttagaatcttcccccaagtcaacatggggctcgttgacactagtttggccaaccccaggcctagtttttctagcgtatacttggcggtagctctaattaaaggaaccccccatggtactttgggtaggttttctagcattgacactgagacttgcctagtaatttttggatcttgcctggtattagctaggacttcttgtcaaaaacctgtagatgggtttgcccaaggtggtcgggcaaggatgaccagattgtcaacaatggatggaacccaaacattaggatccacaactatcagatcttggggttcagtggacacacttctccttgtcaagaccatggtgattattaggtgaaaagagatgagatcttcataaaaatgttaaggcaatcaatgaaagtaccaaaatattgactaggaaaattaccaactgactcgaagtctaataaacattgagtaattgtcaacaaagagttaggaataaaaaaaaaatagaaagaacacacaaaattatagaggttcgacccccttaaatttgggtaatgacctattctccttttagttgtattgattatgagataatattgtgcagatcactaaagaagacaaaatgaattctagatacagctctcaagatgtttacagagaatattcagcaaagtgttcttaagtgctagattgtgatttcaggtcctttcctcctatgaattaatttagtatttatagggggaaggctgttacaattagaactgttaaaggagtaactagaaagtaaatacccttatattctagggtatagttacgatctgttgaagctcttacaatttgggtagatcagtccaatctgcatctataggatacagttcgagaaatttgtggaagttttttgatgaagaaattaaggcttgtgtagccttgcgtgacaaacctggaatcgttcaccctggttggcgtgttgacaccctgttaggcttgtctttcttatgaaattatttgtgaaacattcttgcaaggtgagtcaatcttcccttctctggccggcataatgatagcacaactagatgcttcttggaagtacatttgtagtttatggatatcagcttcatatgggacttgtcacgcatacttctacttggaagtctcttgtcatattaagggtgcattggcttatatcacgcgtaggtgccacgccaaaggtgcaaattttgagataatagaaatatatttttttaaaatgtgtgcaatgagttttaaaaagataactatagaaagatatttttttaaaataaaatatgtctagtttaaatttgaattacaatggttaaaaaaaagaataacactttgggtgcgtttggaaagctataatgtaattggatttgtgtgtaattggaggtaattacacaatttgacatctttgtctgaccatgtaattacact

SEQ ID NO: 16785 - DNA, 6354 bp, Cannabis sativa
actaaaattagaaaaaagtccttaaatccaacaatctcaatagttcagggggtattttcaatgaccttaaaagttcaggggcatgatctaatacatatcaaacttcagagacaaaaatcctaattaacctaataataattatctttcataaaacaaaaaacgatataacatatcttagtagccatattttataattattttaaagatttttcttaaatatcaaaaaaaaaaaaaattactaaccattattcataatataatgtggtagtgttattatttattttctaagaatcaatgctcttatttatttcaccataaaatattattgtcatttacctaccatcaatataataataatattaataaatcattatcaaaaaataatattattaaataaataaataaatcaatcaataaactaatatatatctattttcttgggcagagtcttgagcttctcttctcttctcttctcttcagtatataaattttttttattcacattaaattgagattgagagaacgataacgagaaagtgagacaaacaaggcatggaaccagaatctgggatttccatttctcaacgctccacttctactactataacccaggtttgtgacctttctttccattatatatatacatatataatatagctatgatgaaattaaagaacgaatctttgttagatctcgagtttgattggtgatgataatgattcttagtgttgtttactaataacccatttgatttttagcaactttcatggacaaggatgtcgaggaatttgatactagcttatcaaagcttcggtgttgtttatggagacttgggtacttcaccactttatgtttattcaagcacattttctggcaagttacagaaacatattagccaagatgcaatctttggtgctttttcattgatattttggactcttactcttatccctttgcttaagtatgtctttgttttgctcagtgctgatgataatggtgaaggtatgtgtcaattcaatctaatttcaatttcaatttcaatttcagtttaagggttttctgaacttctctattcaattcattttcaggtgggacttttgctctttactcattgctttgccgccatgctaagtttagtttgcttcctaatcaacaagcagctgatgaagagctcactgcctacaaatatgggccatcttcttcttctcaacattctggttcatctcctttgaagagatttttggagaagcataaaaggttaagaactgcccttttaattgttgtgctttttggagcttgtatggtcattggagatggtgtcctgactcctgctatctcaggtcactttccttattttattaatatttatttatggtagctccttttttttttttggcttaatatgttgcaactggtactactattatttgcttgtctttatttaacatgttgaaaaaaaaattgcagttctatcttcagtttctgggctcaaagttacagaagagaaattgacaaatggtaagttgtcattatataggacatgactatagtaggacaccacttttgcccctatcagtaggaacgtctatattttcagcatttggagaaattatatgacgttctatattatagactgcacccttttcatttttgaaaaattctgaataatttacaatgtctagatgtctagaacaaggttcgatgattcaaactgaatgtttgagtcctgttttcgacattataaattattctaaatttttttaaaacaggtgaaatctcaactataactttaatgtatacagttatataagaaaaatttagttatagtttttctaataaaaatagagatgtccccaccagtatagacaaaaccgatgcccctgcagtagaattttcctttatatatgtatgaatattttcttttttcttgattttttatgagtgacttaacaaactatgtagctgctcattgtctctaggtgaacttctcttgattgcttgttgcatcttggtcggtctgtttgctctgcagcattgtggcacacataaagttgcatttttatttgcacctatcgtaattatctggttgctctccattttttctgttggtctctacaacacaatacattggaacccaaaagttgtttatgctttgtcaccccattatatcgtcaagtttttcaatgagactggtacagatggctggatttctcttggtggggttcttcttgctacaactggtatgtgctatatcccacttaattggaaataaacatcattttcattgactttgttatgttaaatgtagttttccaaggatgaaatgtcgttatatttatggagtatatgtttatgttagttaaattaacattaggcattttccaatgctccaggaactgaagctatgtttgcagaccttggtcatttcactgctttatcaataagggtgagtttttttaaagctttttatattgaatttctttttttaaaccttataggaggaaacatgtacatattggctggtttggaaaatttagttttgtgcaagtaaaaagccgagtaaaaggaagacaaatgagatccaagaggtttagaatgagtagttgggctcatggtttgctcccatagatagaaatttgattcttcatgagacttaccatttcgctcgaacctcatgctttcaaaagtttgtaggttcaaagggaagacaagtattgagttagcgagtcatgtattgaagtaactccattagtgcttcttgaaaagtagagcatagtgatgaagatatttcttcaaaatcaagtctttctttaccccgaacccctgttgcaggcttttttcaccttgatgtagtaaatgcttttcagttatcaacaaatgatagttatgtctccttttttgtgtgcgtgcagcttgcgtttgcttttgttgtatacccgtgtttggttgtacaatacatgggtcaggctgcatacttgtccaaaaaccccgataagattcattacagcttttataattcgatccccggttagtattccctggcattgttgttaatattatttccagaattacattttagcatttgaattgctctaattgttctttctttttcgcctaaactgcagaatctgtatattggccggtgtttattgtcgccaccttagcagctattgttggcagtcaggctgttataactgctacgttctccatcatcaagcaatgccatgcccttggttgctttccaagagtcaaagttgttcacacctcaaaacacatatatggccaaatctacatcccagaaataaactggatactcatgatccttactcttgccataaccatcggatttcaggatacaaatttaattgggaatgcttacggtaagatgttcattgctaaataaattaagattgcaacttatcaacgtgtagagatttttttgtattctacatgactaattttttcgcttcgatttgcaggacttgcttgcatgacggttatgtttatcacaacattccttatgtcacttgtcataatctttgtttggcaaaaaacaatgtggctagctgcagcgtttcttcttttcttttggctaatagagggcgtttatttatcggccgcattcataaaagtgcctcagggaggatgggtaccgatcgctctatcattattcttcatggccattatgtatgtctggcattatggaacaagaagaaagtataactttgatctgcacaacaaagtttcactgaagtggttacttggtttaggccctagcctcggtattgttcgcgtgcctggaataggcctcatctactcagaattagcaacaggagtaccggcaatattctctcactttgtaactaacctcccagcattccataacgtgttagtttttgtttgtgtgaagtcagttccagttccatatgtttcgcctgaggaaagattcctcattggtcgggtttgtcctagaccatatcgaatgtacagatgcattgtcaggtacggttacaaggacatacaacgagatgatggtgacttcgagaaccaactaatacagagcatagcagagttcatccaaatggaagcagtggaaccacaattgtcggggtcagaaacttcatcgttggatgggagaatggctgttataagcacccgaacaaactcaagcttggtagtgtctcaatatgaggacattgatgggattgattccattcaaagcagcaaatctcttaccttacaaagtttaagatcagtctacgatgacgataacccccagttgaggaggcgtcaagtaaggtttcagttgccaccctcaacacccggtatggatcctgcagtgaaagacgagctttatgatttaatccaggctaaggacgccggggtcgcctacataatgggacattcatatgttaaggctagaagaacatcatcatttgtgaaaaaacttgtgattgatattggatattcatttctaaggaagaattgcagaggaccagctgtggcacttaatattccacacatcagtcttattgaagttggcatgatttactatgtctaagtctagattttttgtttctaatttgtaggtttcagttctaaagccaaaagggttattatatatatagctctttggaccaacttttgttaagtctgaaggctttcttaggctcttctaatgtgtatagataaagtccaaattcaagtcgagctttttcatttggcatatcaattctaataagctattttttttttcttcaataacccttctcatatttttatttgaaatttttacacaaatacctaaaaattactttatatatatatataatgtgtaatcatgaaaaaagctttctatttcttgtgagtaaaggaacacaaattcatttgttttgcagccttttggcgtgtgtgtttggtaaatgtcaaagtgttttgattgttgactaacacctcagatagcaaaagggtttgtttggttgcagcttcacctatctagactaacaagcccttatcacaataatgtcaactaggtcagctaattaagtacaaaagttcatgcatgaaaggataattgtgtgcattaaagttagatcacctacttttaaaacattctaatatcataatattttgtcaaaactcaagcatgcaatatgcatatgtatatgtttatgtatatagctatcaccacatatgaatattgaacttaagaggtacaatattactaattttttggttgtttgaaaacaaggatgaagatgagaataggtttgggaggaaggagatgttatacgttaacattgttgttgattcttcttcttgtgatgttggtggtgcatgctagtggtaaagatgggcaaggtgagcaaagtggccaagatgggcaaaacaaccaaggtggtcgaaatggacaaagtggccaaggtaggcaagacaagcaaaatggccaacatggtcaaaatggacaaggtcagcaaaatggacaaaatggacgaaatagtcaagggggacaaaatgaacgagatgatcaaaatgagcaaggtgggcaaaatggacaaaaaggtcaaggcggacagaacaggcaaggtgggcaaaatgatcagaatgggcaaggagggcaaaatggagaagatgatcaaaatgacaatggtgagcaagatggacaaaatggtcaaggcggacaaaaaggacaaggtgggcaaggcggacaaaatggacaagggcaaaatggtcagagcgggcaaaatggacaaggaaatcaaaatagcaaaggtgggcaaaatggacaaggtaatcaaaatggtcaaggcgaacaaaatggacaaggtaatcaaaatggtcaaggcgaacaaaatggacaaggtaatcaaaatgaccacggtgggcaaaatggacaaagtaaccaaaataatcaaggtaatcagaatggtcaaggcggacaaaacagacaaggtgatcaaaataatcagggtgggcaaaatggacaaggcgatcaaaacaatgagggcacacaaaatggacaaggtaatcaaaatggtcaaggggggcagaatggacaaggtgatcaaaacaaccagaatggacaaaacggccaacgcaaccaaaatggtcaaggtggacaaaatgggcaagacaaccaaaatgatcaaaacggacaaaatggacacaatggaatcaaaatggtcaagacagacaaaatggacaaggtaatcaaaataatcaaggtgggcaaaacggacaaagtgatcaaaacaaccaaggtgcacaaaatggacaaggtgatcaaaatggtcagagtggtcaagggggacaaagcagtcaaggtgggcaaaatggtcaaggtaatcaaaacag

SEQ ID NO: 16786 - DNA, 5383 bp, Cannabis sativa
caatctttcttcccacatcaatcagtaacatgtttttaatgtcaaattagatcggttaatcattcaaaaatttaagaacatgagcttattagttttttcttccctataattggaactagggccggccctgaaacaaagtgggtcacaggaaaaaaaattattttgggcccttatgttagaaaaatgtgatatttttcaaaatcagtaaaaaaaatatataattttaaaaggaaaaaaataatttttgggcgcctgagctaggtgggtcctaggcacaggcctagcccgcttatgccatagctgggcctgattggaacctctagtactaaggctctacccatttataattatatatttatttttgtgaaatgatagaagaattaaatagtcgattagttgactcgtttttctaattttaatcccgatcttatttttaataggaagatacttcaattggattgcaaactattattttagctaattatctttaaaaaaaaaattgcatgattttttaaaaattaaataataaatatcacatatagtggggcaccaattgataatacttaattaatgattttttaaacaagctaaaaaaatcgaagcatgataatacataattaatatatagctagtgggacaaaaatcttaattaatgttttaataatttttttttatatatgtctttaacattttggagtattagggtactggaacattattacattaattacactaattaaaatcagttcattattattagccgtagttagttataccaataaattctctattatgttacttcgtatcaattaatctatgtttagggttcacacgttcaatatattaaatttcagtttgatctatggttgacattatttaattaaataaaatgatgatatgtttagggttatactatgaatacaggttcacctgattaggtgatacgataatcctggcgacataccagaggcgttcgggcgtcaatgacatatgagtaccgagcgtaagtataggctcacctaattaggtgatactcttggcaacgtactgggcgcaggtacgggcgtcagtgacatatgagtaccaatcataggtacaagctcacctcattaggtgatgtgatactctaggcaagaataaagagaactagcatcttaaactcttcagtgcgtgaggattcaattaggagagctccctttcatgtgtgtatcttgccctttatatagtgttgggctacaagttgttacatatgtcaaataggaaaatatcccttcaaaataagaaattacatcttatatttcaaatacaaaaaggataaataaatatccctaaagaataaagttgttatttgttgatgaagaatccctattttcgtgggcattttgaattgttctgaagttgttggagcacttcgaagtcttctagaatgcccatgaaagaaaccacaacccattcatgttgtccaaaatttagtatactttttagctggccaaccttatttgaaggctattcgacacatactgttattcttgatcgaccaactagggtcttgaaagacttgcctggttcttcttgtttgattccttctcgtgatcttaatatcttgagggttgaggaaccatacagcactaccctgtccggttagtgatgaactactctccacgtgtcttctgcttttgaccatgtggatgggcaaaaattaggataacacatattatcgttttattgactctgcgtcgttgactagaaacgaggttaatatttccaaatcattattagtggttgggaataacaaattctctttggctgaaggagttattaatggtccatttacgtaccttgcacaatagttgagtacttaaggggttgaacgaacctgttgtatcaacttttacttttgtattttttgagcggtggaggaaactaaacatatgtattcttaaagttatctgtgttgctgcaatctttcttcccacatcaatcactaacatatttttaatgccaaattagatcggttaatcattcaaaaatttaagaacatgagcttgttacgttttgctttcctataattggaacctctagtaaagttctatccatttatatatttatttttgtcaaatgatctaaaaatcaaatagtcgattagatttgtttttctaattctaatcatgatcttatttttaatagggagatgcttcaattgaattgcagactattattttaactaattactatttaaaaaattgcatgattttttaaaaactaaataataaatatcacatatagtggggcaccaaatgataatacttaattaatgattttttaaacaagctaaaaaaatggaagcataataatacataattaatacatagttggacaaaaattctaattattcttttaataattttcttttatatatgtcttttaacattttggagtattagggtactagaacattatgacattacactgaataaaatcagttattagccgtagttagttataccaataaattctctattgttaactcgtatcaattctatgtttagggttcacacgttcaatatatatattaaatttcagtttgatctatggttgacattatttaattaaataaaatggtgctgtgttacatgaaattaatcatatatccatccaatatactgcttatagtatgatattatatattggtcagtttagtattagccacatattttagtttaaaataaaagatgtgaaatcacatgtgtgcttgacaatatgctgatatacataatgtagtataatctttatcatatataaagaggaggttctaagtttattaacaaaaataaaaaaaggaaaaaagaagttattaaagcaatacttatagtgttttaacagtataaaataagttgaaacaattaagtatcaaattttcaattcatattatagcgcctatcatcgatattttaacatattgattaatacaatcaaatattaagctttatctattttaatattaaataatatagcatagatcaaaatgtgttgagaccctatcaaaatgaataattattgattttataattataattagctaaagagaaacatatgtatattattaatataaaggtgctgcagctgttaccgacctttttacatagataaatattttatagactggaaggggtatcgaatgaatttaattagaccacgtatcgctatataatcatatataggaaggagactaattaatatatttattataatatgaagaaagaaaattggactttataaaatcaattaattaacctattgttttgattataaacaagaatagaacgtggcaacattgtagttgtgccccttttatttttaatttcttttcttcttctttataattaatggtttaacgtactctagcgcgctaagcagtcaaaatattggctcatataattacgtactttgagaaaacgaatacttttctaattcatatatattgttacttaggtagctaactctaagccaatataaatgaatataggaaagaattaactagttaaaatatatataggaaagaacaaagaaactggctccactataagccaaaagattgaaaagaaaagtgtttttttatatgaaaaaaaaaaattacttgttgctgattctttctctattctttcaatgctttaacaattctaaagacttatatatcttcttgtcttaattaaatcatcgctatcacaatttatgagagtttcccttccaaagatagtccgccacaaaaaattaactttcaagaaccaaacattataatctctcacaataaacggcagggtaagaatagaatatttgactcaaaagtaagaatggaggccaataaaaacttttttactactacaacagtaaataaatgtaaaggcctacctagctaccattaatttacactactataggtccactacaccacaaaagaaaggtgccttgacacttgactacgtacgcgtaaataaatatacattatgtaaataaaagccaggaaggtacgaaatagggtgagaaagatgagattattattattattattagtctatatttaataaaaattaataattagttgatgtaattagcatccaccttagctaagctaccctagctaagagcaaaagtatatataagaaactattagtgtggtagccccagaatttaatttgagagagatgtatttttattttttaaaagaaggaaaggcttattctttttttctaaaaaatttataatatgttaaaatttaaatttatatttttatagtataaagtataatttaaaataaataaataatataaaatatttagcttgaaatgtgaatactttcaccaatacaaatctatattagcaagagttcaaattcttgaaccattttttttctttgtaaagaaaaattaactgtaaatattgaaaacaaaaatacaaatattggtaagggttcaagtcttattatttatttattttttttcaccttccctcagtttgagtccgcccatgcacacatatacaaatatttatatgagtgacccatatatatgtatgtatgtatgcgactgcacgtgcgaactactatttatatatataattttcatgccagccaacaccagggcttgacttgattccatttatcttataaataagtaaaatggacaattaattaacaagtaatattgctcatttttgtttttgtgattaattaataaagtttcttcctctccaacccagagaacatatctctataataaaaaccatatataaatataatcatgatatactaaacaaaggactctcaaggacggtgcaaatctcaggccgactctataaattaatatttacatatacattattacgaaaagtctaaatccaatttccatccaatataaatatatatatatatatatatatataaattacatgatgaaaccataagattttgcctcgtacgtgtacactctactagggaatagaagaaagaggtccgtagatttgaccagatcttcaaagaacattcattagttattatttcttataaatataatatatatatatttatatgttatttataaaattattattttttattataatttttaatattagaagtatttttaattttaatattctttaactttatatttattttttttaaaatttttaaaacttttaatattttttttttaaaaaaaataaaaattaattagtttcctttaatttataaaattttaaaaataaacaacaaaaataaaaactaaaaaatataattaagtatacgtgcaacgcgcacataacaataacttagtacaatagaacctctatttcagaataacctctaatttgttataaaaaaatcaag

SEQ ID NO: 16787 - DNA, 4102 bp, Cannabis sativa
  modified_base (4076)..(4077): a, c, t, g, unknown or other
aaaggatactctcatgttgttgtttctaagtttgagtatttggtatttgtttcaatgcaggtttttctatgcctctagtgcttgtatttaccctgagttcaagcagctggaaactaatgtgagcttgaaagaagctgatgcctggcctgctgaggtttgtagctattactgatcattaaagtcatgagtagtttgtattagaattttaacttgtgtgaatgtatctgatgaaacaactttctgcatatgatattagcctcaagatgcttatgggttagaaaagcttgccactgaggagttatgtaagcactacaccaaagatttcggaattgagtgccgagttggaagattccataacatttatggcccctttggaacatggaaaggtaagctcttgattgatacaaataagaaatatgactgcacaaatcctcatttcagtcaaatatcattgattaatttttgatatgtttgtcatgtaggtggaagggaaaaggctcctgccgctttttgcagaaaggccctcactgctgtcgacaagtttgagatgtggggagatggacttcagacccgatctttcactttcattgacgaatgcgttgaaggagttctccggtaagcagttactgattttgtgctggctgctggtatctctgtttaactttattgacctttaatcaagacctcttagaatttaaaaagagatgggtctctacatgtatcatttgggtgcggttttttcttttacggaagatattacacaaatcatataatatattttgcatctcccattattttggcttcattttgaaagttcctcttgatttatcattgtgctaataattcctgtattttaggttgacgaagtctgacttccgcgagccagtgaacattggaagtgatgaaatggttagcatgaatgagatggccgagattgttcttagctttgaggacaagaaactccctatccaccacatccctggtcctgagggtgtccgtggtcgtaactcagacaacacactgattaaagagaaacttggttgggctccttccatgcggttgaaggtaactttcttattacttcatttcctttgtaactccaattatatatttaaagctgagattgctttgagaatgaaaagttaatgctaaattgacacatcttttctcttcaggatgggttgagaatcacatacttctggatcaaagaacaaattgagaaagagaaaacacaaggtattgacctatctatttatgggtcatcaaaggtggtgggaacccaagccccggttcaacttggctcgcttcgtgctgctgatggcaaagagtaagctggtcaatcctaagatgaatagtttttgtaaggaactccaatatatagtaagaacggagtttgtcttattgtgtttctcagtcaatcatttatgattattgaaaaataattagtttgagcagttaagttcttatcttgtttcgacatgtataagggaggccttttgctcccagttgctttccatttttgcctttttaggcaagttggcatgatagcattttatcctttatgtcatatttagtttgcaaaaccattgttcaatcatgaatgaattgtgtcttttaattacgaatacaagtttagagtgttttttttttctaatttctttaccctccaaatatggaggggaagagttcatttgggattattgaaaatggcttatctgaatcaaagggtggacaatatgactgaatatagcttcttccttgtggtggagagttgataggaaaggcatttctggtagttgtaagtttctgtctttgttatcatatcatatttaaacatatatgtgactaatatgagctcatctgaactgtaattgcatactgagtagggatggtagtccactcgatataatgattgtggtcctttagataatgacaagatgatcaatgtcattatcgtagtatgttcttttgtaccatatacctacacactttccataacatgggaaataaaagaaaagggccaaggacattttctactcgggtagctataatgaaagaaagtggttaaagattaaacagatatatcagaatgaaaacgtgtaccaatcaaaatccaaagcaaagttatccatttattgtatcgattcaattagaagtttcttaccgattccttttccaaaaatggatgacttgaaaggggagttatctttttttttttgactcatatatgatgtcatgtagtggagaggaaggagaccgtgtctaggtagctcaatgaaagtatatgtatatatgggctattatgtgttggatggggaaatatgatatgattagtatgataaggggtatggatagtagattttgtggctcaaatttggagcaggataatgtctatcgtggctgaaattttggaggaacaaaattaaccaagagaacaaagggatcccatcccattacgtggaaaaagaactaaaaggaaaaggacataagtaaaggtgcttggcttaaaaaagacttgttttggcaagttggctagaggtaatccatcatttggcagcgtcatacgtgattgtgattatgctcctttccaagttgtcttttagatcttaatttttgtaattttttttgaacaattaatttttgtacctttgtgttcattgttttcgtccatatctatatttaagagtttttattaattaaaattgtttatttagattattttacaaaaaaaaaaataggaaaaataaaataaaaatataagtataacaaactataaatttaattaaaaatatgccagaagcattcttataaataacggaccctgtcaatcttagcaaaatgacacagtagcataattttctgataaacattcctatcaataatgggtgctgtgaattttagcagagtaagtaaaacagtggctggctggcaggcctctctagcgtccaatgctactatgacaatctcttcacatatacataacaaataattagaacttctcagcctaaacttcttaatcagacttaaggacaaaaaaacatagctaaaagtgggaaaaaaaattctgaaataaaaaagttaaacacaaaccatgaaacgacagacttttttgtcgaaaataaaattaaatgacgtgttaatacaaacgaactccctatagaatgctctaaagtgattatatatcaaagagagagatcagttcgatgatccaattggtcaattcattatataagaaaaagcgagcctgaatagtaaaaatcatttttcagaaaaaaaaataatctgttatcaaaagctaacttgtattatgttgatatcataaattcaaccactctttcaccatcaaaaaaaaaaaattaccttttttaagcataactactaatttaaataaaaacatattaagcggaatatatggggtactatagactgttaacgaagcaatttctttatattatatatttatatgaaatatcttatacccgggaaatgaaataacctcagccaactaagattttttcactatatgcatactaatgtataccaatttctctctctctctctctctctctctctctctctctccccttaattatcaagaccatgataaacaggattggcttctagcaggtctgcaaactcctcgagaatctctttcacaagattgaataaaccatccctatctacttctgaagcagtcttattgttttccatatcagcaaagaccgaatcatacaaaagtgtcacagcctcattggcttcagatggtggtggtatacccatatctgaaccgtttttctcaacaaagcttctcaataattctacaatccctgagctttgcttcgcaccatttttttcttcttgtattttctctacaacataattcacttgcttctcatcagccaaaagctgcaattgatcaaaaaggagttgtcacatagttagcccaatatattatataaaaagtttaaaacacgtatgaagtggttgaatcttgtgtagcacactcactcacccaaccaccatttttgaaattttagttaagccaaaaatcttttaggtagcgtttggttggaggnnatgaaatggaatggaatggaaagga

SEQ ID NO: 16788 - DNA, 5433 bp, Cannabis sativa
ctctctcgtgcagctcaagggctggtgttatggcgaagactagggcgaggcaagggaagctgaaatcagagctctagaaacctaaaaaatgaggtccaacctctactgctgatgtacgcaagatgaagacgatgggttcaatcattggtgtcgagccaattgatttctcggaggaagaaggtgatggtgatatggagcagactgtgcgatcgaaggatgctaatttgtttccagttccattatctcctaaatcatctctacaggaaattaagaggcaagaagaagttagtaaggattttgaattctttcttcaggctaatcgacaatgctctgcagtgtgcgacaaggtactcctataactcttcccattttacgttctggtaatgtggtgaggaacttagataccttcttcaagaattgagaactctaataaggtcaaaattactttagaagatattgagcatgaaattcatttatggatctcttctatagtatgctatgtccttggtggtaacccaccgttattagtcattgaaggttttatccggagaatatggaaggataaggtagacaaagtgggatccctatcttatggagtgtttctagtgcgatttgattcagtagataccaggaatgaaatacttaatggtggttatgtgttctttaataatcgactggtggtgatgaaagcttgggatcctgatgttaacttcaagaaagaagatatcagatcagttcatatttggatttaattaccagatcttgaactcaaatactgggggtgagagatctttgtttaaaatagtaggacaatttggctctccattggaggtggatgctatgacaaaagaaagaaacaaactgagttacccgagggttctcatagaagtctcaattcagcaagattttcctgagcgagtttcatttgaggatgagcatggttttaatgtatttgctgctattaactatgagtggaagccaatacaatgtaaccattgtaaaggcttaggacactcaactgaggactgtaaaaagaaggaagggaaataacagcattgggtggttaaagatgacagtaggaatgctggtgctggtgtaggaagcaagaaaataatggataatgaaggttttcaacaagttggtaaagggagtaaagcaaaaggtaaagtggaatcaggggaaactcaaatagctaattcctatcaagttttggctgataattttgagactgtcaattctattactaagacaggggttgagaatgtaatagcagcaggtgccatcactattggttccaacagagttgctatagctagaaaaacaagaggagggggagatcctcctcttggagatggataaaattgtttgttgaaacgtctgagggatcaatgaccattacaagcaaaatcaagttaagagcatgttacatgttcaaaaggtcagtcttattggtctactcgagacgagagttaaggccccgaagcttgggatcttatatgtaaacatgtttaagggatggtgttttacatccaatattgcttggcatgatggaggtcgaattattgtggcgtggattccttttagctactccgtgaacatactaaaatgtaccagccagcttattcatctacaagtagctactttagatggtaagcattgcttctttgctacctttgtgtatgctttcaatgagttagaagggaggaaactactttgggcaaatttaaagaatttggctacccatgaaccatggatggttatgggagactttaatgacatattgcttaaggaggaaaggattggaaaaaaggtgaaattcaatgctgcaacagattttatagattgtgttggaacatgtcaattaaaagatataaagtatagtggcagctactatacttggaacaacaaaagacaaggaagcgagaggatttgctcaaaaatagatcgatttcttgccaatcaaagatggttagatagtttctcttctactgaagctatttttgcagcagaggaattatttgattacaccatagctattattgctttgtctcatgaaatagttaatggaaaaaagccattgaagtattttcaaatgtggacttcccatccacaatactcaaagattgtaaaaggggtctataaccaaggaattactggctctaaaatgtaccaagtcatatcaaagctgaagaaacttaaagtggcttttaaggaactcaacatgcagcatttctcaaatattcaagaggccactgatgaagcaaaaaaggagatgttagatgttcagaagaagctgcaattagagcctctaaatcatgaacttactgctaaagaagtagcagcttgggtcaaatatggacaacttttgaaaggccgcaattcatttatgtaccagaaatccaagattagttggattaaaaatagagacgaaaatacggccatttttcatgctagtatcaaagagaggaggaaattatataacatattatctattgaagaccagtagggagtaagaactgataagccaggggaaatttctgaggcttttcttctttcattttatcaccatttacttggctataaaatggaagataggaggaagatcaaagctggggtcatgaatctgggacctcttatttccaaggcacaagcagatttcttaatgatggagtattccaaagatgaagttaagaaagctatttttgcaattccaggaatcaaggctccaggaccagatggctttaccagttatttttttcaagataactatgacttaattggagatgacataagtgaagttgtcctttctttcttgcattcaggtcagattctcaaggaaattaatactgatgtgttaacacttattcctaaatgtaagtttcctaatacggttagtgactttagacctattgcatcctgtaatgttatctacaaagctgcaactaaactaatctgctccagagtaaaagctatcttacttgatctggtaactcaaaatcaggggggatttattactggcaggtttattgcacacaatatcatgatctataaagatctgataaggcactatggaaggaaaagctccaaagttggatgtatgatcaaacttgatctacagaaagcttatgatactctagattgggattacttggaagaaatacttcagtcttttcaattccctgataagtttgtcaagccgattatgacttgcgttcgtactctaagattctcacttatgttcaatggaccgcttcatggatattttgaggggaaaatgggcttatgacaaggagatccaatgtcaccatttttatttgttcttggtatggagtatctatatcatgagtaatgttgaagatcgaatctaaaccaaatttcaaattttatgacaggtgtgcagagcttaatttgaaccacttgatgtttattgatgatgttatactcttttgtcatggagatttcaagagtatctactatgttttacaaggtttaaagctcttttcacgctcttctagtttgcaaccgaatccaaacaagtctgcaatctattgttatggtatggatgatcaagatattcaacgtatcattgactgctcaagatttagcaaaaaagaggtacctctcaaatactttggtatccctatttgtgctaaacgtatatcagttaaagaaagcatggtgttagcagataaaatgacagctagaatcaaaacatggagttcaaggaacttatctctagcaggaagggccatacttgttaactcaatcctcatgtcaattcatttttactggagtcaagttatggttttactaaagaagacgattagagatattgaagctatttgccgagcttacttgtggaaaggccatcatgtgtcccaaggctctggaccaattgcttgggatcatgtttgccaaccaaaagcaacaggagggatcagtttgaaaaagattgcaaaatggaacattgcagcgatgacaaaatatgtgtgggtaattgcgaataaggaagacaatttgtggattagatggattcactgtgtatatattaaaggtgaggaatggtggaactaccaagctccaccccaagcaagctggtattggaggaaattggttgttgttaaaaatcaagttaaagcttctatggacattcatcaatttgttttcgttcagtacaagatatctaatggctacaaggctctttgtcccccccaaaacaaaatgaattggagccatgaggtatggaatagacttaatatacctagacatagttttttcttatggattgttgtccaagataggcttagaactagggaaaggctgtataaactcaatatcattggagaagacttctgcttgttctgcaaagaccaaactgaatcttcagagcatctattcttctctttctccttctctaaactttgtctatctcaagtaaaagcttggcttggctggagggttgaaacaacagctttgaataggttgttaagatggttagaacgtgccaaaatcagcaggtttcacaaggtagtattggtcgctgctgtggttgccttggtatatcatttatggaagaaccgaaatgatattttgtggaactcaacaaagcaagcacaggaacaggtggttcatgttacaaaggaagatgtgaagagtagagtggtctgcaattggcctaaatatgtcaaaccggttgatggttgttggttttcaacattgtaagtcagtttttctttattaacaaagttagatgcatgattatacattgatttcattgtaccgatagaaaaatttcagatcttcaattgaagatactagtaggttgtaaattgatatttttggagtaatgaattttactgattgacaaaaaaaaattgtttattcaatactgagtgtgaaatacgatacacattattattttctcataacaattacatcactgcggttttattttctagtatataatatatcaataaataacacaaacacaataatttgctataaatagagtacagaaccatgtgacgatgaggagggcatcaaagctcacaactactaattaccactgatttacaaggcaccaatttaggcaccacgcatatatataagataacattcgatgcatatttacttaattttcgattgaactcttttcattattactctacttatatttaattttttaaattaaaattttgacagtaaaactttccaaactactaaaaaataaatttaaaatgacatccatttttcacaattaattatcagtataaattgtttatgtgtacacttttgtatatgtgtcacatttatattagtatatctaagattattatttaaaaaaatataaaaattattttataatttataatattttttatttttttaaacattttattttatttttacaattttatttaattttaaaatgaa

SEQ ID NO: 16789 - DNA, 11689 bp, Cannabis sativa
  modified_base (6179)..(6185): a, c, t, g, unknown or other
tattaggatgttaatgaaacaaacttgttagtaaatctagatccttgtaaaatatatccaacactagcttggagtcattccgacctgactgcgattaatttgtataccatttgtcatgctttaaatatccacaaggatacgaccccggtctgtcagaaaagaatacctttagatcctgttagagaagacttagtaaaagcagaggttaacaagctgactaccaatgacttccttcgggaatcatattacttggttgggcttgcaaatctagtgttggtcctgaaccccaatggcacacgaaggatgtacatagactttacggacgtaaacagggcttgcccaaaagattatttcctgctcccacggatcgatcagacggtagacgccacatctgggtaaaagtttctcacctttatggttgtctactctgggtataattagatcaaaatgcacataatcgatgaggagcacactagttttcaaactaacaaaagcatatattgctacaaggtaatgccattcggactcagaaatgcaggagtaacgtaccagcaaatggtaaattgactgttcaaagaacagttggggaggaacatggaggtatatgtggatgacatgctggtgacatccaaaacctttgaagagcatggccgggacctgaaagagatctttttggtgataaggatttataggatgaagttgaatcctaaaaaaatgcacttttggggtctcctctgggaatttccttggatatattgtcagttctcgaggaattgaggctaacccagagaagatcaaggccttcattggcatgccctctcctaaaaagcataaggatgtccagagtgtgatagggcacattgctgctcttagttggttcattttgaaatctactgacaagtgtatcccattttttaatgtgttttgaggcaacaaaaagtttgtgtggactgaagagtctgaggacgctttctagaagctaaaggagcatctaactaaggctcctattttatcaaaacctacggagggtgatgatttgttcttgtacttggcagcgtcagatcatgctatcaacgctgcactcgtgtgagaagatgataaagtccagtattcggtttgttatgtgagcaaaagatttcgtagagtccaaatatcccatgattgagaagcttatcttttacttactaattgcatcgtgcaagctgagactgtaattcaaagctcacgccatacgagttatcacgaatcatcccctacgccaggtgctttaatagttagagtcatcgtggaggttactaaagtgggctatggagcttagccagttcgacatccactactagccacaggtgtcgataaaaggacatgcccttgctgactatgtggttgaatgcacaagcttcaatcaccttccaaaagagctagttctcgagttacctacttggaaagtccatgtcgacgacgtgtctaacgagaaaggggctagagctggggtgattttaatctccccacaagagcaccagcttcaaagtgctctgcgttttggatttttcacctcgaacaataaggcagagaatgaggccatgttggcaagtttgaagttggcgaaggaagtaagagcctaacaggtggatatttacagcgattcccagttgttagtgaattagatctcttgcgagtatcagacgaaaggggagcgagtggtcgtttatgtcctaatgtcgcactttttattacagatatttaaaagttataatatacgtcaaatttcgagagagcaaaacacgtttgccgacatgttggataagttggccacagatctcgagataatcgaacatggagtagtccctgttggccatctgaagaagcccaacatcaaagtccaagggtgaatgccatagtggataactcccactcttggatgacacctatttataagttcttgagcacgagagaactccccgcagatagggctgcctcaagaaaaattcaataccaagccccccactatgtggtcatgaatgggaagctatatcgtagagggttgtccatgctgtatctaaggtgtatcaccaggagagagattagcacggtgattcatgaggtccctgaaggtttttgcagagtcaaatatgcatttgtcacagttgactaccaaatgggtcaaaactgaacctatgaatacggttacttccaagaaggtgttggatttgttgtcaaaaacattgtgtgtagatacggactcccatataagattgcgtcagacaatgggagtagttcaatagcgaccacttcactgaattctgtgctacgcatataatcgtgaaaagcttttcagctgtagcctggccacaagccaatggacaagtggaggctgtcaacaaaatcctcaagaccacattgaagaagaagctttaggcttgcaaggcccattggccagtggaactccatcgagttctcgaggcctatcaaacaacaaaaagagcttcaatagggcacacactgtatggaatggccttgggtgcaaatcagtgatcccggtagagaccatgatcccttcccatcgacgagacacttatgacccttcccgcagccattccctgctctaagagtcattagacttgattgaagatctctaggaacagtcacaagtctagctcaaaatgtaccatgagaaaattgcctgacactttaaatcaaaggtgaagagtcgtacatttaatgttggcgctcttgttttgagaagagtattcccagcttcgtaagaactgggagtggaggtactcgacccaaactaggaaggcccctatgagatactcgagaaggtgggtaaaggtacttttcagttgaataggatggatggatcgagggtccctcatgcctggaacgcaaatcacttacgtcgatactaccaataggcaaagagaactaggctttgacgacatttgtaatggtttgtgtaaaaatctatgtaattaactattgtacgaatggccctcgggcatcatgtaatgaaaaaaaaaattacatctgaatttacactttacgtttttaggccacaagctatgtttaaatcaagtgaccaggaagttggaggcgtccacacttcttagctcacttggggggtatcacgcctagccatgtgtgcctaaaaaaaacttaccgtgtgctgtaaattgttattttatatgtttggtttattaatatttataatttttgcttaaaataagatgcattgtcaaccaaattccttaaaaaggaagaccgcttgaattccttttttaagtgaaaataaacacacgtttcgaaagaagaagcattttcagccaaaattcctagaaaagggaaattcttgcctgattcctttcttgaaaacttttagaaaaagctgttcagaattttaaatcattaaggcctcgcttgaactactatagactctcagctttatcctgactaggaaaattccatctaaagtctgtagcatgtgaaactggcctccttaaattataaaatggcttaaacagtcgaagaatatcaaggcttcatgatcatacagtaatacaagaacaacctaaaagaccattcatgttttcagcaccttttagttggctcaggctttataaaatttataaggggttaagaccaaaaccatcctgcctgacaataggaaatatgtactctctaagtacctcctaagtcagtagtgggatagaaggctgactgatatcaaaggttttaagtggtggctattggaactgtacacttctacacagcctaagaagacatcccttaaaataattatgcaagccgctacataaagctaagagttaaaatcagtatgaaatattatattctaaatatagtacctcgcgaaaagaaaaaccaagttgttctcgaaagcaattgtcacatacagccccgcagacaaggataaataaatataactccgcgacaaaaagaaataaaattgtcttaaggaaaaagatagacaacaagaaatgaaggtggctcctattgatctcgagcaggggaaggtgctattaagttgatttgggctggggctttagttggctcctctggatccgagttgggcccaactacatcccaaacaagttcctcctcagccctgtgagaagacgcctcagcttctgcaaactcctgagaattcaagactttagcccctatttcctcattgctatcactatcaatcgagagggaaaactatttgaggtacatgtcatgtttaatggcgagtactgtactctcccggtaacatctgccctatctttctcattaatgagccaaagtattgcaggatttaccttccacaagttatgaaggaccacgacataggaaatctccaaggaacgaaggctattttcattgcgttagctgctgccttagctgttgccatgaccgcatcctaaataagctgggggcagtttctctcattctatgcgtagtagctaaggcaatatatgtcttcacactgttttctagacttcgttcaactttcctttgtaacttattgatggtctcctgtcgaaggttgttactatcactaaaacaaaatgatattcagctacaaaaaataaaaaaatggtagcaaataatgtatatttactagctaatattcttttagctacctattttttttttggtggctacttcgtagctaaaaccttgttattgaaatttttttgttaccaagacaatttgtagcaaatttgctaataatatttttgtagctaaaaatatcaaatttagtagcaaaataattactttgaaggactactaaaacgtttttgctactacattttggtagaagatcactttgaaattagtagctaaccaatcttatataattaaaataaatttcattctaaatctactataataattttactaccaaaatttggtagaaaatagtctttgaattagtaacaaatacaattttagtatttaaaaatatagtaattttgctactaaaattttgttgcaaaataaatttaaattgaattatatgtaattttccaactaaatttatatttaatatttagaatttctaattatatatttgtaaaattactaaaaaaatatattactaaaatatcaaaactcactttaatagaattaataagttgtatatatacaattcaagtttataatacaaaatctctaacataattcaaaatatataacatacacaaatctataaattagatcaatcctgatgttgttaatactaagattttttctctacgtaccaagtatctactcaatgtgaaataagcttcaataaaccagacaacatatacaaatacttaaaaaaaaaagaaaccaggattgtgtttggctctgtgacctttgctccctaaaagtagcaaatctcaataccaatcttagaaatagagcagacatagcttcaagaacccaagcaagagaggtaaagtaggatcgatagatagttgagaatcttgttcatctcacctcttcacttgacttcaaaagccttcacaacctataaccataaactcaatctcatgatgaattttccaagtagagaaatatacaataaatcactaaaaagggaaattactacagcaatctctagtctaaaaaaaataccagtggaaccaagtatagtgttcggaacctctctcatgtctgggcaaagtggataatctttaaaccaacatatggcagttgcatagaaaaaatgtatcaccactgtcgttgagccacttgtggccaactatgcaaggtaggaaataatcctccaagctcatcttgtctataagatttcatggtactccatgattttgaggctttgcttgagcaagcaactaaagttgctgcaaattgcttaggtggctaagaaagagcttaagactgataaagatgcatctcaccataagaaccagtctatgttcttgctggtaaggttagtgaaaataatctatacatataataacatttaccaaatattgtattgagagaaaaaatcctaacttcaaattcaagataatatgcagcgtaaatcatacaacaataaattagtgatgataatgtcatacaacaataaattagtgatgataatgttatatgcagcttaaccatggaaaatgaacacaaaaataattaataaaatgtctgctaatatatatagggtaaatactatnnnnnnncctgtgttttgcaaaaattaccgattggatcctatgttttgttaaatgacaaaatagaccctgtattttccaaaatagtaaaaataggaccttgagcttaatttttgaaaacttttttttaatatagccaacttgaaaaaaattcctaatacgaacagatacagaaaatgtaaacaattttgtcataactcttttagatcggattataattaaattttattttgaaaaaaaatcaatttagggtcctatttgtaccattttagaaaatacatggtccattatgtcatttaataaaatagagagtccaattaataacttttgcaaaacacacgatcctaaatgatatttacctatatatataaatatagtatacaattagaccacatacatatacaatgtacaagtaaccacccaaccactcatttgttattgtaatcagtccaaatcaaataagtcccacatatataaaagaaatagtactccaatttatttggctgcacaccaacaaaagatacgtacctagttatttatttattttttttacttgcataatatatagaagtattgtggtcacaatgttaagaattactttattactttattgcattttactgcagtattggttctgtagtgttttgtgtagtgctgttagttatagttagagttagtccttgccttacttatcttctttaactgtattaacggtttcctattcttactgggcgttggttacttaagtcggttgggtctgttaagtcagttaggttctagctgtatatatactctgtagttcaagcactctgtaattcaattcattcactttgagatcaatgaaattttctccactttttctattccgcaatatggtatcagagcgggaaagaaatgctttcccttgatccattcttctctttcacttctcgccgtgcttcttctccggcgacgttccaagactgaatatctgtttcagttcgtttcttttttttttttctcgatcatctgttcttcctcgatttgctttaactggattctgccatggccaccgatgatcaaagttctacccacggagtcgataatgacggaatatccacaatgattggtgatcctcccaatccgacgatgcaacaacaattaaatcaacagatcgtgcaatcaagaagtcatcttgaagaccctttgcatccttactatctgcatcatggggataacccaggtaacgtgctggtttcacagcttctcactggacaagacaactatatgtcttggagcagggctatgatcttggccatctttgtcaaaaataagctaggattcttggacggtacaattcctaaacccccatcttctgaacatattttgtacaatgcttggtttaggaacaataacatagtgatttcttggatattaaattctgtatctaaagagatttcttctagcatattatatgatgaatctgcagctgcaatttggtccgatcagaaggttcgttttcatcaacgaaatggtccgcatatatacaacttgagaaagagtttgatgaatttgaaacaagacaaccaaactgtcagtatgtattacacaaaattgaaaacgatatgggaacaattgtagaactaccgacccacttgtgtttgcaatggttgcacatgtggtggtatgaagaaacttcaagaacaccatgacatggaacacatcatgtccttcctcatgggtctttcggattctttttctcaagtgcgtggcagtatactaatcatggaccctttgcctgaaataaacagggtttttcaccttgttacccaagaggaaaatcaaaaatggaactcgaatactgctgctgatccgaatccaggaattgcttttgcgtttcagggagataagtccaattctaataaaactgattctcaaggaaacagatctcaccctcctaagaagaaccgtccattttgtacccagtgtaatatccttggacacaccattgaaaggtgctataagatccacggatatcctcctggatacaacaaaaacaagtcgaaagatgcttcagctaatcaaattcagaccaacacagatgctaataatgcccaaggtgaaagtcagaccttgctgccacaactaactactgctcagtaccagcaactcttgaacctccttgctggacaacaaaataatttgccaaacacagaacttggtaatggtacaggtaaatcaggtatagttatgtctaacataatgaacctgcctaataatggctcttggatcttggattcaggggcaactagacacatctgttctaatatgaagttattccaatgcatatataaagtaaattctaccaggttattacttcctaatggggattttgtttttgtgcatcaaagtggcactataaaactcacggattatattactttaaatgatgttttatttgttcctcacttcaagtacaatattatattcgtgagttgtctaactaatgataattgccttgatgttaaattcactactaatgagtttgtattgtaggatctaatcaacaagaatacgattggcagaggtgaatccaagaatggtctctacatattggatccttcgcctactgcttctcctattctagctgtttctgctgatacttggcatgctagattagggcacttatctgataaataattgaatttgttaaaggataaactcaattgtaataccaagaatctacataagaactccccatgttatgtttgtcctttggccaaacaaaggaaactgccttttcctaataaaaataactttgcttgcaacatatttgatttagtgcattgtgatatttggggcccttatcatattccttctcattccaactttagattctttcttactttagttgatgatcactctcgctttacttggatttatcttttgaaacaaaagtccaatgccttgaatgtcattccccaatttttgtcttatgttcaaaatcaatttggttgcatgatcaagaaatttagatctgataacgctcctgaacttacttttaaagaactttttctaaaacttggaatcttacatgattttacttgtgtagaaactcctgaacagaacgccattgcagaaagaaaacaccaacatctactgaatgtggctcgtactttatgctttcaagctcatttacccatcaaattttagggagaatgcattatgactgtaactttcttaatcaaccgcactccttccccaaatttgcaaaacagaacaccatatgaattgttgtttaaaaaggaacccgattatcaacacctgaaggatgtttggatgtttggtttttgcatctacactttctgctcaccgaactaaatttgatcatagagcccgaacttgtgtcttcataggatatcctcaaggagtaaagggatatcgtctttatgacattaataataagcaaatttttatttctagaaatgtggtttttcatcaacacatttttcctttcttaaaaattaaatgaaaacactgttaatattgattcttttattattgttgtgttgccttccagtgacatctctcgcacacatataggtgattatcaacatgctgctgtcgaacaacctagcaccagttacagcgctacaggcaccagtaatgatgcacctgctgcatcagatatatcagcagatgcagaagaattgtaggaacacactcctgcacaagcaaatgttacaactcgaaaaaccagaagggttactcgtccacctgcctacctcaaagattttgagtgttactccactattcaggacaaatcttccactccccatgctttaaataaatatgttgcatatgcaagattgactgaatcttacaaagcttttattcttgctatcacttcattgaaggaaccacaaacatacaagcaagccatacaattccaacagtggcttgatgcaatgaatactgaactcagagtccttcgaaatacaaaacttggactgttgttccccttccaccaaatagacgagtcattggttgtcgttgggtttataaaatcaaactcaatagtgatggttcggttgaaagatttaaggctagacttgttgctcaaggttatacgcaacaagaaggcctagatttctttgacactttctctcctgtagccaaaatggtctctctaaaattacttcttgctatctctacaatcaaacaatggcatacattacaaatagacataaataatgcctttttgaacggagatctaaatgaggaggtctatatggccttgcctcctggactaacactctctgctcatgaatctacaggtaccaatcttgtttgtaagctccacaaatcgatctatggtctacgccaatcttcaagacaatggtacaaaaagctcacggctgcattaatacaagaaggatttcagcaatcaaaggcagattataccctcttcactcggggcaatggtgacaattacatagcccttcttgtctatgtggataacattgtcatcacaagctccaatatccatgtcttacaccagctacaagcaactcttcatcaacaattcaagctcaaagccctcggacaactcaaatatttccttggattcgaaattgcccgagcttctactggtctcttcctctcttaacgtcaatatacccttcaacttcttgaagataatggatacattggatgcaaaccagccaaagctccaattgatcctcgaaccaaacttgacaatgaacaaggagaacctttaaccaacccctctgaataccggcaattaattgggaaactcctttatctaactttgtctagacccgatattacctatgttgttaacatattaagccaatttatgtcttcaccaaggacgccacatatgcaagccgtatcacatctccttcgttatctcaagggtagcccaggccaaggattgctatatcccaacaattcatgctctccatctttgaggtttcttagactcgaattgggcttcttgcgccattacaagacgctccaccaccggtttttgcatcttcctcggtgattgtctcatatcttggaagactaaaaaacaactcaccatttccaagagttctgctgaagctaaatatagagcactcgctgcaacaactagtgagattacttggctccaatatctacttcaagacttccatattccacaagataaaccagcgttcatctattgcgataatcagtctacaatccatattgccaacaatcctaccttccatgagcgcaccaaacatatcgagctagattgtcacttcgttcgcgacagaatcaacaactccaccattcggttgatacctgtttccagcaacttacaactggccgatgccttcaccaagcctttaccatccactacactcaacactcatactgtcaagatgtctgtatatgatatatacagtccaccttgaggggggatgttaagaattactttattactttactgcattttactgcagtattggttctgtagtgtt

SEQ ID NO: 16790 - DNA, 5928 bp, Cannabis sativa
gatcaagttattctgtggcagggggttaattaggttgttagattaatttgttttagaatattctttttaattttataagagatcacgagaaaattatttctactctccaatcattacttaatacattgtatatttttgttgttgttgaattagctaacgggtttatgttaccactctatgtgttatccttttcttatctttgttagttgtttgcttgaagatttttgtttaaggttgatgattatatttatatgaaccttaccctgcagcctgttgtgtttcttcatgggggtccaggaggaggaacttcaccaactaataggagattttttgacccggagttttatcgaatcattttgtttgatcaagtgagtatctgatggatcattgtatttgtaataaccaagatgattataaacattattgtatgaaatttcttttttttttctctttcttcagcgtggtgcaggaaagagtacaccccatgcttgtttgaaggaaaacaccacatgggatctcattgatgatattgaaaagctcagggaacacttgaaaatcccagaatggcaggttataacttgatgtttggtgtggacaaagtcattacttttttataaatgttttttcttttttgtaagagaaggtcttgtctgtgcttatgcaggtttttgggggttcatggggaagtacacttgcccttgcttatagtcaatcacatccggataaggtgcataacatatttcagcttatagtcccttggagaaggttttttattgtattttatttcccccttctttcgtagttttgcatacccttgtttttgacggcattgcatggtccgattttaaggttactggattggtccttagagggatctttcttctgagaaagaaagagattgattggttttatgagggtggtgctgctgctatttatcctgatggtgagtgtgaatgctttgctgtaatgtgactgaatcgctatacattctgagttcacatttcattacctattattttgtttgcactgattttgcttatgaaattttacatgtgattgtaaaattcttgagttttgatatcagaatggtcaaaataactgacggatcacctttttacaaatgatttttttttctgcattatttgatttgtcaaagctggatgatgttatgaaattgtgtttggcttgttttgttgtgtttacctagacaaactatcttgcagtgttataattacaagattagatttgtggataatattgtgattatcttcttgatcacagcttgggaaccgtttagagatcttataccagagaacgagagagaatgttttataaatgcttacaacaagagactaaactgtgatgatttggaaacacaagtaagacttggctgatttttgcacattattgttttttgttttaactttccaatataatgatttctactatctttcacgcatgattccttttagggtctagatttactgtgtccttatattatcacgattagaataaaaaatcaataaataatgatgcaaacatttgaagtacgattttatgttataaaaaagacagtttgtggtttagtattagtctctgatagttggttataatcagtcaattacaaaaataacagttgtgtttaggattggcatttactgttatatttgaatctagatgattttctttacactcttccaatttcttagtatgcagctgctagggcatggaccaaatgggaaatgatgactgcccatcttattccaaacgatgacaacatcaagaaaggagatgatgattatttttcattggtatatcatttttacatctatcaactattcatccctatttttcattggtatatcatttggtctctttagttgggaaatcttgtctgttgtgtacagcttatagattcaatctgttgtatgtatgctattgttcttactctggttacaggttttgtaatttaatttgttctgatgactgaagttagtcattgttctttctgtttgattttctctacccaggcatttgctaggattgaaaatcattatttttccaacaagggattctttccttcagattcatacctgttggataacattgataagatacggcatatagacgccacaattgttcaggttcatattactttttcattcatgctcttctgaaatttttaagataattgtgttacttaattattcttgaagctaattatcgtaagagattatttttctatatttattaatgcaaggaaaatccttaataaggtgcttcatccttgtagctaatttacgtcatctaagttacagaaaaatacaacagtatatagaagatatatacaatattacatacatttaaattcaaatccctaagacttacaaattggaaataaatcttggcattctaccctcctctcaagttggacaatgtgtacttttcaaaccaagtttagaatacaactcttgataaaggacaatgtagagccttgtaagaatatctcctatctgaattcgagatgaagcatgcttccgtgagactgagatggagcatgcttttgtgagactaccttgccttctatcttcttgcttataatttgtgcatcaattttcacatattttgttctattatgatgggctagatttgtagctatagcaatagcaacttgattatcacacaataacctattgctttttactccaccatgtaaccaaattacaccatacataggaatagtagtcaaaatttgattttcgattgatagtagcctatgtgcatcaaaataaaattcaagtgagaaattgtgtgtgtttaaacatgaattcttctcgatagtttaagattcaactgatgagttggatgtgtccctttgaacaattgcttaagttttggctcgacttaccacagtgacaacaaaagcttatatccaagaaagtataagttagatagatcaactttcgcacgagacactggaacttccctctctatccaaatctgttccttagcgtccaatttaatgtttgaattcatgggtgtttccgctggtttgtacccactcattctagtctccctcaaaaggtccaaaacaaattttgcgttgggaaatttagataccacggatggaaagtgccccagatccttgatctcaaagtccttagaaagcaagtgctttagatggatgatttcctcctcatgattttttagtaactactatatcatcaatatacactatcactagcaattataatgtcgtctaagtgtttaacaaatatattatggttagcttgacactgcgagtaaccatctacttcaagtactctagaaaacctttcaaaccaaactcatggcgattgtttgagtctataccgtgaaaggatttgtgatgtataaatacattgtgctttgagtggttgctttcaaaatttggtgggacatccttatatacatctttcgtagatcttgcaactgataagatggctcaaattgtgtttacttaggctacaggagcaaaattctctttatagtcaattccgtaaggttgagtaaaacatttagccaccaagtgagctttgaacctatctatgctctcctcgacctttcgtttgatcgaaaaaatgcatttatgttccagtcttctttttaggaggtaaattagtaataatccatttcccatttagggctcagatctcctttagtgcaacagccttccatttagggactggtctagggccaagatgaaagctctaaagttctgagacaaacttaaatatgatatatagttttggagtgggtgttgagtgcatgattggactacttttctctaagttattgggttgtctagttctgactcacactcagtagcagagtcaagtttagtctcttcttttaaaatcttaggattgattggtctcagattgggttcacatgtgtgcctccttgtgcagaccttgacattattgtctagagtaggaaggggaatgcattggaacgaaggtttgggatgtagagacttaggattagttgatgactgttctagaggcattttaagcgaggcaaaattataaggaggaaattttccacatgaaatagtttagaagtaatgtatactagagtaggtgtctcagcaggccagcccctatatatcatcagcacttggttgaatacagccctagctagttagttgtcatgacctcaaccacggatgaacatcatagtgtgaccaatgaagataattgtgaccattgagtttgtgactggtcactgggataatagtactttcagatggggctggagtgactggagttgaaggattttgaggattaatgatcaacaaagagttgcctctgtttgttctacgacagccattgaagcaaagagcaagaaacagttgatgaggaacagcttgacagagtggcaggatttctgaatagccgttctattttgtttaatgaaaaatagaggcaaacagagtagtcaaggattgctacgatattacaaagctaattgtggtaaaagattttatatctatgcaaggaggatcctgaataaggtccagtaacggaaaaatgcagcagtaaattttaaatatatacagactatgttcatttaaatttaaatccttaagacttggaaatcgatttgtattatcatttcattgttggtacaagtcaatagtttgttttcgttcattgtgtaatttagctcaggcaagaaattctaactagtaacaatatctttccagggaagatatgatgttgtctgtcctattatgtcagcttgggatgtccacaaagtatggccagaggcagattttaaggtaatttgaactaagaccatcccttctttaagcagaaatgtgctgttataaaaagattggacaaacaaactactgaattttttaccatttttaacagattgtgaaagatgctggtcactctgctaatgaaccgggaatagcggcagaacttgtagctgccaatgaaaggctgaaaaataaaatcaagggtggaagatgagagaatcaatgcaagaatgcaagtgcaccatgccatgttcgtcaaatcaagctttggcatccccatggttggaggtttcttgtgaataataagttgaagctagctgttaatgagtacatatgataatcatgtcatgtcaatggttagttttctaagttaattagatctggttatctaatcagctcagctactgtgtcagtttctttctgttaattgaagcaatgcactaaaagttttttcaatgaaattgttgcttcccctaaatcttgtttataaataaaataaaaaattgacacaatgaaatatattttgaaaaggtgataaaaaccgccattaagacattacaaaatacaaataggtagagggtctttccattcaaagtgctatgagctgctttattatcaacacagccaatatgggattaagtttcctttgagtaaacaataaagttataatatcaaagaagaaagcacccaggtcagtaaagtacatagtgctgttattgatggccataactgaataaagagaatcagaaagagcagcatgaatcgacttccaatacatgtgcggaaaaaagagcatgaaatggcttcaaatacatgtatcgctgaattttaatagtacaattcgaatagaaagaatcaatggtattattaaaagtaataatgataataaataatcattcaatgatatcatatgattgaacaagaaaagcattataatatgtatgtatcaatcatcatacagtgaatgaagaataatttaaggcacctcccttgtgcagctctttggtacattaagactgaaaatttggctcattgggtatggcgaccttcttcctcttgacactgatcttcttggggcaacatgaccagatatctcaattgcggaagaagcaccatttttt

SEQ ID NO: 16791 - DNA, 4805 bp, Cannabis sativa
ataataataataaaagaaacaaacaaaagaagcggacacagtacacacgacgtaatacatcccacttccactcacttcccattatcttcttctccttcaaaatctcaaagctatattctcgccatagatggaccagtcatgaacgctaagccaccaccacgttcaccatcttcacccttaaaccctctatcaacattaccatcttcttcatcttctgcttccaacccattccccttagctcactgggcatctcccccaaccctcataaccactccttcctctaatcatattcgttcttctcgggttcaagtcgccgccggccaagctaaacccatagacatctttctcgcctccgcctctgcctccaccgaaccagctcggtcccaagaccaaactcttctattgcttctccgtcagcggaagacagaggacgcctgggttgcatacaacgagtcccctcatctccccagttccacttgtctaagccgtttggtctctcagctatcgtaccaaaacaccagcaccggcctcacgcgcgcccagtccatcatcacgcgcctccgtcaagagcggcagctccaccgtctcgatgctaattctcttgggcttctggcatcagcggctgccaaggctggacacacccgctatgccacctcgctcatcaagtccatgcttcgctccggctatctcccccatgtaaaatcttggagcgcagtcgtcagccgtctcgccaattccggcgacgacggacccgttgaagcattgaagctcttccggtcggtgacccgccgtgttcggcagttctccgacgctgacttggttgctgattcgaagccggatactggtgctttcaatgctgttcttaacgcttgtgctaatctgggggacactaagatgttcctccaactgttcgatgaaatgcctgagcacaatgccgagcccgatgtactgagttataatgttatgattaagctttgcgccagagttggtaggaaagaccttctggtctttgtgctggagagaattctagagaagaaaatccctttgtgtatgactacattacattctcttgttgctgcttatgttggttttgatgatttagaaactgccgagagaattgttcaagcaatgagggaaggaaggagagacctttgcaagattttaagggagacaagtgtagagaatcccaacagaaatgggcaacatgtgtttgagaagttgcttccgaattgtgtgacagcaagtgattctgagccaccgttactgtcaaaactatatgctcctaacactagaatgtatacaactcttatgaaaggttatatgaaagtaggccggattatggatacggttagaatgattgaagcaatgagacatgaagatgacactgctagccatcctgaccatgtgacatacactactctcgtatctgcgtttgtgaattcagggtcaatggaccgagctcgtcaagttctggctgagatgacgagaataggtgtgcctgcaaacaggattacgtacaatattcttctcaagggttactgcaagcaattgcagattgatcaagcaaaggagttgcttaaggatatggctgaagaggcagggattgagcctgatgtggtttcttataacatcttggttgatgggtgtattctggttgatgacagtgctggggcacttgtgttttttaatgaaatgagggcaaaaggaattgcccctaccaagatcagctacaccactttgatgaaagcttttgccttgtcgggtcagccaaagctagctcacaaggtgtttgatgaaatgctcaatgaccctcgagtgaaagtagatattattgcctggaatatgttggttgaagggtattgtagacttgggatgattgaagaagctaagaagctaattgagagaatgaaagaagatggttttcaccccaatgtagcaacttatggtagtctagctaatgggatagcattagctagaaaaccaggagatgcactgttactttggaatgaagtgaaggagaggcttaaagtgaaggaaggggataatccagatccctcgtcgttgtctccttctccaccacagctgaaaccagatgaagggctgttggatacactggctgatatatgtgttagagctgctttcttcaagaaagctcttgagattgtggcttgcatggaagagaatggtatacctccaaataagaccaaatacactcgaatttacgtggagatgcattctaggatgtttacaagtaagcatgcctcacaagccaggcaagataggaggagggagaggaagagagctgctgaggctttcaagttctggttgggtttgcctaactcttattatgggagtgaatggagattagaagctatagatggaaatcagggcttttctgattaggtattaacctaaaccatttactctctctgccattgtatactacacttctacactatattgtaagaaaagaagggctaaagttattgtatattctcaatactagaaacttggcttctttaaattggtttgattatgtaaatgagatacaactctgttttctaattctatagtactaattttagttccttgaccttgatgatatgctccgggcatatgatgatgacaataccatatacgatttattgtaagagattcgtaactagtaaatcaagtagtcccttcggggacatccgataaaattggaacgatacagagaagattagcatggctccttcgcaaggatgacaagcacaaaccgagaaatagtccaaaaaaaaaaaaaatagtaaatcaagtaaatatggtttctatgttcctacggttacctttatctgtatttggtcatttcttcagtagatagggtaacccacacagttcaaacttactgctgaactgtaagactttagctatagatagaaatggttaaggagagattaaataatcactgaaagtgatagaaaacaatatctttctgctcttaagtaactcttgactgcttattcagggcacttcacatatcaagtactgtatattcaacataaatagaatttcactactcagtggaaccttcgtatcacctagacctagcagaatgacatgtaatcaggtagaaattcgtcattttctgtaaatgattcttcatactatatgtaatcctagttgattacattatccaataaaaaaattaacaaaaatccatccatattgttagcaacaactctctctgtatacttcttccactaagctagcaaaggaatggcatttaccaacgattatgacatggattatgtctcctatatcacgaacaacaaaataaaataaataattgttgttttatttctccaacaataatttaaaacaaaaaaaaaaaaaatcaaattcaaaggaagaagacaaaaaattgtatgtataaaaaaatatttaattttattttaaattatattttcatattgatttactaaattttgaaatatatttgtatctatttactgagtttttggaaaatcgattaaaaaaataaatagatcttaagaaataaacaaaataaagaagaagaagactaagaattttatatagttggagcgttaatgagccttagtccacaagttaatattattagcttgaaaagctatggtgtattacacaagaataatgttcttgcttgagcttaagaaccctaatttcagtcttaatgtttgaataatgattttccaaccatttgcatgaagataccatcttctatttataggctagggttttgactactaggatttttctatgaagctagacccactaatggggtaaataaatttaatattgactttggaccaattaggaaagacctgatttacaagtgaacactcattcacatttgcagagtccatttaatgatgacagttgtcgtacactgccaaatttatacaagaaatgttggaggatatggcactaggtgaatccctaatttagtgggatcctatatcagagggatctccatgtaacccttggcttccggatgtctttttgacagcccttccaggaatatcccataagggtattcggatatgccatattgggccttctttcttttggccaagaaccctttttgaaccagatgttctgaccttgtaaaggatgagttcaatctgttactgaacacagagttgcagaaagactcccttagtgggctaacccaatcatttgggcctgagaatgagcctccttaagtgaggcaaatcttggaagaacacgtgtcaacctgccagaaacattgatagcggtatcatatgcaatatgtattagattttaaaatactattttttatattaaaataataattatatacttaatttatatataagggtaaatactaccctgtgttttgcaaaaattatcgattggaccatctgttttgttaaatggtaaactcaaccttgtattttctaaaatggtacaaaataataccttgaactgatttttttttttttttcaaaataaaagtaaataataactcaatttagagttgttatgacaaaacttgatatattttctgtatttgttcatgctagaaactgtcttcaagttggttattgttaactaaaaaattataagaagtaaaatgtttctataaacagcaaacagaaaggtgaatagcacaagattctccatacacactagaaaggacaacatgcagccccacctcttttatttttgaatcctctttagtcacatcgatttatctcttggaaacatccacgcccgcagaccccgcgccctcaccctgctcgcgcccacgaccactcgct

SEQ ID NO: 16792 - DNA, 6494 bp, Cannabis sativa
cacactcactatgatcttagactccctatctgaatctaaagtatgagcttggagattaaagactcataactcatttgaaagagtagagacactcctatttatagttgttggtggggtcccctttaagttggtattaaagccaattgttataaataacaacagctttccttagattcatttgatgagcatataaatgggcctattgacttgacatgttaagtgagtttaatcccaacacgtgtgaccaatgttgctagacatgaaacatgtatcttttatgacttatgatatcacgaccaataaagtgagaatgtgaaaaatcttccatgacatattttagagattaacctaaaaccaaaatatataaatggaacaaaattataaaattatgacactatgaagcattcaagtgtgtttatgcaatatataggtacttaggtagaagcaattaagcctaaaacacgtggatgggttgggactttggagatggaaatgacaactaattcatcatgtcttttagttttaactctttaatactagaaaaagcaacttgtgtgaccctatgtacaaaaaaccaactaagtaataactactcaattagtatagaccatctttcttagctgttttttcttcactcaattaaatgaatgattgactatagaacatattggaaatttcatattaattaaatatattatttctatatctcatcttaccaatagtcaacttataaattcagaattaataattaaaaataaatatgatttttcccttgattgaattatggtttttgtaaagttttgcctattaattttttctgaactatacaaaccgttgctgatatcttccttatattctgctcatttttaaaaccatttgttcatgtggtcattagttacatgtatagaagcagtgcgagagtttatttaacagtattagattacccgaaaattaatttattgacattgagcatacaaacattaactttaaaaatgtatatatattttgtttgagcaacataaactaggctagactaacaccatgttagtaatacatcaacaaattatttaaagaaataagccagatcaaaatttgtagtttttatttatgtattcctaaattattccttagagcagtgtggttggttagttgtacttagaaccaatcgaactattaatgttaatacatattatatataatggattttcatttgccactaaaatggaccacaggcttacgggtcaaacaataaccaaataattgtaaagatcttataaattagagattgtccaaataaaagtcaaatatgcttatacaacaaataaaataaaaaaattaaaacatcttgccatacaccaaaaatcaataggcaaatctcactcgagtcccctttccaaataagatttacgttattaaaaattctataggtaaattaccatactcaaaattgaatcaacattaacgacactatttattagataacagatataatttaaacaagggtagagattattaaaaaaaataaagtaataagcgctagctaacgttttcgaatgacaaaatgatcaaataccaatattattacgaaaataaccaaaagaaaagaaacaagactaataaaaactaaacctagcacaaaattggaatcatcacgatacccttgcctgaggccgagaccaacctttacgtgtcccataagaccaccgtgatcctgagattacttagccaatgttgcgccctttagacatctgatcaaaaatcacacattacaccaaatcgtgtcaagctaaactaagtgttgacacaaacaatgcttccactactgtcaaagatattgaactataaaaacaaaagacactactataaaaactagtcattaatgacaattttataggtcaaaacattttcatatccccactatgttggtagaaagagacattaaatgtatatttatttaatgatcacttgatcaaagcaccaccgacgtatataactcaattgtgttaagtacttaattaaaaccaaaacaagggttcccctcacatagagacagtgacggacccagaaattcggttcagtgagggcttgaataatttctttttcaagggctttgaataaaaattgaataaaataaaaaagtatgttaaatagagtgttacatatgtgcttagaaaaaaaagaatttttttttttttttgaatttggtgttaaattttaatagtattacctttaaaattaggcaggaacaaattgagtgagggcttaatacacatttataataaacaaaaattttaatacatatatgtaacataatttttttttatatattataaaattgagtgagggcttaagcctacacaatggcttaagtccctccgtccctgcatagagaaggaggctgaaatatgagatttaaggggggccaaaagaaagaaaaaaagttaagagggccaaaatataacttttgagaaaaaaaaaagaaaaaaaatacaacaaatagaataaatgaaaggttttatcaatatttgagggcagagaagcaaaaatacgacttactcgatcaagctgactacctaaaagcaaaattagggttccctcacacacaaattaacttgaatgagttgagtaccgaaaagtaaaataagggtaaataacacaaaatttttcttttaattagtcacaacaatagttacaaattattttgactaaaagtggaaaaattatcactaattataaaacactatgtttatgttattactaaaaggttcgtggttaaaatattagtcataaaaattacaatttattgtcattaaatgtgttttaagcaatacttgttgtggctaaaattaaattagtaataacttctattgaatagtaaatactatattttaatcgcaaataatttttgtaaaaaacaaaacaaagtttcctcacacacaaactaacccagttgagctgaattaaaaacaaaacaaggttccctcacacacaaactaaccctatcgagctagtgagaaagcaaagtaaagattccctcacacacaagctagggttttattattatttaattataaccctctataaccgagtggatggataggccaatatagaaccataataaatatacacatgtataggtaggtagctaggaatttgaaatttattaaccgtgacatatatatattaacaaataaaaatacatatactaaattaatatatatttatatatataaagaaatgttaaaatagcatgtaatatatatatatatatatatatcaatattcttattaatctaagtaagtattgaattccatataatttaatgtataataatttttaaaaaatatcactatccaatcataaaacgatatacttctaaaaaatactaaacaccactagtaaataacaatattactcttatattatatatatagtagctaaagtatcattaaatgatcgaatttaaagcaattaaaatcaccccaactacaatctcatcaagttagttgtcatcattaactattccaccacccacctccaatacatatatctatacatatatatttattatatatatgttatgttattagaacacaataatattaatcatcataaaaatatcatggaaaaagaaagagctctgttatcaacagagatagtaaacaaaggaatagagtgctcggggcccaacgcagggtccccgacattctcagtcagagtccggcgtaaattgccggactttgttacctcagttaacttaaaatacgtgaaattaggttaccaccatttgatcaatcatggaatatatttggtgaccattcctttggtggtgctcgtattgagtgctgaagtgggtaacactttgacgagcagagaagagctttggaaaaaagtttgggaagatgctcggtatgatttggccactctgctcggcttcttcgctctctttgtcttcacttgctcgctttatttcatgtctcggccaagatcgatttatcttctcgatttcgcttgttttcgccctaatgataatcttaaggtaattatattattaattaatttaacatacatatacaaatttgtatatgtatgttatgtgtgattgggtggttacagatttctttctcaccctttcggtttcaaatcattagcttaaatatatttggatactaatttttttttttcatactaaactttttttttttttgtattttttatatttctcttttccccactaaaattcagattaagggaattgtttatgtatataatataaatagatatgtatttggattttaattaattaaaaaaaaaaatagttgaagaagaatatttatttacgctccatcatattattgaagaaaaaaaaaatcaaatcaatttaaaattaaaatttattcttaacatttttttatctattttttcccctaattttctaaataaaatataaatgaatgcatgtgaatggttaaacgtttctaggtattattctaataaattatatatgtataatttttttaatatgttataatctgttttgtaccacaaaaattttttcaggttaactaattatatatataagtttttttttttaatttgtaaaaataaactaaaataaaattaatatgacttttttctgaacaaaaaattgtgtcggtgttattaatggctaaacattgataagatcatcttatctttacattttcaaaaaaaagaaaaaatcatcttacctttagtattagaattaaatacatgttattattccaatatttgttggttaattaatgctctacactatcaaaaaaattataaatattaatatctttttgtcttaattttctttgatatatatacatatagcttgctctacatatctttttttttttttacaaaatgaataaatctttaacattataacatgatagagagctaagaaaaatatttatatgttagaaaaattgaaagaacaaaaaaaaatctaatttgatatacaataaattaatattcataaagtaattaatatatgcccacaggtgacaaaagaagagttcatagaaattgcaagaaaatcgggaaaatttgaagaagaaagcttattattccaaaagaaaattgtgaactcatcagggcttggggatgaaacatacatcccaaaatcagtgatcatgtcgagcgagaatgcatcgaccatgaaagaaggtcgagctgaggcatcaatggtaatgtttggagccctagacgagctattcgagaaaactcgagtgaggcctaaggatgtaggtatactcgtagtgaattgtagcttatttaaccctacaccttctctttcggctatgatcataaaccactacaagatgagaggtaatattttgagcttcaatcttggtgggatggggtgtagtgcggggatcatagccgttgatctagctcgggatatgctccaagcaaaccctaataactacgccgtggttgtgagtactgagatggtagggtacaattggtaccctggcaatgatcgctctatgctcatccctaattgtttctttcgcatgggttgttctgctcttctactttctaatcgtcgacgtgactttcatcgtgctaagtatcgcctagaacacatcgtcagaacccataaaggcgcagacgattcaagcttcaggtaattcatttacatatgcatagtaaaatatgcatttgggttttaaccatctgtttcatacacattttttcaaaccataatttagatagagatgtaaatgaaacaagactagtcaaaattttaacatagataagataagacaagacgctaaaaaaaaaaaaaaaaaacccgcctattgtgtaatatgtttgttacttgttatatttttcgctttgttttgatttagtaattacgggtccttaagacaagattatttttcacaaaaaaaaatgttctagaaattttttaatatagttgaattaatttggttaaaatgacaagtatagtagatttggtatggttggtattattttttgagcttatttaattttcaattggactacacttgtactagtgcctaataatgtgtataataaatttgaattaaaggtccaaaaacaaatgccaactgttttattaaatagtccaactgttttcatggcacatagaaaaagtatcttttctatcccattcttacttttaatattcaactgttattaattttttatttatttactgccattaatttttgtatgaaaaatatagtgataatataagttaccaagaaaatgaaatgttgcattaatgatatataaaattatattttaattatatgtaacattttgttttcaacttttttttgtcattttacaaagagttccataaatttatgttaaaggtgtcttttgggtccaaccttatgagaagatgggcctttgaaatatggcttaattttgggcctttatttatttagggaaacttacaaaaatactgaaatttgggttaactttt

SEQ ID NO: 16793 - DNA, 3480 bp, Cannabis sativa
gagccctcggatgatggtaggtatttattgtctctgcacattattatgtttttatttattttttgaggggtgggactgggattgggagtaccaatgttatgggcattagtattcgtattactacgattaatcagattgaattatgaactagcatataggaatttcccgccttaactgttcatcatgggattgtttaaactttacaggagtaatattacgttgtcaaagtgggctttctatttttattgctatttgcagaatttgaaaagatttaagataaaaatgctgactttacaaaaattacaacttgtataattaatgactttatacgtgtttagtgtaaagacctaaatttgggtttagtgcaaaactgtatattcctatgtatttaagagaaaaggtacataacatttttgtgttaactttccatgacctttaccacttcctcacttagcatatcaactctattggataagattgctggttttaggaggcatttgtggagacaacttttatggtagatttatggaatatgcttggtagagttgtaaaacagctactttgaaaaagcagaaactcttgcaaagaatattgctctggaaggttcataaaagctattattattaactttatttatttggtagccttggaagccctctccccgagagagaaaatagccccaaataacttattgtatattacaccaataaagtacatgatgatttgtaatacttataagaaaagtcgaggaaacctatctgtaagcaaacatgcgtcaagtttattgttctttatgtttaaacctcttgcttttctatcattctcattcatcaacagattgagaaaagctctttaatagttgtaaagcataaaagtaacagtatactaaatatgatctgcttagctggttattgaacactccagttagtggccttttaaaaagcaaatgcagaggttttctagtataagctttaccacataattgtgcatatcaacttcttttttatttttttcctctttcacaatttcagtctcaattggttttttgtgggagattttgtgctattttgttggcgcaggacagcaaccatgttttaatgtatctatttgcctatgctctagtttcaaatatacttaatcaacatgaattgtcatcaaacattttatccataagcaccatatcatatcacatgatttgacctacatgtatctcaataggaaaagtcctatgtaactttttagcttcagtctctgctctatgatgtcattagttgtactcctgaatcagtaagcttattccaatattattatgacaagttgctgtcttatgtaactacagattgggaagctattgccgagcgctcacctgatgagttactttcctcacaatgtctgcctggagtatcaaaaatttctttggaagctaccaaacctaaaacccctacacctaagcggcgtggaagggggacattttcttataagaaagatgaattatacagtgataatttatctgataagtcagttattgatgatttagaggatggagatgtttctcatagttcagaaaggaatacagagaaaacaacatgtaagttgctaactgcaagtgctcaataattctcatttttatggtcagtgtgtgtattatgcttaatcagttgatcgttcatgctaccatttccctttacttgagttttagacatttatgaactataagatagcggcgtaagaatatctgcagaaatatatgtttgaattttcaaatacaacattaagattggttatgccattaactggagaataatatgtgttacagtttatcaaattttctttttagtggtggatttatatacatgccttctgtttccttacattccacaacactggttattaagtaaatcaatttcttagtttttatagtctatgtggtgatacttatcttttattgtataaattcaaacaattttttgtttccatgtccaccataatgttttgtgtaagtgggcaaggtttttcatatagaacactggatagtgtcttgtcttcatggattgcaaaaaattaggtgctttccttacagtacagtaattatttgctctcaatcaaaccctcaaggtctattttgaggactatgaagtagtttcgactagtgcctaatcctactatctttctgaaagtgagaaaatgagaatcctggataatagttattgttggttattttataaatttattttatgaggggagctgggtaacagggcaggtgatatgtctggagttaaatcaattttatttgaaagggtagtcagcctctattatttgtaattaaataaattttagattgtttttctggtgtatgattcttgtcataaaacagaattaaggatttgttttgttgttgtgttcagcaacgtatggtactcgtcatgtccttgttttggctgatttcccaccaagcactaaaacaatagaactggagaagctttatgagaatttcagagatcgtggagttgttattcgctgggtgaatgataccactgcacttgcagtgttccggacaccatcaattggtaattcttgctgaactttatcattcatgaaaattatgaatattctttttagtatcccactatcaaattggatgtaaattctggttttagatttgtaggtaatgtgaatccttgaattgcttattattccaggagattaaatgttcctaaaattgtgacagtttgctcattttaattcttttttgtttgatctaaaaggaattatttatttattataaaagaaacacagattgtatattaatagaaagatgataaggtttcatccaaattacaatgtaagatgtcattcattgtgtaatagagaaaagaatatcctatcatcgaattacaaccagaaaagcgactcattataaaaaaaaaaaaaggcataaatgcatgcagcttgttaaagcgaggatcattctttgaaacagtttttttcattacagttttttcttttggtatccatcttatcattttaatattatttgtgattttttattggaagattttctaaaatttaaagtgtttcatcaatttttcagttggctagtgaatttgatttatattttcatgtagttaatttttaaatctcaagttgtcagagaatttgtatattctattaattggtgaagataatcttgattgataagtacacttttatttttgccaatttattaattcacatttatttttttattattacagcacttgaggccaggaactgcataagttgtccattcagagtatatatacttgatgataataatgacgagcttattaacacaatctcacctaaaggtaaaatactgtttttttctttttcctgtgatgggttattttttgcagttaatcattttacctggttttactctgaataagaaactgaataattgtaacctgcttttattgtaggctaattaagatttttgcc

SEQ ID NO: 16794 - DNA, 2326 bp, Cannabis sativa
aaaaaaataagttatgccaaacaagccctaggtacatgtattcatgaattcgaaattgcatcaaaatatgtagccgaactcggacccaaaaactattgggtgacacccgaactagactttttgtaatgtgaatttcagccatctgggttctttaggtacgggttcagtcgggtcaaccgggttccaggcctaattatttatgagcaaccctagggcacacgtttatcattcatttcattttttccccaacaaagtgcattgattttaatttttaaaaataaaattgaaaacataaaagtagtcaaataagcacattatcatgtctcaagagaagggcttttatataattatttacatggtccattttctttcttgaaagaaattatatggtcaattttaatatattacaaaaataattttctttgaaatctattttaacagatatcaactaatatacatgcatctgttcaaaaacaaaaactaatatatacatgtatcaattattattattataacatacattaattaacatagcataggacatataataaaaggcttttttttttaaaaaaaaaaaaaacacttattaacccattaaagggaccagccataaaagtcattacaaagtcactaccccagaccattaatactaacacaagtatccctttaagaattcgtatagagagaaagagactttgcttaaacatgactacttattccactattctcaccttataggaaggaaaagataagcatttggtttaacataaaaagaagcccaaaatcagctttatgaaattgttgaccacattctcttatagccgagactttgcttcatccaatggagcactctgcaagtagaaaggcagtagttaagagttacatttcagattctttgtaaagatcagtcaacaaaactgtttggaagcatggaaaatattgatgaatgactagtaattagagttacataacagttgtaagtatattataatgaacaagtatggtattagttgttttaccagagaagctccctttgctgctctttcagctaaatatgcacaaggcttgaagaatcctccatagatctttgaccattcctccagttttgagtatatgtatttggaaccaattgaatcagcccagaatatgacaccacccctgataagagaacagaagaaataccattaacttttgtgtgggaagttttatcaaagtgtggttgatcaggtactttgtactactaacctgtatggagggaaacccatgcccatgacagaagcgatatcaaggtctgctgccttgactgcaattccttcagcaaggacacggcatgcctcattcactactggaaagaacatcatctccacgatatccttttcagataactttgctagctgttgccagattcaataccgacaatatgagagagtgaggcagagaattgagcagaacataacttgaatgcatagaaggatgaaatataaaaaaaactgagagagagagaccttagggtcaatatcaacaccagacatgctcctcaacttctcaatgtactttttcaattcaggatctgggttggctctgcgtttgtcaccataagtatagaatcctttctgagtactttcacctgaagcaagtaaaaaaaaatacttaagaatctatcaagttaactaggatgttagttagtccacataataatatgttgctaaccagtgtcactgtaaatttagtaccttgccttccatcaccctgcatgagtggtataagcaaggacgtgtatgttctctcgggaaagttctcaatgtattgtgtgccagatgcgattgccacaccaaacccgaccagatcaagcaacctgcatcacaaaagaaatgacgatgttgacaatattgtaacaaatcacaaataacataaaacttaagatgaccaaactaaatagtaacctgaatgggcccatcggcattccaaatttggtcattactttatcaatttggtaggcatctgcaccacgctcaataagcaagagagcagcttgtggataagggaagaacattcggttgacagcaaagcctgtgcagtttccaaccactactggggttttctttatcttttttccgacatcaaacaagtcaattataacttgaggagatgtcttgttcgtacgaacaatttccaggagtggcatgatgtgagcaggactgcatcgtaaataactcaaagattgagttttttctcttttttcttattttttaagagaaaaaaaaaacgaattaaagcaaaagaaaggtaaaagtaaacattacctgaagaaatgagctccaacaat

SEQ ID NO: 16795 - DNA, 8664 bp, Cannabis sativa
  modified_base (8608)..(8611): a, c, t, g, unknown or other
ttttattttagttaagtttttaatattatcacagtttttaatattaattaattatattagtattaaactagtttataaaatcacacacttggcgtcctaatagattagggcgttacatgtgatatcaaattttttgagttcaatgacccacttgagtagtcggccagatgattcaagtttttgcaaaacctaccgtaatggttggttagtgtacacccttattgggtgagcttggatgtacaaccttaactttttggatgccaagagtaagctatatacatgatcagtctcttactgatgtagtatacttgatgttttatatcgtcttcctctcttattatgattgcaatcacaacatgttttgtgacagctaggtacacgcctaaatctccattgtgtagaagttttgatagaacaggaggttgagacagtttttctgaatgctttttcacactcccctgtccactaaaattttagatttcctatgagaatgttgaagaagggtatacctttatccatggatttttacacaaatctgcttagtgcagcaatacgtcccgtcaagctttgtacttctttgattgttgtgggcgacttcatgtccaaaagggcttgggtcttgtccgggtttgcttttattcccccgacattgactaagaagccaaggaaatttcttaagcctactcaaaaagaacatttaagggggttgagcttcattttgtacttttggaggatctagaagaattcatctagatcgtccacatgccccaacctttttagacttgccagcatgcagtccacatactgctccatatttcgggcaatgagatctttaaacattttattcacaacgccttttataagtggctcttgcattttttagcctaaaggacatgactttgtagcagtatatgcctatgtctgtcatgaagcttgtgtgctcttgatctggtgggtgcattttgatttggttgtaacctgagtaagcatccatgaagcttaggatatcatggctagttgtatcgtctaccagctggttgatccttggaagcgaaaagtagtcttttgcacatgctttgttcaagtcagtgaaatatatgcacactgtcaacttgttttttttgtttggatacgaacatgggttggatacacaaagtttcttgaatgtttggtgattaagtcatggccactcatcctttccactttatctcttagcacttgggtgcactcttaatccaacaacctccgtttttattgcacaattcaaaaatttggatcaatcttgggggcatgggtcatcacagaagggtcaattccgaccatgtctccacgtgacgatgcgaagaggtccaagttttccctagaaattttacctgtactgatttattttttggccctaaatccttcctaatcaatagtcttatagctggaaaagtgtgattaaccttcacttcttccagttcttctacaagtccaaaagttgttttcatgatccccaaagcgaggatctatgtattcgcctcactttaggatggccttcattgtcctttgctaggctcagagctctttgcagacatcttctctttcttggctttgcacaaggccaagttgtaatagtgacaggtagactgttggtgtcccctcaaacatcctagccaatgccttgttgggaactttaggcaaaggtggtcaataaatgttactacctttaggttgtataaagctagacaacctatgatggcattgaaggctgaaagcactttgcttagtatgaattgtgccatcagcattccagttgttgggttctctccaattggtaggggcaatcggatgtaccccatgggtctaatgccttggccaaagaagccatatattacttgtgtgtaaggtgccaagtcagttagttggagccccatcttttcatatgttgatttgaaaagaatgttggacgaggatccattttccgcaaagcaccttacaattatcatgttctaatctatgcagtaattactaggggtcattgtgcaagcagttgacttgggcagcgtctccttttgtaatagagatggcgagctctccaagtttgggttgcttgcaacacctcttttgaatggccagggcatcacttttaggctcgtgatgcagtgtctgcgcatagcactcccttaacttgctggtttcgcctgcaatgtcaggtccgccactgatgacccctaggtgcccggccacttgaaatggcatagagtctcagttttgggtagcttgttcctaagattggtccatctgcacataacaaaacaagtggggattgttcttccttataaggagttcaatatcccttcttatgttttgcaactccttggtgtcatggcctaagttattgtgatatcagcaaaactttgacatgtccctcttgctcatctcctttctgataggagggggcttcttgtatgggacagtgccatgagtggccatgtaaattgtctcaggtttcttagttaggagggtgaagcaggtgtacttctcctccttatcttttctattttgtgtcatgaaagaagtgctgtactttcccttttttccattgtttcttcgagatctattgttgttgcgctttcccccagtgttcttgccactagagtttttcgtggcattgttagtgcctgtatgtgcacctggcttggggatgcagagtgccttgagaatgcctattgttgacttgccctttttgggcctgtcagacagcttcttccaacttgataaatcatctgctctatcaaggaactttttcacgtttttggttgacactcttcagatatctttctagaactcaatcaaatgaaggatactcgttagtagggttgtataccgaccttcttttattaggcctttgaccatggtggcctcaaccatgaacctttggatataatcctttaaaaaggtgccccttgtcattgtttgagctcgaaaatttcttccagctgcgatggtatcattgtcgaggatgagaatttagtgtaaaattcccaagaaaattcattcaaagaatataatcttcataaagccagcttgaagtaccataactgagttgtttatgacagggtttatgggaagatccaacacagcacatcacgagtaatcttttgaagatcaagttgcatctcgaagtacttgatgtatgctagtgggtcctctcgtctggtatacatcttccatactgacatcttgaacttgggaaagggcaaggcattgatgtatattgttaatgatgaaccccttgacctatctagtaaaagatctaaagttttaggacagctagacaattaaccatgtctcttatcatatctaattgtgcttgcgcagaaggatctgatgctaaaagggcttggttgattggcccttcttggttgggcagtagcgttggatgggctagagtctggtcagccataccctaggaatgggtatgctcaaatgaatcgaatgcaccgagtggtgaaattgtagatgtcaggggatggccaagttttctcagcagtgcactaggtataaagaatggatgaagcggaagatttgcatcagaccacaatagctagtcactaaaagcaacctaccagcctcaggacaaatagctcattccccatcaccagctactgacaaaccttaagaggcatcaggcgggatactataggtgaccctaatatcacgaagtttatccatggttatagaaatagcaatgttggcataattaaatggttccatcaaaatgggcaaactagggatcaccatcctattaggtggcatacttgtaggcataaggaagtggtggtatgcacgggcctcacatcttttatttctctctcgaaccctacaagctctaatcttagttcgaggtaacccataaaggaatgaaggagggttgcagtccatccaatgattgttagaaatggcaaactcggacaaaggaggaggaacaggttctgggggaaaggtactctcaagatacaaaaactcattctcgctttcagctagcgaaatcttaagcctatataggtacaactcagggtcgcaatttggtcgaatcgctttccatttaggaccaagtgatgctcaaattggacccttttcaaatgctccttgtagctaatgatgcatccaaaataatcacttctctcatataacaatcttatatacctctcacgtgagtcctcttgaggactttcagagtccagagatgagatatagacaaagtcagctcaaggggtatttgtccgggattcatgggaaacacaaggtaagaccgaatgacacccccatttaagaggtagaaaaaagataactaagtgtgctaagtaaggaaaatagagctgaaaattctacaggaacaatgtgttaatcaaccctctaaccatgtgagggatagcgccaacatacaaagatataagtagcagaccaataattttatcaaggaaaaaaatgccacgcaaaaaatggggagagagaaagacttcataccttagagacttaaggcatagttgacagagtgttaaatctaatagactgagaacagagcaccttcaacaaaagtggagaaacatcaaaagacaattggagaaaaacatcaagtagccaaaagtcacttggataaagagtagctctaaaagcaactcgaccatgagtgaaaaaattcacttggccaaagagtagctctaaatgtcactcaaccgtaactggaaaaagttactcggccctaagtgacaaaagtcactcagccatgagtgataaaagtcactcggccaagagagacaaaattcactttgccatagtgattgaaagtcactcagccctaagtgattgaaagtcactcaaccttgagtgattcaaaaagtcacccagccataagtgacaaaagtcactggatcaagagtgattgaaagtcactcggccatgagtgattgaaattcgatccgccataaagttctcaagtcactcggccatcatcaattcaaaaattcactcggccatgagtaacaaaagtcactcgatcatgagtaacaaaattcactctgtcatgagtgattgaaagtcacacgaccgtaagtgtgctcaagccactcgatcatgagtgattcaaaaagtcacccggccataagtggcaaaagtcactcggtaatgagtgattgaactcgaccacaatagttctcaagtcacacggccacaagtctcaagtcactcgaacatgagtgacaaaagtcactcggccatgagtgatcaaacatcactcagccttgaatgctcttcagtcactcggccataactgacaaaagttactcagccataagtgactaaaagtcactcgtccatgagtgtttgaaagtcacttggccacaagagttctcaagtcacttgcccatgagcaattcaaaaagtcactcgcccatgagtgagaaaagtcactttgccatcagtaacaaaagtcactttgccatcagtgaaaaaagtcactcagccatgagtgacaaaagtcactcaaccatgagtgatcaaaagtcaatcgtcattgagtgcttgtaagtcagttagccatgagtaatgttaatgtcacttgaccttaagtgttattaagtcacttaaccatgtgtgatgttaatgtcattcggtcttgagtgctcttaattcactcggccatgtgtgataataatatcactcagactgaacaaaatcaaaattcaagaaaacaacaaaaagaatggctagattgggactcaaacctaagatctcttggaaaggagacttgaaggtcaccacgaggctaaggaataagttttgaagtgaaattgaaggaaaggaggccccctatatatagtaaattctttcacaaagtgtgtgacaaggaagagactcacaattcctttagagaatactagactaactagcccacaagagtacataaaagaattcgtgcagactagggggcaagtattaatcccaaaaattagcactgctaacttttgagattagctaactgacagttgaaaagaataaaaagaatcagccaagagagtcactctagaggagtagcgatgcatggtccccggcatggtttccatgcaagccatttgacatgcatgcgcaagagtcactcagtatgcatgctcaatgtcactcaacatcaatgctcaagagtcactcggtatgcatgctcaatgtcactcatccatccgtgctcaatgtcactcggccatgcatgctcaatgtcactcaaccacacatgcttctcacaaatttcactcatcatgcatcttccaaatgtcactaggcatgaattttcacaaatgtcactcggcattcctcttcctaatgtcactcgacatgcattttccaaatgtccctcggcatgcctcttctaaatataactcgaccatgcatgctcaatgtatctcgtccatctatggtaaatgttacacagccatgcatgctcaatgtcactcagccacgtgtgctcaatgtcacttgttcagcatgccactcgacatcgaatttccataacaacatgactaaacttagtagaattctcccaagaaagggaagatttgagcgacaaaggtagggtcccaaggacaaggcatgcatgcaaggaatgtatggccacatcttttacaagctctaaaagcaaggtggtacgagtagtggaggaaccaaacttgtaagacttgaggacccatccaagggtacactacagccactacccttgcgacctgggacaatctaacaccacacaagggtacaaggtgcaaggccacctcttgcagctgcgatttgcaacttgaaagtgacatcttgtctctttgggatcaccatgtatctcagaccactagagcctataaataccctttttcagatgtgagaaggggttggaaaatcaatcttgtaatcaacacattgaaaacaatagaaagaaatttttctcaaatcaaaaatctcattaacatttgaattttcactttatcctcttcttcatcttatttttgagtttcaagtttagatttcaatattctggccaaaaagttagttgacaagttcttactgtcaacaataattatttttcctcttttccttaactcaagaagtttgaattcctcatccttaaggggaatggaatttgaaatcctaatcatgttaggaatgcttgaagaatagaaataattgttaaagatttccaaaattcattcccacctggtactttcgagagaaacgggcttagttcacgtcatcaagtaaacctcacacaagtatgaagttgacttgggggaaaatgttatcccaaaaactaaataaagttatgtggacatcaatgtttgacacgtggcaagaaataaaacatccttaagatgagtagttctgagtcatagcaatcgacctaggaggggtccttagccctgcacttaggttgacttcgagaactccaaaatgggtgttcggataatgccaagttatttccaatgcactatctttcagtattctataccatgaagacataaagaatccaagaccaaggctcgggagctgaaaaatacacaaaacagcaaccctaaaagtgaacctgggtgcttagggtttcacccagcacccaagttgacattctaactagggtttcagtttctcggatcatcttagtgcaagtgagtcaaacattacactgggacatgaattagacatgtcaccaacatatttaaggtatgagaataagatttggagcactttcatttttgagaacctaaagcaccaggtgccctagggcacttagtgtccaggttgacattttgtcaatttggggtaattccaatcatcaaactaaagaattatcccaagagatttctttttgttcattaaaaatgaggaaaaaagtgcttttggggaagaaacaaatcaacctagagcctagaatgcccagtgcccaggttgacttggtgctgggcccaacgcctaggttgacaaatgtcaacctatgccattttcaaagagtttttctaagaagtcttctaacatattctcaattttcttcaaagattaagacaaagtttttccaggaatcaaacagagccatttcatggctaaaaactggactcatcgcctaggttgacatttggttctacagctagcgctcaggtggacattttgtcaacttgggttgtttccaatcatatcccaaaaaattgttctaagcatttttttatcattaaaaataacaaagatacaagtaaactttgggagaaaatgagaatcccaagggcatgaaagtatagcccaacgcccaagttgacaatcaattggtgctctggttttgatcattcaaatgcgaattttgatccgagcattctctctaagatgatcaaaatttgactttcagacctcctcctcgatttcaagaatcttggaagcatcaaaacaacatctcaaaatctttaagaagaaaacccaacacaagttgacgtatgacctggtgcgttgggttatgtttattcaattctaattttgagtctcccaattctgtgaaacaacaatatcttcgagaactcatgaatggttgggttttctgccctaaataaannnnatttcaatataatcagatttactgattaataaagatcagaaatcacattttat

SEQ ID NO: 16796 - DNA, 9520 bp, Cannabis sativa
  modified_base (1471)..(1490): a, c, t, g, unknown or other
  modified_base (8545)..(8545): a, c, t, g, unknown or other
catagcaacccaaactgtaaatttttttttaaaaaattaagaaaatagtatatagagtaattcctcaataatttaatactatcttatattgcgtagaattaaattagataaataattttttttaattttaaattaaaaaattatataaaatattatgaaatttattttatttttaattattttaatatatagaaaaaaacaattattggaatcactaaaaagtggggtccaccattttttaagtataggataaatgattattttcttttaattttttttaggagaatgggattattattattaattctagtagaagaaaagggtaagtgtattttaaaagtattggacattttattttattaaatgataaatttgagtatgtactttttatttttataatagtatcatgagttaattttttatcaaaaataaaattagtagtaactcaatttaaaagtgttataacaagattaggtatgttttttatatttgtatacaataaaaattattttcaatttgattatatttaaaaaaaaattattaaaaattaagttcagtatattattttatattttcttaaaaaaaataaatttatcatttaataaaataaaaaatttattttggtgacttttataaaatacgaatataggattaacaaaaaaccaataattctaatctagtaaaaaaaataattgaaatcattaaaaggtggggtgcaccattttacaagtgtatataattccattttattattattatttttagctatttttttattacaagtgtagactaaattttttgaacgagtcttgttgtgcaacccaatttgtttaagctctatttttggcgtgttaaattttttgaatcttataaaattttgcaggatgttttaaataattacaacatacgaaatcatgaaaaaaattagacaaaaaatttctctcagataacgaaatagattgagatacattagtgcatcccttttaaggattgcattgtaaagattttcattattattttgaggaaaatgagattattatttgggtgcttctacaatgtactcccttaaaaggaatgcacagatgaaccctctatttatttcggtatttagaaaaaatttcagtctactttttttctattggtgtatggtatagttatttgagatatccaataaaattttaggaaattcagaataatttacaatataaaaagtagtgttcaaacaatctattttacacgcgtataaaataaaagagtcttgcatgcaacagaatgtttgaacactatttttagcgtgttaaatttttctaattctctcaaatttttgcaggatatcttaaataactacaacatagacaaccatgaaaaaattaattagactaaaaaattatctcaaatgtcgaaagagatagggattgcattagtggacccttttaggggtgcattgtagattattattattattattatnnnnnnnnnnnnnnnnnnnnttattattattattattgttgttggaaagatttggtgcttctacgatgcacctcataacatgagtgtattgatacaccccctatctattttggcatttagaagaattttttactttaatttttttatagtcgtgtatattatagttatttaagatatcctgtaaaatgttgagaaattcgaaataatttacaatacataaaataatatgtatatagtttatttcacgcataaaaaataaaagagtcacacgtgcaacatattgtttgaaccctattttcaacatgttttttttttttttttaatttttcaaaattttgaaggatgtcttaaataactacaacatcatgaccttaaaataattagactaaaaaattttctcaaataccaaaacagataaagtatatctgtacacccattttaagaatgttcattgtagaattttctaatagagttattatttagaaaaaaaaaatctaattccacgtaccaaaccaaaaaaaaaatataataaataaataaaaattgcatacataaatggaaaaatttacaatagatacccttaaaagagatgtactgatacacttctatatgtttttgttatccgaaataattttttaatcaattttctttcatggtatatacgttatggttattaaagacatcctgcaaaattttaagaaattcaaaaaaatttgacacattgaaaacaaggttcaaacagtgtactgcacgcgtgactattttattttatacacatttgaaatagactgtttgaacactgctctctacattgtaaattatttcaaatttctcaaaattgtgtagaagaaaaaaaaaattagactattttgttgtgatcatataaataaacttaaagaaaggcaaaacaagaaagaaaaaatcatgcatacaaacttacaatttgaatcgtgttctcaacattttaaattttttttgaatgtcaaaacatgcagagagtcatcaatgcattctttttaaggggatgaattgtagagtgctaatataaataaacttaaagaaaggcatagcaagaaagaaaaagtcatgtatacgaatttacaattttaattaacgttcaaaattttataaaatgtcttaaataataaatacgaccataaaaaatgactcaaaaacctctcagatgctaaaagtgcatcaatgcacccgtattaggaaagtacattatagaattttcaattgttattttaagaaaaaaggaattattatttaccaaaaaaaaaatctaaaagtacttaccccttaaaagagatgcacggatatattctctacctattttgacattcaaaataatcttttaattattttttttcattttcatatacgttataattatttaaaatattttataaatattaaaaaaaaaatcacaatatagatagactatttaaatcttgttttcgacatattaaattttattataattcttaaataactaaaggtcatcaccatcaaaattatttttaccaaaacagaatcaaatgcatctatacattcgttttagcattctaaaattttgcaaaatctaattcatgtaccaaaccaaaatagtaataaaaataataaataaataaacaaataaaaatggcatatatatatatataaacttaaagaaaggcaaagcaagaaagaaaaaagcttcgatttttatatttttacagagagacccaaaaatggtgacagagaagaaaatggtttcagagaaagagaaaatggtgaaattgatcttcacctacggaacattgaagcaaggattctccaaccatgtcctcttacaagatctaatcacaacaggagacgctctcttcatcggaaactacaaaacccatctcaattaccctcttgtttgcggtccatacagagttccttttctcatcaaccttcccggctccggtcaaaaagtcatcggagaattgtacgcagtttcatcctccggcttatctcgattagatgaactcgagggcatcactcgttctcattaccaaagactcccaattcaattatcaccgttggatcatcaagatgatgatggtgttgttctcaccgccggtgaggcttatttcgctcattctagctacgccggtaagctttggaacaagaatggacgacaagggttggttgggtatacagaggaggtggctcgtgggtatgtcaaacggaaagataggcctcaagatcgaacctttatggatcatattcgttcttttttagaatctcagtaatggttttttttattttgtttttagggttagaacagaagaagaagaagaagaagaattgggatttgattagataagaataatatgattatgaaaagagttgtactgtcatttctgattcttatgtttatggtatgaaaataagaaagagaggtttatttatggtttatatatattatccacattcttctcaataccttcttcttcctttaattgctgtgtcctgccattgttgttacagttcaaaagtcagaaacttcatatatatatatatatatatatatagatgtattgctattgttattgatagttcaaagtctgaaactttatctggtaaatatgatcacaacaaaattgtatgtatacatgtatcatatgtgtgtatatgtatttacaattgttattagcagttcaaagtctgaaacttaatctggtaaatatgatcacaagacaacaatctcatcagttatgtgtacttttttacatgtattacaattgttattaacagttcaaaagtcagaaattttatatatatatatataacatatattgtatatacatgtattgctattgttatgaatagttcaaagtctgaaactttatctgcaaaatatgatcatagcaaaattatatgtacttttactttacatgtattgcaattgtaaatttgtaattagtagttcaaagtcagaaactttatatagcatatatatatattgtatatacatgtattgttattgttatataacagttcaaaagtaaacaatattatatgtacttatatatgtattgccattgttatatgacagttcaaagtcaacaacttctttatcagctaataactatgatctcaaatttcaacaacaatatatggtgtatttgtatatgtattaccatagtgatgtttgactaataccaaggccattgcatgtaagtatcattcctttgaatcttgcaagatattcctacaaaatataacaatcaatcattcattcattcacttactatttgcatctgaatctgaaaatgaataaagattaataataataataataataggacaagattacttggattattcatagtacatagtacataccctaagagtatacttatcaatctcataaattccagtataatcatactccaatcgcttagctggatcacttaacactgcacacacaacaaataaatcataagacatacttcattcaaaaaacatttgaattcaaacttcttaatgcttaaaccagcaccatatgcatttcaattctcaattccaatcatatatatataatgaatgagatacaaagaaagtagataaaagaatgatttcaggacacacattcagctagggtaagtatatttttaggctttcacggttttggtttgtacgttttcaaataccgctatacaattacaaaccgtctttgttaaatggaccacaaatcatttttttcttctaacatagcaaatattggattttgctagaagaacttttgttgtcttgatcacagttcaacattaaaaaaagtccgaatggcacaaatctttttggttcttaaaaagaaatagtgtgaaaaggtttaatgtccgacatgaatttctagatctacaaattttcaataccaagctctatacatagtaaaacaacagtaacacaaaacgaaaaagcaaatatgagggtcacttgtttgagacatcgttgtggactttggtgaacttggtgttgttttgaagctaccaatttacaatggcatagagttatagaacctatcatttcggtgaacttttgattcttacaaaaaacattctatccataaatttggcttgaggaacttctcctttttcggttgccaagtgaccgatcaaagaagaatgggctgaagatgtatggtgaaagattaattcttggtgactacatggttatttaaatcgaaaggttttgaggagctaacttttcacgacttgaccaaagaatggagtcttatgttttatatatcttttcttctcggaagttatagcttagcttgtaactacggttttcctccaccataagcaaggctcccgaataatgtttgggaggagctcagtcaaagacaagtaacatctgtctctttcaaagaagaatagcatagtgcatagatttaacaccaaaatccagcaatccaaaatgaccatattttcttttcatttcctatatatcaccactgtttatccactaattaattaccaatggttgaatcaaaaatccatgggttatatgtcatgctataacagaactctgtatcaatgtgtatctttatttggttgccaaagaaactgaaacaagtaaagcatagtgatacaccaatattaaagaatagaaaataataagcacttagttatattagctctatattacataatgtgtattactcatcggtttagtagtttattagtgtagacgatatttgtttgttagtgtgtgaagattggtaacttgttaaaaagagctattggttatcacttaaccaattaatgaagaatgtatataaattcctatttcccctctagttaattctctctctctctccctatactctttctcagttctctacaattctaaggagtacgccaatacgcaaaagtttggcgattatcgctacaaggccgtatcacatagacaaaaccaaaaaaggagaagttccacaatttttttctttcttcttttcggaaaaagagatggaggtcaaaagtcgtagactaacctcctctcatttttaatagggagcctcacttatggcggaggaaaaccgtagtaacaattaaaaatagtaaaacaggcacaaagacagataaagctttaaagcatacaacataaaatattataaaacatcagaagtcttagtattagtatggtgaggttgagtatagcaaataagagagatttgactaagtgtattgagtggtaaatagaatagtataaataggtgagtgagggaaatagaagggtatgcaatgaattgagtaaaactttatttgcatcaaaggggcttaatggctctcatcaattgtgactagtttttctcattcattctatacaattttccttctgtttggctactggttcgctactgtttaattgtcttcttaagtttgtagttttcggttcttatcaccgaaatccagcagtgcataagctttggagaggcttaaatctccaaattcccaatctttcgagagaattggtctctccacaaagagtatactcttttctaattccaagctaatctaaatgaggaacctccctatatttataagcattggtcttaaaaagagccaggccacctaggattacaattgaaccgatagcattaaaacactaaaacaacttagcctatgtacgtaaacctcttgttctataaaccgatgttgcaaaccagaatgaaccccatagtttcttttcatttccctttcctacatcactgttttaccataaatgaccacaaaaatcaaagggttttgtttatatgcatgccataatgtaaaagacattcaaactaagactaccaaagggtttgtttagaatggtgcaaaacaaaggcatgaaaaaagataaggcattggccttggttttttaccactgtaagcttcattaatctcttgaaactttgctgtaatagcactgtcattcttgtgcttatcaggatgccatttctgaaaatagttggcaagaaaaatgaatgaaaatgtcataaccaactgtgctaaaaaacatgtgcaaagaaaagatgaaatggcataccaaagcaagccttctgtaactcattctgattgtctcatcagttgcatcataatcaacctccaacactttgtagtaatcctttaaacaagtgaacaacaatggccaatcagattaaacccaaccaaaatgaaatctacactcatatatatagctaagtcattacaacatatcatcaaatctataatgcactctttctcattcattcttagtcatttcactccaaaatacttttttccttatccaaagaaaagaccccaatttataaggtctaaagtttccaatcccaaaccccttttagcttaatccaaatcctagtattagtagtatgaaatttatgtactcttaacttatcaaaggttttctcaactaccccatttgagaaaaaatgaaaaacaaaagtgaaaagaatgaaatttagctaaatccaatctcaaaccccatttagctttatctcaattctaaagtttccattctcaaaccccatttagcttaatctcaattctaaagtttccaatctcaaaccccatttagcttaatccaaatcaaagtactagtagtatgaaatttatgtagtcttaacttatcaaaagttttctcaactaccccatttgagaaaaatgaaaaaaaaaaacaaaagtgaaaagaatgaaatttagcttaatccaatctcaaaccccatttagcttaatctcaattctaaagtttccaatctcaaaccccatttagcttaatctcaattctaaagtttccaatcccaaaccccatttagctttaatccaaatcaaagtactagtagtatgaaattatgtagtcttaacttatcaaaaggtaccccatttgaggaaaatggaaaacaaaactgagaagaatgaaacaaagaaagaaatcaatggaataaaaatataccttgtttgtagtggtggaagtagtagaagaagtattactattagcagtgtcttcctccatcagatatagctgaacctgaacttgtattattattattattatnattattattattattattgtaaagagataaatcaacacacttcattcgatggataaaatgaaactaactaataaaccccaaaaatcaaaattgtgaaaaacaaaaaacccagaaaaagagtggtttgtcaatgctggttttgttatctataaggagggttgtttgttgtttttggcctaaacccaagtcgaaaggtacaaccttttatagtttttttgttgttaaaattgtggaaaatagaagaggaagggaattaaggtttggggtttttgtgtggagggagaaatgttgtaacgtgtcttcttccttgcttgcgtgcctgtagattggagaggagagttttgtctcattgcaaaatgcaaaggctttctctttcaatttctctttctctctttaaagttatgatttttatttgttatcagaaaaaaaaaaaaaaaaaaaaaggaatgatttttatcatctttggttttgtgaaattattatcatatggttatgaactgggaatcttttcttagattagggacttggattttgattttttttttaaaaaaaataatatggaggtgtattttctatcattttaaaaaatatggatccgaattgtcatttaacaaaacagagacttcaatcgataacttttacaaaacacagagtctaaaattgtatttacaattaaattctaacactaaattatgcacgaaatttcagcagtacatcctcttaaatgaataatttggtaaatcccttatttatttcaacatctaaaatagtttttaaattaatttttttagtgatcgaatatgttgtagtcatataaaactacttgtaaattttacaaaaaattctgaatagtttacagtgtcgaaattaaggttcaaacagtatttaatatgcatataagaaaaaataattgcgcttgtaataaaatattaaaactatatttttgacaatgtaaaattatttaaaattttttaa

SEQ ID NO: 16797 - DNA, 8800 bp, Cannabis sativa
agtgtaaaaataaaaaagcttcaatttttaattcaaaatagctgaaaagaaaataaataaggatataattttattagaaaaatgtataaacatggataaatatatattataaaccaaattcaatattttaattatcccaatgcgaaaatgaagataatagaataaatataaaataaacacttacttttaaaataaaaatgatacagttcaatgcttgagtataactaaatctagttttataaattgctaaacaaaacaagcttcaaagtttcattattgtatctatggaaaaatattgaatagttcttttgataaattctaatgataaaataaaatgaaaataatggatctagtatttttaattaaaaaaataagttgttagttttcaataaatatgaaacaagtgtatacaaatcgacccatcctattttcatagcaaagcccaaacccatgtattttgattcgactttactttgtcatcgtttcattcgctccgcttcccttctcggatccgaaagtttaaactttcagttactttcgccggaaaagtcagagccctttgctcaaatcaaatctacaggtctctctctctctctttatttatgtcatttgcagcttggatataaaaatctaatggcttcaaaagcctagcaactaaactaattcacatttcactcgtccattaatcattgctacatattcattaagctaagatttactttaatgctacaaaagtgggaagtaaatttaagagcttttgcattgctcgcccataatataatgccagtgttttccactccttccttttagttattttcttttacaatccatttttcttatcccttcttgttcaatttttgggttgtttgaatcagagtataaagtacaagcaagaaaggctgagattgagatatgtggatacctgtattagcagtgctcgtgtctatcttgttgggaacttttattttagtctctcgagattcaaaatctggtaactgtttttctaattacaataatacctgaaatctggtgagaatctgattaattatgttaaaatgggcacaggtcgtaggaaagatgatcattccatcgctaaacgtgacaaggtaattctaatttttagtaaatactttcttatagatttactatacttctgttgttgttgtgcttaaacgaatatacttctaaatcctatttttcctttttctttttcataaataaaaaatcagaaaaagtgtttttgattcttttcttatagttgatggaaggagcttttctgaactagtcatgtgtttggttaagtatttatgtatttggggtggacatttttttaatagggatccaatgtctacagcaaagctgaaatatcgttgcataataaaagaacagattgttggatcattatcaaagacaaggttaatttattttattttattttcttctttttgtctctaaatgaacctttagcttacatttaattgtcttatatatttatgtataggtgtatgatgttacttcttatgtagaagaacaccctggtggggatgccattcttgcacatgctggagatgattcaactgaaggcttttatgggtaaatttttatttattcatttatttggtatggaatgggtaatctatttattcattatctttttttgttcacctcacctaatttggcttttaattgctttcattctcaatgaccaggcctcaacatgcaactcgagttttcgacatgattgacgacttctacataggaaatttggagctgtaattacactctgtttttcaaaaaagaaaaaatttgagacctgaataatacaactttctagttctagttattcggtcttgcagctgtacctttcgtaactcttgttgtggttcatttgcctttaattccaaatgcccctctatttttaatttgatgactttgttgattttagttggttagtctcactccatgtttttggtgaagccagtataaagattcaggataacagcacaaccgaaaaattggatggattcatcgtgtttcagaactaaatattgcaatgcaccaagatcatcaaaactaagctcttaaaaaggctgtcatgcgagtttctatactaaaaaatatgaaaaatatttttctttattattttttttttttgtaataacaataaaatggtcgtacgagacaatatagagaacagggaagcacatttttaatgtcttcgttgaattttcactatacgactctacaaattacagggggaaatcattgtgaattacaaatcagcccagacaatggggttgatgcagaagaaaggaatggatttaaggggattaaaaaatggaagttaaaaaaaaaaaacaaaaacaaaaaaggacttctaaagcaactcctatgaatcaataaccaaatatgccaaacaatacaaccccaataaattatcttctaatatagctacccataccagaaacttaaaagtgggcagaaattatcacaaaatgctctacaaagtcatttttctagctatcgaacttcttaggctgatgccattgtgccaaacttctggccaaagaaccgatgaacgatacttttgtttgagctcctttcttcccatataaatgcttacctcccagatctgtatattttggaccactatctctgcttctttcaatctgcagcgtattcagaaaagagccacaagaatggcaatttaatttcatttgctccattatatgatctgctatatgcataaatacatatatatctataatgcacgaagtaacacttaaaaattttaaatctgacataccttgcttatctttccatcctttaagtggtaccgaataccagaccaattgattgactgagtgaaatgagaacggaacgcagagattgggtataagaagttatccaccaccatagcaacgaagacctgccgaatccataaccagtttatcacattagtatgaggacctttatgtggtaaaggcctttgcaaatatttctctaccactaaactcaattatcataatgtaagaattttgacttgaattcgggccaacttttacatgtttatttatttcaaagtaaaaagtgacaattcaatcctccattcaagtcagaatggagcatattacatacagcaactataaaagtgaacacagttattttgcatgaatggaagcaagagaatcttacaaggccccaattgtaagaggcaagcgagagtcgaggtgcctcgggagataacatgttgcatagttgaacttcaatcctagtcaagttccacattgagagaagttctataagagtgcatgtagctagaatagctaccagccccagccctgagagaagtagtttacggctgtaagactaaagtgccattttcagggaaaaagtgaattttcttttaaagacaaatgaacagtagtttcatatcaagatctgattcacaatggcaggcaattgaccatagataaatgaacaaagaccaatcactagaaggtcatagagagaaaaagaattattaaacatgccatagttttcttttagttttgctgcaatatctcaataatactggtcaatagtgtaaccaaatcttacttttctgacatgggcggaaggggattcaaatttggaatttcctctttgtaagaataatagtatcactaggctatgcatgtgaccaccatacaaccaaaacttactccaaacaaaccaaataacaactcatgaatagaaaagagggaaggggaccatcttcacccttgaaaaacatttcaataaaaaaggtttgccagtaatatttaaacatccatttttgcaccaaaaaatagtgagcatctaatctattttagccagttcaagacctggtaggtcagtggtctcaactctcaagtgttgagcctccatagagaagtaagaagaataacattactcagatcacggcattaatatagaaatgaaattaaaaaagagtacatagactatcctgcataccgatcaaatctaattattatcaacatacttgcaagagaaagaaagcatactcaccactagaggtgatgccagcttcgtcaaatgtataacccttaatgtagatacgtaatgctgctgtgatgtgaatcatcgacattatatatggcattacaaaaccccaagaaagatagcagtggactgtaaacagagcccgattcataaaccaattaacacttgacgtgtatgactctaatacaaatgtttgctttctcaaataattccagtacctacagaatagttacaatgtcaacatatagtcaagcacatttgagtttagaaaatgaagcaatacaaaccttccaaaactaagatcactagcaaggggatgagggaaaacagcaacgggaggtgatgtgatgagcctcttatgagcacctggaaaagaatagatgataccaaaatacacaattatttaaatatcaatttaatgtaacacttatttaaacagcctacaagaattgtgaaataaactaatcagtattctaccagctatagcagccagagtcatatcgtcagaataaccaccatctctaagtcctgataccacaccatagcgatcttgtctaaagtcatcagcatgcatctgcaaataatgtgagagaattagaaatatatattttaatcttctacaagcagtaaattagaaagttgcagctacttgccatcatgcaccctccccatagaaagaacgtcctcccgccagtagcaaagcccatcgaacaaggctgtaaatagaagaacaaaagctccaagatattagtggatttatcgccaacagtctaaagataaagaagaagaaatggaaacaagtgatatttttataatttgaacacacaactaccacaactaaaagggacagatagaaaataagaagctcaaactacatatattgatatgataaacaaaattatttcatactctactatattatttgaaaacatgttaatgagtggtgctagaaatactatgaaagtaaccaaggatatttttttccatcaaaactcacaatgggaatccactttttcttggttactttcattatatgaatatttaggcatatactacaattatgacgatgtgctgcttataccatcattgttttgcacttattataactgctagattggagataacaaggtatgatactactacaaaattatctttgttatataaaaaacatgcagttctttaaatatatcaaatgaaatttgggcaaaaaaacgtggtaaatggtctataccatatgatactcatatatgcagtaactgcctaaacttcctgaaggtaaatcaagagggtagccagtttgaatgaatatctgcacatcattgacacaggagttatgatcaattgcagttaaaagataaattcatatcataggtcaaaacagaaagatgcatgtgtaatatctcagtatgcaatcaagaatttgaaagttgctggcacaattacctcaggattttttaccatctcagcagtcaaggctccaattgatcccggatgaagcctaacatcgtcatccaaaaacaacacatacttgctgtctttatgcattttctctactccaacctaaattatagttcattttagtattcctttactaacataaagaggcagtagagaatacatagctacacctaacaagtttagagttagacaaataaaggaagtgctgtacccaaactccatatgttattatatgttcatgtattgtttgaattctaaatgcattcctatccactaatctattctgcgtcctatgatatagagaaagacaattctactccatcgtcatgaagagatatctcgctattatctgaaaaccaaaagttcttgtgaaagcaaaagacatgcaacaacttgtttaatttgatatgtaccaactgattgtgaattttctgactacaggttgttgaatgaccagccacaataatctttgcgtcaacctcatcctgtgcagatcaaacatagataagagtcagacagagtaaacatgctaaagattatcaggcaagatttctgattctcttttaacaataatacataatgagaaagccatatatgaatttaatcataatactctgtgacttttctgaaatgcagaattgaaaaaggatcgagtgaaattattgtgcaccttatagtcttcaattaatcgagatacagcatggtaagcagggtcatctgtactttccacgatgaaaagaaattccagaggaccaccatagagagatgtaatctgcagacatgaatgaaccaggtccagaataacatcagaactaaagacaaatattaaatcttttccgttggagcataatatttaaacacgtgacaagctagcaaaaggaactcagatgacttgtattttatcctaatacagtctattaaaattaataacaaatttgaggtgctgatgaaaagttatataacaggctgaaataaacacacacaacgatttcactttttataacaaagaaaaaaaataaaaaaaataacatataggcaaatgcatctttcaaacaaatcatagctggcttttagatcaattataacaacgaaaatcacaacaaaaccagctccccaaaccaaccccaataataaataaaagggatagcagaataggttagcacatttctggcttttgggagaaaaagatgcatcaacctcacctgacttctccaattatgtaaattgtgttccccaaacccctttaagggcataacaactgtcacactaggtagcttgatctgactaaagtggtcaagttcattaatatcatgacaaagaaatgcaaagctattcccagtttgcatactatccttcaatcgcttgatctctctattcctgtaatttagagaagggaaaatgatgaacatatctcaaacagcaacagacatgaaacaatgaacaagtgccacctccaatgcagttagactcatttctgaaacaaagcaagtaattaaaccaaatacctgacataagcagcacaagcccacccaagagcaagaatcaagcagattaaacatccctgcagcagaacaaagactttagcactgaaaatctgaaatgaactcttatctgataacgtcacgatgattttaatgctaaaacaagacgcatatagagaaagtacacaaagctactgcatttccagctgtccctccataatagcgaaagatcaccggattaatacttatatctacagagctatttttactaataaattgcaaaatccaacatttactacaatattaccaggaaactacctaaacaaagaaatttgacctgtattatgctataaagttcggatttttacccaatttcaagtaaaggttgaaaattaatgaataaacaaaatctcggcaattcaaatgctcatagatggttttctacctgaggataatgcactaactaatccagattacaggctgaactatcttaatatgatcactacaaaataaaattgatctctctgacaaacatcattttttgaacaaatacagaagaagaagccaattttttcttcttctttgatataaataggccaccatatgggaaaactaaaatattcaacggaagctctaagttctaggaggaatatgatataataataaatttagttgaaaaaaaaaagtagctgatgctcagtaaggcaaagagaaaaacaagaaaaggaaaatagctttaaattttgaattgaagaaccgagggggggaaagggaataaaaaaatttatattcaaacaatcggctaattcgaaagagtatatcataaaacaccacgctatggaatattcatcctcgaatctttctcggaaaacaaacagacatggatctaaaacagacgagaaagttgaaaggcataaaataaaaaataaaaaaacgagtgtaaggagtaaaaagcaaaacctggatctggacgaaaatagcaagagggctacaaaatgctccggtgaggtaaaacagtaaggaatcaataggatccattgcagacattgtgtctgctccagccgttcaatctctcagactcaataagtcctccgttcgtgtgtctataaaaatcgaaagaagaaagaagaaaagaagccctagttttctttgagaaagtgtataaacattttctcagatcgccatagacaaaacgagagagaaaggaaaagaaaagagggcacaaatgagagagcgcgtaattttatatttagaagaagaagaaaagaaagaaaggtattgggggtgtgtaattgaccatacaaatcacatttattttatttttaattaaatttagaaagagagaaaatttaagatatagagaaagagaggccgttagatgagtgtttgaggttgttattttaaggtatacaacgacatatgttatagatagataaacagagtagagaatagagatgccatggtagacatatagaagagaaaaaaaggctgaagagggaagcacgtgaggtggcacgtgctaattgggtccttcccttttctcccacctcagctctcacgattgtgaaaaaggaagatgctaactttatgattcgaatattattcttttattattataaatatttattgtttttattttataattttattacagttagttatattattttttgttattaaatatcaattaaattaattaagtgctagttaacaaatatataattatatattattttaatttatttaatatataatttaataatatgtgattattgttataaaataatataaaatagatgagaagaaagaagtagaag

SEQ ID NO: 16798 - DNA, 24935 bp, Cannabis sativa
ttttttgtaaatttccctatattataggagttttccaaaaatatttatttttttatgctttatttacaattttaccgtctcaagtttttatttttacaaaatacgattttaaagttttaaatttactagaatacagtttttttagcataaaataagaaaataactaaaaaacagcgagaaattaatgactctaaataaattataaaatatctaaaaaaataatattgaacagtttattgaagttcgtatttttgtaaataaaaaaattcaatctctaaaaatagaaaaattttcgtattaacatatttttgtaattttttttttaaacttttgatcattatgtaaaaatttctatattatatacctgttttgcatgagataagagaatgcttgagtaggaagagttgtagggcttgaaagctattgaggctgcagccaaggctgcagcggtctcgcctgcgaggtccgaaccggggtggttttggtctagcttgtatgctgttcttgaagtggtcatgtcttcagcacgttcccaacagtagtgatctgagtccccatctcccaccttagacattattttgttaaattgtgccatttttcaaataaaaaagtaattttatgcaaaaaaggtgttacctgtgcccaaagaacattaggcttaggatgggccttgatgaagtaatcagtagcccatctaatggcccacaaactatggcccatttggtccaaactcttgatttctttcctaaaatcaataactccccatgaaagcattgttgcagtaaacgccattggtagaccaaacttaacatgatcccctgcatcataataccctccaaccaaatccacctgcaccaatcaaaaaccacaacaaatctttcaatatacacatacatgaaacgtgtccttcaatcattggccacatggtaaaacaattaaaaaaagaatattatatcataccccttgagccaacccgtctctgagtcctgagtcactacgccacttgactcgttggtcctgtgatggtaacttaccagacctttgagcctcaaagaacagcaaactcttatcaagtgcgtccgcataattataccctgcacttgcctctacacgagcaattcccactaccaataaggaagagaagagtatgatgatattattggtcctcatgatgttcactactataataactcaatattgttaatggctttctaagtttctcatttttgagtttagtgagtgagtttatatatatatgtaattattaactagagaaagaagaaagaaaattaaagtggttatggtagcctgcacgttgttgtaattgacaattaagtagagctcttcacgttgtgttcataatactatgattatgatatataattataaattaattgtgtgatttatatgacgtggcataccaaattacttacacgtggacatgtttgtaatgtatatgtcttcatgctcggttaccaaagtgattgacttttggtattttaatttatattaatttggttggttggacaatattagaggctgccattttaatttataagaggagaatcgatgcgtgcacattataaaataatgagtttgtttagatttttattaatgtttaaatgattgattataaggactaataatgagaatgttttgcttttcatattgttttatttcgataacatttattccacactatccataattattcacttgtaatctgatttttcaagtgttgttctttagattaattattacgtaaatatttttgatgaatgataagttaccatatattaagaaaaaagacactatacagcataattcttactcaatcttacatattatatacatgtaaaattgacctgttcattaaagaaactcgaattttttttataataaagtacaaattcaaattttcttacaatgtaatagaaaatcttgaatagcaaattcatgtaatatttgaaaaaatttattcctaaattttattccactgagatggatcatgtagatggggcaggtcggcctgaactgatttctttttccgcgccattaaattttttgagtcggaccggatcaaactaaatccgttttagtcggattgggtttgacccaattcaaattattattattttttaattaatatattttttttaaaacatataattacattataattatattaaaactaaatttaatttcttaacaaaattagcaatattttgtgtctaacatataaatatatacacacaaatttatatataacgaagaaaaatataaatgaagaagatgatctcaaccgaaacaagtagatatcgatttgaaaaattattgtcaaaagtggcaggtcgggttgggctggccaaagattcgaataatgaatcggaacatttggattgcggcgggctcgatccgataaaatagcccatttagggtttatttagtacactatattacattgtattatattaaattaaattttatgtaattttttttttaaaattaaaaataatattaatttttatagatacctaaatatataatattttaatataaattaaaatttaacataatattacataaaaatataatatataatttaatttaatataatataacacaataagaataagacttactataaaataacaaactagtccttaacattcttgtgtaataataacatatatattttttcccaaaaaaaaaaataatatatttttttagtgtcgtttataggaacgaacgaaacggtcaattttttactttcaaagtctacatgaaaaacgacaggaaaattgacacgagcttaagctttcacctgtcgttttacttttatacgagagaagaataaaaacttggaccgaaaggaaaggtgaaaacgacatgttgctttttactccaaatcaaacgacatcaaatctcaccaaagcaatcgataagtcggtttcaacgacggcctccggcaccggtcatcgttttgtgaattttcttaaaacaaaagtaactaaaattcagtcattttttgttatctcaaaactgagataagctcactgccatagtcagcggcggtgctctttacttctacgaacctcaatttccatggtcactatcttccctaacctcatcaacactcaaacgagagaagagatttcttcttctttcactttcagtttctctgtttattctgattaaatctgtttctatggtctaccactttgaaccttaaccgattgcgaagggagggaacaagagccgatggagtcatcgtctcaggcggagtcgatgatccttctagaagacttcggtcaaaaggttgaccttactaggcgaatccgagaggttctggttaactatccggaagggacgacggtgctcaaggagctaattcagaacgcggatgatgccggagctacgaaggtctgtctttgtctggatcgtagggtccatggctcgggctcattgctttctcagagtttgtctcagtggcaggggccttcgcttttggcttacaacgatgctgtttttactgaggatgatttcgttagcatttcgaggatcggtgggagtactaaacacagccaggcttggaagactggccgattcgggtaatttctccatggttaatgtagttttgttttttttttttgaaatgcattgttaatgtagtttgagaaaggtacaatatgaattataagtacgtaaagtgttcgaatgcttggtttctcagaatgtgatacagaatgtttcgttttgttccgtgctttttaatttatttgaagttacagttggttgaagggaatccatataacgattttcccactgtctattatattatgcgagtgttcaatcttactatatgtagaaacttttcaatttgatgattcttgttttgtttgaaaacttgtggatgatgcattacggttttacggtaatggagaatgtggattttggttttggatgaataaagaggtggtgagtgaagattcgtagttgaaaaaaagtggaagttgtttggattggaattgtctgcaatgaaggctgtagagtattttagagcattatattcacaaatgtgtagaggtctatagcaactttagcaggttgaaaagaaagcttgtggaagaagaaactaggactaggagaaacaattaattttctctgtgtcattgtttggatataatttacaaatagtgaacttccaatttagattttcaaaaacatagtaacttattcttaaactaattgttgtttgttttaattttaaaattatataagatggatgtttctctgaccaagttcctggatttgttattctttttaagacttaaattgtgttgcctttcagggttggcttcaactcagtgtaccatttaacagatttgccatcatttgtgagtgggaactatgttgtattattcgatcctcagggaatttatcttcctaacgtgtctgcatccaatcctggcaaacgaattgattttgttaattcttcagccatctcagtgtacagagaccaattttttccatattgtgcttttggatgtgacatgacaagtccttttccgggaactttattccgtttcccactaagaaatgcagatcaggctgtcggaagtaagctatcaaggcaggcatatctggaggatgacatttcttccatgtttcttcagctttacgaggaaggagtatttgcattactttttctaaagagtgtattatctgttgaaatgtatgtatgggatgccaatgaacctcatcctagaaagctttactcatgttgtgttactccagcgaatcatgatattgtttggcatcgacaaacagtattgaggttgtcaaagtcaatcaattctacagatactgaaatggactgctattcattgaactttgtgagggaagcagcaactgggaaccttactgagaagaaggtggattctttttatattgtacaaaccatggcatcagcaaccagtaggattggctcttttgctgccactgcttctaaagaatatgatattcacttgctgccatgggcatcagttgcagcatgcacgtctgatagttcatcgcaggtaatttacgattcttaacaatttattgaattttctatatttggatattatttctatagttgtgcatgatggaacaagcttcatgtaatgcatcacattgcaactgtagtataaataattggctactattgtttctctaaattctaatgcgtgttcgcaattaggtatgtatgctatattgtctaattgtgatgtgactaatatgaatttagattctctttacaatgcgcattaggatctcattgaattgatgtcatattgtccttcataattgtcaaatttatttcgcacacatcagacatatttcatttcatgggaaagcacacaaaaaagtcaagagctattttttcaacgtttatttaaattatttattgtagtttcaaaccctatacttctttaatttgatgtttaacaggatgatgacagtctcaggattggtcgagctttctgttttcttcctttgcctgtaagaactggtttgtctgtgcaagttaatggatactttgaggtggcatcaaatcgtcgtggcatctggtatggagaagacatggacagaggtggaaaaattcgttcggtctggaacaggctgcttttagaagatgttgtagctccaagttttagacaactactgcttggtgtacaaggattgctagattccaaacaaatgtactattctttgtggccttctggttcttttgaagagccatggaacatattggttgagaaggtgtacgcaaatatttctgatgctcctgtactgtattcagatattgggggtgggagatgggtttcaccaattgatgcttttctacatgatgaagaattttcaaaaagtaaagaacttggtgatgctctgatgcaactaggaatgcccattgtgcgtttgcccacatctttatttaacatgcttttgaaatgtgccactacgtttcagcagaaggttgtcactcctcatacagtgcgtcattttctcagagaatgcaaatctctgtcgactttgagtaaatcttacaagcttgtgttgctggaatattgtcttgaagacttggttgacatagatgttggtagacatgcttctaacttgcctttgcttccattggcaaatggtgattttggattattctctgaagcgtcaaaaggattttcctattttatatgcaatgaattagaatacgtgttgcttcaaccaatacatgatcgagtcattgaccggaatcttcctcataatttgatgagtagactttcagctattgcaaagtcattgaaagcaaacctttgtattttcaatgtccattacatgcttcactttttcccaaggttcatgcctgctgaatggaaatataagaacaaagtctcttgggatgcacagacttgtgaacatccgacttctgcatgggtagtgctattttggcagtatctcaaaaaccattgtgaagagttatcgttgttcagcgattggcccatcttaccatccatatctgggcatctttatagaacttctaaacaatcaaaaatgattaatgcagaaaagctaatgaagaagatgcgagacatactcattaaaatcggatgcaagatactaagtcctgattatggaattgatcactcggatttatctgattatgtaaatgattgtaatggtgtatgtattttggaatccatttatgatgtcgttacctcaggtggtggtgtaataccaacattttttaacaatttcgatgcagaagagagggacgaacttcgaggttttcttcttgattcaaagtggtattttagcgactctatgaacgtgtctgacataaggaattgcaaaaggctgcctatttttaaagttcacgctgtgggttctacaccccagtttaacttttctgaccttgaaagttcacaaaaatacttgcctccaacagatatacctgagcactttttgggagatgactttattatcagcacttcaagtagtgaagaagagatttttgtaagatattttggcattgagagaatggggaaggcgcatttctacaagaaatatgtgttaaatagaattttagagctggagtctgaagttcgtgacaatgttattctttctatattgcaaaatctaccacaattgtgcatcgaggatgtatctttcagagattatttgagaagcttggaatttgtcccaacccatagtggcactgttaagcgtccagatatgttgtatgatccacgtaatgaagaattatttgcattgttggaagattctgatagtttcccttatggtattttccaagagtctcacattttggacatgctacaaggtttaggccttagaacatcagtttcccatgagacaattattcatagtgcccgacaagtagaacacttaatgcacaaggatcaacaacaggcatattcaagaggcaaggttcttttgtcctacttagaagtgaatgcaataaagtggatacctgatacaatggatggtgaacaaggtaaagtgaataaaatgttttcccgagctgcttatatattcaagccttccaacttaaagtccaaccttgaaaagttttggaatgatctacggttgataagctggtgtcctgtattagttcatgctccatttcaagctttaccatggcctgtagtttcatccatggttgctcctccaaagcttgttaggctacagactgatttgtggcttacttcagcaagtatgcgtatactagatggagaatgctcatcaactgcattatcatattgcttgggatggtcgattccaccaggtggaagtgtaattgctgctcaattacttgagcttggaaaaaataatgagattgttaatgatcaggtattgcggcaggaattagctttggcaatgccaaggatttatgctatactaacaaacttgatcggctcagatgagatggagattgttaaggcagtacttgaaggttgtcgatggatttgggttggtgatggatttgcaaccgctgatgaggttgtcctggatggtcccctgcacttggctccttatattcgtgttataccgattgatttagcagttttcaaggaattattttctgaacttggcattcgacaatccttgaaatccatagattttggtgatattttgtgtagaatgtatgtgaagaaagattcatctcctcttgatgcacatgaacttagggcagccatattaattgtacaacatcttgctgaagttccgttgcatgaacagaaagtgaagatctatttaccagatgtatcatgcagactatttcttgctggtgacttggtttacaatgatgcaccatggttgcttggttcagaggatccggataacctttttaatgttaaatctacagtggccttgactgcacagaaaaccattcagaaatttgtgcatggaaacatatctaatgatgttgcagaaaaacttggcgtgtgctctcttcgcaggatcttattagctgagagtgctgattcaatgaatttgagtttatctggggctgctgaagcttttggtcagcatgaagccctgacaactagacttaaacacattcttgaaatgtatgcagatggccctgggattctgtatgagcttgtgcaaaatgcggaggatgcaggagcttctgaagtaagctttcttttggataaaactcaatatgggacttcttctattctttctcctgaaatggcagattggcaaggccctgcattgtactgtttcaacaattctgtattcactcctcaagacctttatgcaatctcacgtattggccaagaaagtaaactagagaagccttttgcaattggaagatttggtctaggttttaattgtgtctatcattttacagacattcccacgtttgtttctggtgaaaacattgtaatgtttgatcctcatgcttgtcatttgcctggaatatctccatctcaccctggtctacgtattaaatttgcgggaagaaagattttggaacaatttcctgaccaattctctccattcttacactttggctgtgacttgcaacatccatttcccggaaccctctttcgatttcccctcaggagtgctaatgctgctgctagaagccaaataaagaaagaaggatatgcacccgaagatgttgtttcattgtttgcttctttctctcaagttgtttctgatgccttactttttctacaaaatgtgaaaactgtatctgtttttgtcaaggaaggcagcggacatgaaatgcaacttttacatcgtgtgcagaaagattgcattagagagtctcaaatggaatcaaattcaccacatggtatgtttagctttcttgatgggactcaccgcagtggaatagataaagatcaaatcttacaaaagttaaacaaagtcactgataaagatttgccatacagatgtcaaaagattataataaaggaggaagggtcttgtggtaatttatcacactgttgggtaacctctgaatgtctaggtagaggcccaacaaagaataaatctacacactcaaatgacagatcaaatgcttttatcccatgggcgtcagttgctgcatatttacactctgtcaatgttgatagtggacatatgagtaataacgatttgtttcaagttccgacggattccattcaagataggaaagattttcaaggtcgtgctttctgctttctgccgttgccaatgaatactggtcttccagctcatgttaatgcatattttgaattgtcgtcaaatagaagagacatctggtttggtaatgatatggctgggggtggtaaaaagcgctcagactggaatctctacttgcttgaagatgttgtagccccagcttatggtcgtatgctagagaaaattgcattggatattggtccatctgatttgttcttttcatattggcctaaaacaataggattacaaccttgggcatcagttgtacgaaagctctatgtattcattgcagatttaagtttgcgggtattgtacacagaggctagagggggccaatggatttcaaccaaacatgctatatttccagattttatgtttaacaaagcacaagagctcactgaagtactatcagacactggtttaccccttgttaatgttttaaagccaattgttgaaatatttatggaggtgtgcccatcattgcatttcttaacacctcaattattgcgtactttgctgattcgaaagcgacgcgaattcaaggacagaaatgctatgatcttgactcttgaatattgcttgtttgacttaaaggtgccaattcaaactacttgtttgtatggcttgcctttgcttcccctttctgatggttcatttacaatatttgaaaagaatgggtttggtgaaagaatatacattgcacagggagaagagtatggtctcctcaaggtttcaattccaaatcaacttgtggacaatgagatcccagaagaagtttatgggaaactttgcgacatagctcgaagagaggattcaaatatctcatttttatcttaccatttactcgagaaactcctcctgaaattactaccagcagagtggcaacatgcaaaacaggtgacttggattcctggtgctcaaggtcaaccgagtttggaatggttaagacttctatgggactatctcaagtcttcacatgctgatctgtcacttttttctaagtggcccttattgcctgttgggaacaattgtctcttgcaacttgttgaaaattcacatgtgattagagatgatgcatggagtgagaacatggcttctttattgctgaagataggatgccttttcttaaggtctgacctcccaatagaccatccacaattggaaaattttgttcagccacctacaatgactggtatattaaatgcagtttttgctattgctggtaaattagagaacattgaggagcttttccgtgatgcatctgaagctgagctccatgaatttcgaagtttcattctccagtccaagtggtttttggaagggcaagtggcaaaactacatgttgacatcatcaaacacctaccgatatttgaatcctataaaagtagaaaactagtaagtttgagcaatcctattaagtggcttaaaccttatggtgttcgagaggatcttttagatgatgactttgttcgcacagactctgacaaagaaaatattattttgagaaagtatttagagatagaagaacctaccaaggtggaattttacaagaatcatgtgctcagttgcatgtcaaaattcttcttgcaaagtgaagtcatttcagttattttgcatgagctgaagcttctagtcgaagaggatatttctgttaaatcttcattttctacggtagcttttgttttggcagctgatgggtcttggcagcagccatccaggtacaacttatgcagtttctatgattcccaaattccaatactgtagaaggttttggttttttataattttttatgaactattgtttttatagtttggcgcttgatgtccccaaaagggacatccgatattttggcgcatgatcatttttttcccttgcatactttaagtcataactggcgattttcgattgccctccctatttattttaatgaatccttcatgaacaagtcaacctgatcttttgtattctctttaagttgaaattaaatgggtatttgatacgtcgactcttgtaatacttttctcttttcaggctatatgatccacgaatacctgagctgcaaacggtactacacaataaagtctatttcccctctgaaatattttcggacaacgtaactttggacactttagttatctttggacttagaagaactcttggctttactggcttacttgactgtgccagatcagtttctctgttccaggattctagacaatctgaaacatcaaattatgggaggaatttacttgtttgtatggatgccctgtcactcaagctgtcgaatcagaaagaaggaaattttaatgaatcacatgataccaacttaaataataattttactgctgaagttgatgatattgcacttgttacatctcccaagagagagaagaacaatctgatagataatctaaacattgacttgttaattggcgacactgatgataaaccagaagaagaattttggtctgaaatgagagaaattgcttggtgtcccgtttgtgctgatccacctatagaagggctcccatggctaaaatctacttgtcaagtagcaccaccaaccctagtgagacctaagtcacagatgtggatggtgtcctattcaatgcatatattagatggtgaatgccaatcatcgtacctacaacttaggcttggctggacggatcagatcaacatagatgttttatttactcagttgatcgagctctctacattctatggccaactcaagctaacctcaattccacgagctgttgttgatgctgaattacaaaagggaattccatctttatatatgaagatgcaggaatatgttggtaccattgagttcaatgagcgtaaatatgctctagaaggtgtttgttgggtttggattggggatgattttgtaagctcagatgcacttgcgtttgattctcctgtgaaattctctccatatttgtatgttgttccatccgaactatcagattttagaaatctactcttggaattgggtgttgggcttagttttgatgttccagactatctgcgtgtgttgcaacggttacaaagtgatgtgaaaggatttccactgtcagcagatcagttaagttttgtccattgcatccttgatgctgtagcagattgttgtttagatcagaaattgtctgagatttctagcactccactcctaattcctgatttttctggagttttaatgaatatgtcaaatctggtgtataatgatgctccatggatggaaaacaatactccaattggaaagcgttttgttcatccaagtgttagtaatgatttggcaagtaggttgggggtacaatcgctccgatgtgtctctttagtagatgaagaaatgactaaagaccttccttgcatggactatgctagaatcaatgagctgttggctttgtatggggacaatgatcttttattttttgatctgcttgagttggcagatagttgcaaagccaagaagctacacctaatctttgacaagagggaacatcctcgccagtctttactgcaacacaatttaggtaactcaaactttgcataaaatgtggtgtcattcttttgttattagtttattatgaatttttagtgaaacagaatgcaatgaaaaaaactttcttgctatttctctaggttcttttatttgggcaatataagcattcttatattcttgaattactgacacttcttccctacattgtctgttctacaggtgattttcaagggcctgctttagtagctgttttggaaggcactgttttgagcagagaggaagttagtagtctccaatttctacctccctggagattacgagggaatactcttaactatggtttgggtttacttagctcctattttgtctgtgatcttctgtcaatggtttccggtggctatttttacatatttgatcctcgtggttcagcattttctgttcctccatctcgttctccggctgccaaagtgttttccttgacaggtacttttgttatacctcgttttattgcattatactgtacatttttcatccttttcaatttggaactcgtgtaaaatagttaaaagatccaattaatgttatgataattattcttttgcctcacttccttgtgtcacctccaatactatataagtatgtgcgttaagaaatccatgattaacttttacattcagttgccctcctttaactaaaaggcttggctgctgcattttcaggtacaaacttggttgagcggtttcatgatcaattcagtcctatgcttcttgatcaaaatacactatggtcatcatcagattcaacgattatccgcatgcccctttcatcagactgtcttaaagatggacttgagcttggactaagaagaataaaacagataaatgacagatttttggagcaagggtctagaacacttttattcttgaagtcagttatgcaggtattgtaagtgttgaatgtttcttgccatgctgctaggtctcaacaaattctgcaactctacaaatatggtcctgaaagctcaaaatactttcttgacaactcaaatttttttattaagttaaaagcgaacataattgatgatggttcactataatgtgatcgtgtggtggactcttttagctggaaaagctctctatttggtgttgtttagaatttttctgtcctcccagttttgtttcttgtaaagaagtgaacagtcattcattgcctccttgatagttttataagtaggtttgatgatggctaacatttgtagtttaaaatattatcaggtttcactcttgacatgggaggaagaaggtcacatgccatgtgaagaattttcaatttgcattgatccttcatctgctatcatgagaaatcctttttctgaaaaaaagtggaggaagttccaaatttctaggctatttagtagctcaaatgccgcaataaaattgaatgtactagatgtgaccactaaacaaggagacaccagttttattgatcaatggcttgttgtgctcaccctaggttctgggcaaacaagaaacatggctcttgataggtacgttgggaaactttaccttccactatgtggatatgaaaaatggtctcatatgcgtgatgctttatctcattcagtttgggaatttttcatggaatttacactcattgatttaaggggattataggtaagagtagttgcttagctaagcaataacaataccaggtgaagcaagattcaatattctgacaatgaatgtagtttatattaataaatcatctttgaataatggatcatttatgccacaagtgctctacatgcctttgtaagattagtggttttctaatttttgccatgcctagtcaacaaacataggacgaatttgcttacatgattaatcatggtgatgagtttcgtaatttccttatgaatacattacttctgttccagctcccatttagtatttatttgtgtatgccatctttctattggttatagttctggctgttgcacttccccacaatatttgctagttaatctgcgtattctcttggttttgtttgctcacaattgttttaatacatccaggcggtatctggcatacaacttggcacctattggtggagttgcagctcatatatctcggaatggcaatcctgttgatttttgtgtgatgagttctctgatgtctcctctttctctatctggtggcataaagttacctgtcactatactaggatgtttcttggtttgtcataatggcggtcgtcatctcttcaaataccaggatcgggaagcctccgctgaagcatggactgatgctggtaatcagttaattgaagcttggaacacagagcttatgtcttgtgtccgtgattcatatgttgagttaatattagagatcctgaggttaagacgagatcattccagttctgcaattgagtcaacaggacgaacattcagtctattgttgaaagcttatggggatcagatttataacttttggccaaggagttacagccatgatttgattagtcaacctgctgatggtaataatttaattccaccacaaattcttaaagcagattgggattgtataattgagcaggtaataaagcctttctatgctcgtgctgttgaccttcccctatggcaactatactcgggaaatttagtcaaggctgaagaaggtatgtttctttcacaacctggtaatggggtaggcggtaatcttcttccagcaactgtttgtggctttgtaaaggagcattacccggtattttcagtaccatgggagttggtgacagaaatccaagcagtggggactcctatacgagaagtgaaacctaaaatggtccgagatcttctaagagtttctaaaacatctattgttctacgatcagttgatacatatctagatgttcttgagtactgtttgtctgacattcaaattggggaagcatccatttcaaatggaaattcttcattttacagagcggatcatgttgttgggagtacttctgcttctgttacaggcaccaataatcctaatcatccgtccacccataatgcaaacagtccaggagatgccattgaaatggtgacaagtttggggaaggctttatttgattttggccggggagttgtggaggatattggtaggaccggagggccctcgactcacaggagaactgatgttgtcaatggttacaacagatacgaatatggggatcagaaccttatcttaattgcaaatgaactcaaaggtgtaccgtgtccaactgcaacaaacaatttaacaaagttggggattgctgaactatgggtagggaatcaagaacaacaaatactgatgaaacctttaggtgcaaggtttatgcaccctaaagtactggacagatcaaccttggcggacattttttcaaatggctcgatgcaaacattattgaagctgcagaacttctctcttcagttacttgctagtcatatgaaactggtctttcatgaaaagtgggtgagtcatgtgatggccccaaatattgctccttggttttcatgggagaatacatcaagttcaggaggtgaagagggtccttcatctgaatggataaggctcttttggaaaaattttacaggctctttggatgacctccaacttttttcagactggcccataattcctgctttccttggtagaccaatcctctgccgtgttagggagcgtaatttggtatttgttccacctgcccttaccaattttggccctgtagaaggtgccttggagacaaatgctacagaaaatagtgttgcttctgacactgaatcagttcaatcttatatttctgcttttgaagtggccaaaaacagatacccttggctgttaccattgctgaatcaatgcaacatcccaatttttgatgtagcattcctggactgtgctgctccctgcaattgtttaccaacttccagtcaatcattgggtcaagttattgcttcaaagctggttgcagccaaagatgctggttattttactgaattatcttcgtttgcatcttcaagtagagatgaacttcttgcactttttgccaatgattactggtctaatggttctaattacagaagggaggaacttgaggttttgcgttctctatctatatataaaacagttgtggggtcatacacaagtttgcaaggaaatgatcactgtattgtctcttcaaattcttttctcaaaccatatgatgagcaatgcctttcttattccagagactcaattgaattttcactacttcaagcacttggagtttctgaattgcatgatcaacagattttacttcgatttgggttgcctgggttcgaaaacaaacctgagtctgaacgggaagacatactaatatatctgtttacaaattggcatgagattcaacaagattcttctttagttgaagctttaaaagaaactaaatttgtaagaagtgctgatgaattttgcatggatctatctaagcctaaagaattgtttgatcttggtgattctttattaacatctgttttctctggtgagagaaaaagatttcccggagaaagatttagcacagatggttggctccatattttaagaaaggttgggctccgaactactgcagatgcagatgttatactggaatgtgcgaaaagaatggagttccttggaagtgaatgcatgaaatctgatgatttagatgattttgacaactcatctggctcacaggctgaagtttcagtggaaatatggacattagccggttcagtcattgaaacaattttatcaaattttgctgttctatatggcaataatttctgtaatcatcttggcaagattgcgtgtgtacctgctgaatttggctttccagatgtcggtggcaggaagggtggcaagagagtgctcacttcatatagtgaagctattttgtcaaaggattggcccctggcttggagttgtgctcctattctttcgaagaaaactttggtacctcctcagtactcttggggctcactccagctgagaagccctccagctttttcaacagttttaaagcacttgcaggtaactgttgggcctattttgcaatcataaaagaatatgaaggttaatgcatgaaatgaaattaacttgcatagttgtgttataggttatcggaaagaatggtggggaagacacacttgctcactggccaactgcatcaggcatgatgaccattgatgaagcttcttgtgaagttctgaagtatctggatcagatttggggttctctctcttcttctggtaggtgttaatctctcttctttttttacctcttaattacacatgttgtaagaatgcaactttatcactcaattcatgtctaatggtatgcagatataaaagaattggagaaagtgccttttatacctgctgcaaatgggacacgcttggtgatagcaaatctactatttgcacgtctgtcaattaacttgtctccttttgcttttgaacttcctaccccttatcttcctttcgtaaaggttctcaaagatttgggactacaagatacattatcagttgcatctgccaaggatcttcttttgaatcttcagaatgcttgtggttatcagaggttaaacccaaatgagcttcgtgcggtgtttgaaattttatattttatctgtgatggggctgatgggtcccattggacgtcagaagcaatagttccagatgatggctgcagactcgttcatgcgaaatcttgtgtatatattgactcctatggctcccgatttgtcaaaagcattgaaacttcaaggatcagatttattcaccccgatcttccagagagattatgtttagttctggggattaaaaagttgtctgatgtagtaacagaggtaattttatataatgaaacttctttgtttttgtttatgattatacactatctttatgaatatgtacatatttttggaattatctcacaagggagaattttttgagtctttgattaaatattgattatggttgcaggaattagttcatgaggagcatttacaaacacttgaatgtattggctcagttacgctcttagccatcagagaaaaactattaaacagatcatttcagggtgctctttggactgttgtaaacagcatggcgagctacattcctgcactaaataatgtagttttggagaccatacaaaattctttagaatctgttgctggaaaattgcagtttgttaagtgccttcatactcgtttcttgcttcttccgaattctatagaaattactcgtgcagccaatgcttctattatcccggagtgtactgctggatcccatgatcaaagactttattttgttgaccgatctaaatctcgtattgttgttgctgaacctccagcattcctttcagtttttgatgtgattgcaattgttgttagccaggttttaggttcccctaccccattacccattggacctttatttgtctgtcctggaggctctgaaacggcaattgttgatattttgaaacttcgttctgacaaaaatgaaatggaagcttcaggtggaagaaatagtttgatagggaaagatttactgccccaagatactcttcaagtgcaatttcacccattaagaccattttatgctggagaaatagtggcatggcgatctcaaaatggagaaaaactcaagtatggtagggtccctgaggatgttagaccatcagcaggacaagcactatacagattcaaggtggaaacctcacctggcgaaacacagccacttctctcttcacaagttatgtcattcagaagcacatcaatgggaagtgagaccacagtaatgttgccagatgagagtcatagagctcatggcgtaggtcatagcgaagttccagaaagctctggaagagtccaagcaagatcttcccaggtttgggcttctctactctcctcacatggctgtcttttcagatgttcaatctctctctctttttcaccttttcctttttcctttcatttttgggatgtgttttcattcattgtttcatcgtttacattttatcttaaaaagtccggataatatgatacttttttatattgattcatatggtcaaacacatcaaactgaaagccttctcttttagcagcgccaactcgggaatgagctccagtacggtcgagtgtcagcagccgaactggtgcaagcagtagatgagatgctttctgcagttgggatccatatggatgcagagaagcaatcacttctgcaaaaaacaataacacttcaagaacaactaaaagattcagagacagcacttttgcttgagcaggttagtgttgttacttgttagtgagctctgtgctatcagtcactcattaatgctcatctttttaatcatggaaaatagtattatagtttgacattttcatttattacatcatttgttgttttttttcaactttggttcattcaagtgaaaagtgttgttgtttgtttgtttgattttgaacaattttgcaggaaaaggctgatgtagcagcaaaggaagcggatacagcaaaggcagcgtgggtatgtcgagtgtgcttgacggcggaagttgatatgacaatggtgccttgtgggcatgtcctttgtaggagatgctcttcagctgtttctaggtgtccattctgtcggctacaggtctcaagaactatgaggatttataggccatgaaaaagtccaattcaaactacttgctctttcacttttgattcaaagtggcaacaaaggtttgttctgcatatgatatatatatatatatatatatatataatgatttaatcatatgcatgcatatatatgtcatcattcgaagccaaattgattgcccctcacagaaactttagtcttgattgaattgtacattaactgaattttcattagttgtgtacatatatattatatataaccgttgaaagtagatagtgtgtatattgctttctatataaagtaattccttgtttgcttttccttctcttcactattcgtgtttttattttctttcttttaatagaagattcttcttaagatggtttcctgaagtaaaacatttttattttactattatttttttcgaacaaaagaattttttatttacaattctcacattgattatcttttttttatccataaaaataaatgctggtatcctttaaaaataaaatagcatagcagtcactcaaacaacactagacttttctccaagtttaagtacttttacaaatgcaaataagagagagctttatagctctctgtttattaatgatcgtaagagtttacttgctcaagttagaaatgtttcttttacttttgttaaacggtcagttaatgcaattgctcatgaatttgctagagcatctatgttacatcctgatcgtatattcagtatggagaatgtcccaactgatttgcttccttgtatggttgctgaatttgaaggataaataaaatttgaatttcctttttttttaaaaaaaaagagagagagagagctttataaagtaaaagctaatggtccaaaccaaaatttaaagtagagttaagctatgctcatcacacccatttttattgttacactattaagatgtactactaaattgcattattcctcattttcattgtgctttctttttcttgtacattcactttcattcttcttcaaatactccctcatgttgtcagtgagtcctccaagtccaatcgagttgaagaagttgatggcaaagcgtgtatctttttcattatcctttggaaatatagattcaaatgaatcatacattctgggattcgaaagtcgttcattcagtattcgaatgccaagttgctccgataattcctgcaaagaaatatttatcagcaaaaattatggtgaaataattttaataattgccaaaatttgctataaaattatatactatatgttaccctaaaatgattatgatactaatttcaaacacacctttgattgactagaacaatattttgcaaattattgtgtttattcaccgattactctaaaaatttgaatttgaatgagaggaaaggaataatggattgaatataataataataataataataatacctgaaaaagaaatttgataaagattcgagatgaaggagtggtattgtgttgtgttaaactaatgcaagccaatacatgccaagacaaagcatttgtgcttagtaaatgggcaaaaaacttagccaaatttcgtatcttatttgtttcgaacttgtgattgtgaatcaattcataattgtttacaaagcatttctcaaaattgtggtgatgtgagtggttattggcgcataatcgttgtcccagaagaccataataatttctgtaagttgtttcttggctgcaacatttcaaaatcatagtacaaatttccatctgcaatgcaacaaatcatcatatcatatcaataaaatatttgtaattttatgaataacaagaccaaataatttaattacattatttatacttacctgttgagaacggtgaattttcatattgaggagcttatggccggtttcttcaaagtcaacactagacataatggtcaaatatattctctttcgaatttcactattattattattattggaatgttcacccattattataattatggagtttctaaatttaattattgttcaactaataataacatgttctttttttgaacacgatttgcttttgtagttttgttcactgtagtctcctctttatatagggtccattctcctaattaatttagatatgttcacaatttagatattttttaaaaaagataaattattattttttatattacgactcaagcttttttttcttttttattgacaatattaacacaacttaagcttcactcatcataaaaggtaattttctataaaaaagaaaaaaaataaattaaaataaaaaaataatagttacacgtaatttcaaataataattcaaatgcatcctcatataaaaaattaaaatgtaattaattacaaaaaataatatcatacggacaattctactttgatattttaaaaaataaactcaaaataatttttaaaaattattcataatatctttttaagattttttttctcacattattttgtataaatttcaagacttacattaattttattcttctatttttttaatcatgtgtagctttttatttatttttttttaataaaatttatataatttttttattataatatttaaaatataatttatttatgtttaatatattattttttaagaatatgaattaaaagattaaaattaaaaaaaaaaactaatataattaaatatatattttaaatgatataaaaattattgaaatgggtgcgattctaagtttttgggtgcaaagtgtaaataaaattttccaatttttataatataataataaaaaaattacctcatatattattatttaatatatcttttaaaatttacaataattttaatgtgtgttgttatgtgtatcttaattgcgatttaaattattaggttagttgctatgtagtttgccatatattttttttgtaaaaataaaaaaaaaaaattaactcctttaaaatataaaaattaaaaaactctaataaaaaacctttatcataattaaatttgaatttaaaaattcatactttttgtttttttttttcgtccatttgtttttcctactttattgaatttttggtaaatactattttagaccttgtgttttacaaaagttacagattagattctctattttattaaatgacaaaatggaccctgtatttttttaaatggtaaaaataagacactgagcttaatttttgacaacttcttattttaatataaccaacttgaagacaattcctaataagaacaaatacaaaaaatgtaaacaattttgtcataacacattcagatcggattattattaaattttattttgacaaaaaatcaatttatggtcctatttgtactattttagaaagtacatggttcattttatcatttaacaaaactataaaatccataacttttacaaaacacggatccaaaataatatttacctttaaattttttaatcaacttttccactttatattattaaaataaattttctttttttttttcaaataaaaatatttttaatttccaggatctaatttctgtgtttttctttctttttcttcttcttcttcttcttccacgcttttctgtccctccctattcttccagctttgtcgaccatcatcaacgccgcctcccagcttcatctctgcatcaaaaagttagggttttgtggtaagttcaatttcttttgagtttccttcattaaaattagtggccattttacattaatctctgactttaggggttctatatgacccattttttagtacaaagatttatagtattttaattttaagggttttttgtttattttctactgtttacataattgaattgagtttatgaagttagaagaggtgttaaaattgataccctgtttatatataagtgaaataagataatttccctagataaataatattcaaattcaaaagaactgaaggtagcttagctgattaaggctcttttctttatgccattgatcttacttaactat

SEQ ID NO: 16799 - DNA, 4687 bp, Cannabis sativa
gagtagaaagaataataacattatttattccatagaagtgttaaataagcaattatttggtgttataccactaatccaatacattattacaagtattatcatattacaattgaatctaaaatactcaaaataatattaacaagtattatgcatagtgattgagtggatccctagtaagttaacaagaaaatttcaattcctccatttattgggtgcctatcaaggaggatttttttgttgagtatgatcccgaaaacatgggaaaaagatcgaaaaagaaaaacccgaaaaagccttttgaggttgaatgaagggaaatttggtaaacaaaaaattggattattctaatctgtttttgaaagattagaattgcctactgctaagctcagatatgcatgttgataaggcttgtcttacttggagattgttcgagttcatatcgagggcatcttcgtatagcctctttgcttgctgaagtagcttcatcttttctttactactacttggccgcaaccgggatctttgttgtagtaccattccccatttaaataaagctgcaaattaatgatcagagttaggattaaactaactaatttaatgcttaaaagtaagtttggttattgacgatgcaaatgatttttcgggttcaagagctagtgagataccgtctggtgcaaaatcgttaggattaaactaattcaatgcttaaaagtaagtttggttattgacaacgcagatgacttttcgggtttaagagctagtgagataccatctggtgcaaaatcgttaggattaaactaattcaatgcttaaaagtaagtttggttattgacaatgcagatgcgttttcgggttataagagcttgtgagataccatctggtgcaaaatcgttaggattaaactaactaattcaatgcttaaaagtaagtttggttattgacaatgcagatgacttttcgggtttaagagctagtgagataccatctggtgcaaaatcattaggatttaaactaattcaatgcttaaaagtaagttttgttattgacaatgcagatgatttttcgggtttaagagctagtgacataccatctggtgcaaaatcgttccctttggacatcattgcatcaaatttatcgattgcagctaagaacactttgtcagcatcgaaagaagcctcctgcaaaaccgaaaaaccacattgttttaagtcttaactactaaatcgattgatgataatgatgattaagtagaaatgaatgaatgcttactggcccaatatctgcgatcaattgagctcgaaaagtaagggcaagaccccaattatacagagctcttacatcattcccatcaatggataaagccagcctatattttcttccagcttcaacaaggagcttttcacattcttcacagacatcaacaagggcatatgcaatttcatctttactttcagtttgatcgcgtattctaccccattttccaacagatgatggattacttctcgaaagtagagttctcaactcgcggctaatccttaattttagctctccatgaagaaggtaagtgtttcccaacaagccaacagctaacaagctcattggcttcatagctatagctttcgaaagaatattggcagatttatacaacacaatgtctgcaagttccttctcgtgactatctctcatgaactccttagcttgtcgaagaaggtcattagcttcactaagataccgatcaaacaaaacatcatcagaaaccattgaagatgtcgaggaaggaatctcattctcttctccagattcgttgacattcatgctctcttctcttaatggagatacatcggtattatactcgctcttgtctttactacgagaagagctgtaaacatcatccgatctctcaagcttttgctttcgggcaaaggaagcttcagtttttgtacgttgctgcattctaacactgaaacttacagattcaagaagattatcatcagattctctttcccatgtttcggttttattatgatcatgatccatcttcaatgaaattcgacgattattcactaactgcactcgcttattatactcattactgtaattaaaactcatttttctatttcggtttccttcatctccattctcatcaaaaccgatctcatttaatgaaccgtgagaccgagcaaaatttcctctcgacttatcatcatcaaccgagtgtaaaaccttttctttatcagaactaactaaactatcaacacgagtttcatcatcatcatcatcatcatcatgatccacggcagcttcaactgttcctcctcgcttaacattaccattacctttcactttcgatggtttcgaatcaaccaatttttgtctaaacaaaacccgaagagattgaaaaaactcattcccaatttcaccaagttctttacttttcttatttgatttctgattctcaaccaacacatcatttgagctctcaatcacattcctaacatttgaagaagataaactaatggaatccaaaaccctagtataatcttccaaatctgaaattctaatttctctacaatcaatagctttctctaactttttcttgagattattaactttaacatcaaattcatcaacaatttccatcaaaatcctaactttatcaatataaaccctaaaagtttcatctttaaccttcctattattattctcattatagctcatcaattcaccaattcctccaccacgaacaaccccaagtgaaaacccaacagcaaaaaccaatacagaagcaggaaatactataattgaagaaaccctaaccctagaaattaccaaagcacacaataaccctaatgcaaatacgaaaacatgttttctatcgtaaattccaacagaaacaagaaatttacgaaattgatccgagtcagtagtctcaccagaagaacaatcgagtccacccagattatcccagcctccgtaactcgctgacccagaaacggaattcgctgcgacgatggagaatctgaggaatctcggtctgtgaggccatttccggtgagaaaggctccgactttcccgagaaagtgagggaaaattgaagagaaaatttgaagttgggaagttaggagtggagagattgattggggaatgggataacaaggtctccattggaggaagagattgtacggacgaagcttttacagttgattcgaagatgaagctgaaagctttgttcgttgttgttgttcttcagaaatttggtgtagaagaagggtaattttgtcaatatgagaaatatataggggtatttccgtcatttagtccttttcttttttactagtcaagtaattaattttggcctaatttttagtcataagtaataaatgaggttatcattattcttcataaatgttaaaaagtactaatagtgtctagtatcctcttcgggattatttttttttgacgcggtgatcaaaatcacacatgattaacaaagcagtaatccacaatcggcggcggtacctccttgaagcaggatagctcatcgtctaaccgaagagcatgttttgccaaatcatgtgctgcagaatttacattccgagccacatgagacaaaactgccctcggaagtttagacaataaagctatgacatcctcaagtagcacacccaactcattaaagaagactcttcctttgttaacagctgtgactaaaaatcagaaaaaaaaaaacctctttaatatggattctacatgaaagaactcaattaaatcctactaaaagagccaagatctccacttgtattacaaaaaaactatttgaaaacataaaaaaccagaaaaaactacaatgataagctataagtagaaactataaacaaaaactacaacgagaaacgcaacccaaataaacgataaaactaacaatgcaaagaaaagataaagaaaaaactagtcaaagggataaccctttggctagtgaaaaaaaccctaaaacacaatacaaatattttactgaaagctttgtttcattattgttcttcgaaaattcgaagtagaaagaaaagaaatttcatcaatatgagaaatatctaggagtatttacatcatttggtccttttctttttactagtcaagtaattaattttggcctaattttctggtcataagcaataaaagaggtttccatacttgtatcacttaggtatctcctatttatcaaaaaagagatacgttattcgttcataaatgctaaaagacactaatggtactcaatattctcttaaaaattgtatgaacgaagcttttacaataatttgaagctgaagctaaaagctttgttcattgttgttctttagaaatttggagtagaagaaggataattttttcaatatgagaaatatataagaatatttaccttatttggtatttttcttttttaacagtcaagtaattaattttggcccaattttttgtcataagcaataaaagaggtctctttacttgtataacttaaatatctcctatttatcgaaaaagatataccattagtgtctagcattttcttcggaattatacaaacgaagcttttacagtgatttgaagctgaagctgaaagctttgttttgttgttgttcttcaaaaatttagagtagaagaagggtaattttgtcaatatgataaatatata

SEQ ID NO: 16800 - DNA, 5444 bp, Cannabis sativa
aaatgcactcttcgagtcagtgccaaactccaattgaaccaaagttctatttactcaattcatatcccataatagctatacaattacatatttatagtgattcacacgcttagcaaattactaataaacccctacactatttcatagtgtaacagaattgagttagaattttgtcaatttgttaagtgtgtagttggttttgttagttagttgccgagtgagctgatttagcaatcagtagttacggagtgagctgatttagtaatccgtaagttactgaacaatttcttgagctaaataagctctacaaatactctcccctttgtaatagctgaatccaatcactaacatacatttttcgtactttttcattctctacaattaaaatcaaagccctgaattatcatctatatttttctcatcaagatattttattcctctaaaatgtggacaataacattaacactcatttgaaacatgacaagtaaattggttttcccattatacaaaaatttaaccctttatttttttatggcatatttttcttatgtatttggcataaagaattttaacaatgtttacatttttgtggttttatttatgccatatattttattttctcatattttagttttttttttttttttttttttttatgtaagttttcagctcagggctcttgattcccctctcatatttcttgtacgtctctcttcaagttgtcgtgaaattctgtaggcgctgttgatttgggttcgtcgaaaccatactctgaggactactagcaaaagggaagatgtatataggatctcatttctcttctcaatacggatctggaaggccctcacaagctcttcatggttcagcctcgtatgtgccccaatagcatgttgcattgcaggccaagcttaatgaagctctgtgcctggctaactcactcgaagaacatcaagatggctacttccacactgattttttcacaacaaaataccttcacatattgtcgttcaatacccatctgcctggctaactcaacgattcaaggctcacataaatgaagactttggggctcctcacctaatgaaaactaaagtggaggtgctggttcaacctatagtattagcaatctcagttatggtgggaggaatatcggttttgttgggtctggaaatttaggctttgggaaaaatgtaaatatagcagcaacatcatcatataccacaaatggttgttatgatggcacttatacaaacatatatgatggtggttcaatttatgggaatgccacatggagatcctcacaattagagctagaaggatctgtctcatttggatttggacttggaaatggatcttcagatatcatgaataaaaattctggttatatcgggggttatggtgctaccaatagataatctgtaagaggtaacattatcttctttctcttcttatttctgaattcaaatctgatcttcatgtaaaaacttttattatatatgtcatgttctcatattattagcattagaaacttgattgaagtagaatttcaaactcaggtttatgacatttataatgtcacgagagtaaaactggtttctcctctgtgcatgtactattgcatgttattgcaacttaacattatttattcctacagatcacttcaattgttttgaaacattgtttggtgctacgcaatcagctgcaatttataacataaaaaccaaaaccaaccttatacaagcacataaacacttagaacatttaaggaactagtttttaatttagatattttgggaaacaatttttgatttagttaatttaaggaactaatttttatttatttattttatttaacttgtttttacatgtaagtttttaccttgactgctttacgggatcaatttttttgtctcaaatttttaactagttaataaatataaccaccgatttctttatcttatattttgagttattatgtgttatttatttttatttattttgttatggaaccagttcaatttagatttatgccttagtattttataatcttttttttttatttatttataatcggtttatgagatattatgtgttattcgtttttagtcaatttatcctgaaactagtttagcttttaatttatgtttcagtgttttaagaattgatattctctctttttttttttttttgattataactggtttgagttattcttgttatttgtttgtattcattatgttataaaattagaaccgattctattttaattataactggtttaagttattctgtattatttattttattcattatttaatagaattaattctattttaattatacttggtttgagttattacgtgttacttatttttattcattatgttatgtaaccgattctattttaattttaaaattttttcattaatatacctcaattggaaaataatcacataaatcaccacctcatttaaatcataccaatacgtctattaatacccatatacaaaaattaatatatacccacactcctttacttctcttttacatgtgtatcacattttattttttttttaattgtctagccatcaattattttagtttttttattcttttaaaataggaatttctaatactaccattatatttttttgtccgccccacttttgactttttctcttattttttttagtttttatttttattcttctttctttcatttatttgtgtcatcaactttaagtttttttatcatacttttgacaaaaattatagttgcatcataattatttaggattaagaacagtaccattacaatttaatttttaatgtggtccaaatgtgtggaaaacatataattttcactgttatcagatatttaaaataaaaagtcacactatagtttatcttatattttgttaacaaaataaatatattaaaatttagtaaatgttattaaaataaaaatagtaataagatactggttttattttaataaattttattttgggataatataatgttgtcaatcaaggtacgtttaagttattttattttttagttatataatgttgttgatcaagatacatgtaagttactttttatttttttattttcatagcaacttttacgttatcttggaacatactgaacaacaataaattacaaaaaattactaaatagcttattagcaaaatatgcataaatttttgtaatatacataattttttttatgttacgtatgatatcatttgctttctttataattttttttagaatttattgaaataaacctataaaatacgcttatataaaatacatgccatatgacaacttttagatatgaaataacaaacatttctagtaacttataaaaatagttgacatattgaattttattggttattttttttttagttaataaaatataaaatggacaataaagttacttttaatttcgaatatttattcggtaatagtgaaaaattctctattttcacatatcaaaatgatcatctcgaaagatagatcatactggtactaattttgagctcaaaggactagtggtgtagttagaattattttttaattgtttctttgtaagtttttttagaatacaatttatttaattaccaaaaaaaaaaaaaaagaatacaatttatttattacttttatttattgaataacaaaatatttttattaatccatgaaatgtggttggtatactctattttttttttgtatttttaatgtaactcatagatattatttgatttcgttacaagttattttatgaactactaaaattattatataaaataaaattatttagaatatattttgtaaaatttaatgataaataaaaaaatactttttaataactaataaattttttttttttttttgaaaaccaaacctataaaattgattgatatattaaattttgtgtaagttcaaaaattaattacttaactaaatataaaagaaaataaatgttacttttgattttagtcattcttcggtgatggttgaaaaacatatgcttcccacacttaaaaataatcatttaaagtgtaaatcacaattgtataactcttgataccaaataattactagttaaggcaaaagtatttcttaaagattaaaaaataaagataaatataagtaacttttaatatttaaattatattatatgggtagaaaaagagaaaagaggaagatatctcatgcatggatttttttgtttgaaaagagattttgattcaactctttttaattaatgaaccatataaaaaaacctgtatagaagaaatcagcacttgggagaagaaattagtatacacgtggaccaaataaattcacaaacttttgataataaaataatcatcgttatatttataataaattttaaatctacgttcacaaaggtaattttctctttaatttatatatgcgacatctaattttgataacttttccgacgacaacacaactttgttggctttttcaatgaatttttctataactttgacttttccatttacaataactttttcggtaactttttcagcacacgtgactttacaagcgacttcttcagtaccggtgactttttcagtgatacttattattagaagttttatcaaatttatcaattgttttttttttctatatttcaaattttaattagttttttaatcttatatatttttacattatttatttatatcatataaaaataaacaatattaaatttttctataattatgagaaaatcccatatataatatatcagaatagaacaaagatttttttaagtatataatgtactattgttttgcccattattattatactgaaaattacagttttgtaaaaatctcaatttttttttttgtggagagaaaattatagttatttttttaaaactgagactactattaattatagatttacctcagatttctatacttatttacattaattattgtacaagttatgttatgatgttaaaattttaataatatattttttttttgttttgtattgttaaagttttatttatttatttttttttaaaaaattcatcatctttattaattgcaataaatatagttattacattattaaaatatggagtaacatcactacttttgataacacgatcagcaactaaataggatgctcgagctaagaaacgagcaacactatttgccaaacgtctaataaaattgacataaacctctcgcaagtcatttaacaacatcttacaatcagaaataatactcccaaagtatgaaaccataggagtagagctacgtaacacttgcacaacagtaagactatcagtttcaatgacaaccttcctccaatctttctgtttaacccaactcagtgcctccttaacacccaaagcttctactatttcgggttgcaacacccct

SEQ ID NO: 16801 - DNA, 2548 bp, Cannabis sativa
attggatcggatggcaaaatccaatatcaaataaataattggattggatgtccaaatccattggatgtggtccaatgaatacccctatatacatatgtattttaattattataacataaaatctaactattcatctaaacaaaataaaaattctcattagttgaacttgatttggattgtattagatttttggacactcatttaataactaatccaatccaattgaatattaaaataaacattcagccagatccaattataactagatattcaatattcgacctagatattcaatattcgacgattatttataatttaattggatcggtttatatacatacgcctaaatctaaataactattttacttccaatcaaactcacaaattctaacaccgaaccacctagcacattcaacaataaaattaccattcacgcccatcatcattaatttttaaacttaaaaccaaaaaaagaaatatgactttaagactaattaatttatatatttccaacacttaattaataagattttttttagaggatttgattgcattattttattttattttcagttcttaaattttaaaaatgttaaaatttggatacttgctttaattcgatgttttaaccataaatactttaaaaataagagattggaattaatttgaaggtctcgatgaattaataaagagaagtcacctcataaattaatggtcaccttttttgaaggaacaaaagttcattaactaacaattaaaagtgggaaccacaggggggtttccctccccttgacaaaaaccggcatctaggctagacattctagcacttcttgccaaatcatccactgcagttaaaaactcacgcttaacaaaacagaacttacaagaaactaaagttttaacgatatctaaaattgtaaaagaaatgtgagtaatacgccaatccgggatgcattcattctttgcaaaagctaaaatcaccacttgacaatccgagaacagggcaatgtctttccatttcagcttggaagcccacgataagccataaagaatagcttgggattcagcatcaagggccgaaggagataacacacattgagatgtataataccaggtgcgatcttcatgatttactaaaataacagccagccccgccttgccattgcgccacgaggcatcagtaataactgaataccttgtagaaataaagctgatgcaaggtgcgtcctttttggatgaaaggattctggtacaagacatggttgaatatgcatattctttaaacatagtaataattcgagaggttaaagcaagcccatcaggatttgtgagtttaatccttgaattgttcctttggttccatatttcccatgaaacacatccgaaaatacaacaaggtgacatgaggcttttgattaggaaaattagacactaaattttcagtgaattgagtgatagtgttacccggtatcaaatcaattcggataggaaattctcccaaaagccaaacagctttagcaaacaggcaatctctgaagatgtggatacaagactcttccttttctccacaaaggcagcaggttttgtccgaaagaaaagggagtttgcctttgaaagggaatgcctcattcgaaactctccacaaccaggtagcaatacaaggatgtatactggggtgccaaatccatttccacaacctacacacaggatgaaatcgttctagttgatcaacaatatacgcatttttgacagaaaatttaccattttccttgttcttccaaaaaaatctgatcttcatgagcttgcggaagtctaggaatcgagattatattcttgcccatctcttcaccaaaaatctgcagaacgatttgatgattccactcactaccttcaaacacatctgccactgttcttgctgtataccccttccctttaatgctccctataagttctttaaattcattatagtttaatcagggaatccaaggaaggtgccaaaaatccacagagcacccagtccccaagagcgtagtaactcctttcaaaatcgtacttcttgcctggacaatacttttccaaatagccgaatcgcaatcctttgattgaactgcccaaaagttctgagacctacaatacttcttggtgagacactcaacccaaagtttgttttccttagttgcaataccccatgccagcttggacaaaagaacattgtttatgtcttcaaatattctcaaaccaagccccccgctctccttcggttgacaaatgtgatcccaagacttgagcgccataaaccgatcccaagacttgataaattgatggtcacctaattaaaacaaacatagtgtcttgttgtcttgtaatagaaaaaaaaattctaagtcgagcgaagcgacaagaataaagcaacaaagtccatctagcctttggaaaatacggaatcaaacaagagtaaatattattttggactttgtgttttgcaaaaattattgattagactctctgttttgttaaatgacaaaatagactttgtattttctaaaat

SEQ ID NO: 16802 - DNA, 4230 bp, Cannabis sativa
atatttttttttaatatttattgggattgaaattaatgttttcatgagtgaaatttcattataatttattttaatttttggtaatttaatattcgtaatgattaattacttcaggtttaacggtggagatatgttgaagagatacagaggaaaaaagataatgtttgttggggactcacttagtaacaatatgtggcaatcactcacatgcatgttatacacttcagtcccaaaatctatatacaacttaactcagtctggttggcttcacacattttcatttccggtacactatttttatttatttcatcttttatatttcctagtgtaatatattttacatgatttaacattgtcacagaatcgaaaatgactcgaatattaatgtacaaaaattatcaaaaacaaaactatatgcaaagaaagtcatttaatcaaacacccctaattttagttatagttatgttagatatactcaaggaacactatatacataaaattattacttcataaccctgatttgttttgttttgttgttttctgtaatgtaggaatatgatgtgacaattatgtttcagcaaaatgggtttttggtagatatggttgaagaaaaaataggaagagtgctaaagctggattccatcagtgatggcaatggatgggagaaagtagacatgttgatcttcaacacttatcattggtggactcatactggtagctttaaaacgtacgttttatactcaaaaacttaaaggcttaaagttttggtgacaacattaatctaattaaatcgaactgatccaatttaatcttatttataatttaattgaatgtcaattttaaaatttaattaaaaacgatgcaattcactcatttatatatatattaaaaataattatttatatttatttatatataataaaaatattaaaatatatatatttttagtgactttttttttagtgaaattgtaacacttgttgttttatgtaatatttgtttttataatgttttgttttattttattactttggtttagttttctcaattttttagttgcattaaacttgtaaagatgatatttttatggagtattaaactaatgatatttaatatttaaatattttttttcataagttaatattaaaaattagttgtataattagatatccaattaaaaaacgatccaatcataattaaattggatcggatgatatttttcaaatctaattactaattgaatcaaatcgaattataagaaaaagattagattagatcggatgtctaactctacttctatgaaacaacacaaagaagtactatatctatctcatgtgagttcatcatatgatccgtattgatgataatttactcatagctaccctcaagaaaaatcagttcttaatgttagacattgtatattttttgttagtttgaaattaataattgaacagtctaatttatttagttattgtggttttgcagatgggattattttcaagtgggagataagatagtgaaagaaatggatcgtttagtggctttcaaaatagcattaacaacatgggctaaatggatagattctaatattgatacttcaaggactagggtgttttatcaaggagtttcagctgttcacctcaagtaaacccttcatttaatttcctttattcaatcaatactagcttgctaatctctgtttgatgaaatctttgatttcagtggcaatgaatggggtgatcctaaggcaaggaattgcaaaggacaaactgaaccaattgaggggtccaagtacccaggccctacccatccaggtgaagtcattgtaaagagtgtaacaagctcccttggaaagaaggtctatttgctggacattacattgcttacacagctgagaaaagatggtcatccttcaatctatgctaccacaaacaagacatttgtggactgtagtcactggtgcctacctggtgttcctgatgcttggaatgaaattttgtgtgcagttttgctcagtagttagaattttctttaggaatactgagcagactggactataaatcaattgtggcacaacacaattcagctcataattaattatgcagtgaattagtttgtcgtttgttcaaatgccaataattaaaaacttaaaattggtcttggtcttggttggattgagaattagagaacataacacctgcaaggcaagaaccgaagaacaattcttcacttgttttcttctagatcaagaaaagtcaatgataaaaaagtaggagcaagataaaaatttaaaactctaagtagcttctagacgatgacatgaaaggattaacaatatccaaaaccaccccagattatttctacttttggttctttattggtctaaacttgaaaaagtgtagcatctaaagcatcgacttttcataccccagtagtaatttcacaaacataaatgtttgttcctgagtaaataaactcaatgctgctgtaatattaactgcatatcaaaatacaaatacaggtaagtagctgacacctataaaataagcatcttctcgaataggctgaacaacggaagaaaagaaaatagaatgataagataaacatctacaaacaggacatttataagcaaaaggcctccgcgtggtaagctgaagcatgaaactcacgattacagtaaccaaaaacacaaaggtgttgcgactcaagactaaagtattgctcattggatcttgttctagacttgttgcttcaaaattatctttgcttctgtattcttttgtcctttatgggcaactcaacaggctgctgggcctcgtgtggatgatctgggcccttgtaaaccttcaggtggttgaagagtgctctgccaagctgcacaaaccattatccagttaagaattaaataggtgcaactatttgacaattccttttgttatgattaatacatgcactatatttcctagcataatgggagaaaggcaagactatgcgttcacaaaattgattatctttatgcttaactcgttttttcaacgagaagaacatataatgcagcaaagcaagaatatctcatttcatgcggcaggaaggtatttaaaattgcagaaggttaatagtctgtcactaaaaagtaactgctttaaggcacataaagcatcccgctaaacacaagacaccaaataccaaattgtagtacttctgcgtatattaggaccgtatttccccatctcaaattcaataatctaaagtaaaagaaacaaaataacattacatatcagttagtgtgtgtgtgtgtgtgtgtttcccattatttttgtccatatcatatcagttacagcaaaaaatatagatagacttagattaggaactcaccctccctttgggaagcattccacgaacagcatgctcaataattctttctgggattctctgctgtaactggtcaaaagtctccactgtcataccaccaggtcttcctgaatgccttctgtagagcttttgggttcttttctttccagatacagctactttttccgcattaacctgtagttcaagctcgaaatgattatttcatcctctttgacaatacactatctattgataaatgtgaatccatatgtatacataacccacttattataggagatgagaaggggaaaataaatgtttcacactttatacttttgttcaagagaaatcagtagctcattctagttgcaaaaaaaaggcatgaagtataagcaaacgctaatgaccatgattacacctacagctatttaatggaaaagatagagaaatgtctactgtaaacataatagttcatctaaaaagtattctaaaattcattagacgtaatcctaagcattatgcaagcaccacaagtatgtgttgtttatttcataaactccaaagagataattgtgacacagcttacactcattccctgtaattttgatggaaattctaatgcatacataactaagtaaattacataccacaataacaaatgcccccatgtccacactaggagtatacgtagccaaggttttcccacggatgtgattcgcaattgtagatgctagtcttccaagaattttgtctgttgcatcaacaatgtaccatggtttttcagtgttgatgtgatcaactgctttcggataccaagtcttgttccaaatgtcctacagtgtcaaacatatctaagtgaagcatgttaacaggaaagat

SEQ ID NO: 16803 - DNA, 2640 bp, Cannabis sativa
tgtctactatttaattaattattttaaaaaaatagttaattataattaattaattttaaaagaagaaagtctacctattagtaacctgctattactggtcaaaaaaaattgtaactatataattacaataaaaatgtaaccattgaatagtcaccctaatatctataaatatatatgtatacagtattacttattaataaggaggaataaaatggagaataaaaacaaatggaacagaaacaatcgagactactttttttaccatttgtagacatgtttggtagtcatttaggtgtattgaatctcataatatgccttttcaaaataaataaataaataactaaataaataaaaataatctcataatatatattacgaacttttcttgtattaccatatataatgagaatattatgattacaaacataagtaattaaaagacagtaaaataccaccgacattctgatttactccatttttttctccatattattcatgaacataaatcatagagacatttagtcaaaatgacaagaaaattataccaaattttgcccctaatgaactgaacttaataatgggcaacaccactagatacgcagaacaaaattaagggtataattgtgttgataacaagtgtatgaattatcatattcatattatgattaaggttaaattggagaaacattaactaaatattggattggataagcagtcagctcgtttttggagaattttaaacaagggatgtggaataatcattacatttttctttcttggtgatggtatcgagcttggagatccagacaactattcaactcttaaccaacaccaaaaataattattcgattaaccagtttgtgtggtgttttcattaaccactaataaagcaactaccacaactaatagtctaattattctttaaatatttttcataatctattctttctctcaaaataagttattacaacagtaacgctgtccaagaaacacaattcaaaactgaaaccaatcacaaaacaaaaacttaaacttaattgaaaatagacaaagaaaacttagcttgataatgaatgaatgatggatttttattgaataggaatagtcaatagtacacaatagaatgagcccaagattataacttaacacaaagtattgcaatgaaatatctcacaatgagagaaatcacttcaagagtgatactccctttacattcctccacacacactcactatgatcttggactctccctctctaaactgaatctaaattatgagcttttagagattagagatcagaattctgagctcagaactcatttgaaagagtagagacactcctatttatagttgttggtggggtcccctttaagttggtattaaagccaactcttataaataacggccgctttcttcagattcatctgatgagcatatagatggacctactgacttgacaggttaagtgagtttaatcccgcaattccatctgattggactcacttaatctccgatccgaaagaaatgagtgaggacattaaatgccctgaatgctcaacaaggttagacagtgcttaaacttgtctctagttacacttttaatgaaaatatctacagggttatatcagttttccataaacaattaacaaatagatggaggacaacaagattaaaaacaccaaacaagaatcaacacacacgacctaaaatcaatctagtggcaacatgatctcaatttcattaattaatcgaaaagttggctgtgataccaattgtaaaaccgatctaatcggatactactaattgaaacaatgacaatcgctttaatcatgatgaaatttcacatttaatatttcttgagacacatatttttaaattagattcttcgatgagcaagccaaactggttaatttcattgatcatggtgttgataaacgtgtcacacagctaaactcatatatttattgctcgaaatataggtatgacaattgactcgtggactaaggttctttaacaccccaactacgtaaaaaagtctcatcttatttaattcttaaacatattttctttagctcaattttattttgatccggtttcctatttctcaataaacagtaaagaataagtatattatctaaaatattttttttaaaaaaaatgatcaacgacaaaataataattttaattaaaagttgtattatcttgttgtgtacatcagttgatttggtcatgttataacttattttatagatattgggttgtaaaatttttatctgtaattcgcccaataaaaaatttgaaaaaatttaacctgcctaataattttgtcagtttagttggattaatgtatccaaactttcttcttaaaaaaatctatccaaattgatcgtcacttttttttacttaattattattgttagtttttagtattcaaataattaaattttaaaacataaaattgcataatttatatttcaagtttaaaaattctataatattgacttagaaatttagactagaattctaagctacactcgctctctagattggcgagaatgaataggtagctaagtaattataagagagacacaataaatttatagtagtttacttcctatatcgcgatagtatttgttaattc

SEQ ID NO: 16804 - DNA, 1734 bp, Cannabis sativa
  modified_base (1662)..(1690): a, c, t, g, unknown or other
ctattacacatatagttgaaattaatataattataaatagaaatcaaatatgtccttagcattggtgctctgctccctaaagacttgtgtaattgagtatttcttgaactatgccaataattactttacttttgttaaggtattgaaccatcctaagtccctttgcttgatactcccttaggacctgacacattactagttaggaatatctctaaggtttgtgcatgcacatcgcgagataagctagtcctactagtaatgcttcatactcaactttgttgtttggagtgtcaaacccaaatatgagagcatagttgatacagtgattctctggggcgatcaacatgatccctacacatgagcaatgttcattagatgctccatcaacatacaacttccatacaaggatttgtccttccttctcagcttttccattcttcgataggtgtgaagtgtcttcaaggttagtgctctcagctatgaagtccaccaatgcttttcctttgatcgttatccttggccgataggtgatatcaaatttccctaacttcattgcacacttgagtagctgaccagatgtctttggtttttggaggacttatcatagtagttgattagttaggacttcgatagaatgagcctagaagtatggacataccttctgagatgttgttaccaaacaataggctagtttttagagagggggataccttgactccgtacctactacccttttactgatatagtatatcgggtgctggaccttatccttctctttcaccaaagtaacactaatagcgtacatagtgacttctaggtagacaaataagacctcaccatacattggcttttctaggaccagaggctgcacgagatgctcttttaaggcttggaaagatttctcccactccttaatctttggatgttcttcttgctgcctcttagcaggttaaaagaggacatacttgtctatcgattttgataagaacctacttaaatcattataacaaataagaggacctgctggcccacatcaaatacttcgagatgtatctcgaccttcagaaggtcactggtgatgtgcgttattgcatatttcaagccacattgtcgaagacaacccaataatggtactttaaactcaccctggggagattcaactcttgggttgagttctcacaagaattctatacataattctcatcctcgagagttgtaccatcgtaattggaagaccatgtcgaagtcaaacaacgacaaggagaacctttgaaggattatattcagagatccatggccgaggctaccaaagtcaaaggccttattgaagaaggtcgatacatgaccatactgagggcatactcccactaagtaacttttggaaagatatccagaggatatccaccaataacatgaaggagttcctcgatagagcagacaacttcatcaaacttgaagaagccatatgacaggcccaagcagggcatgtcaatagcaggcagtcgcgaggcacccagtagcctcatgacccaccagggacactggaagacaatagtagtgctgctcagacttctagtatcaagaacactagaaacaagcgcgacaccaacaactctgggaggaacagtgtcaaaaaggggaagtttgtgttgggttttatgnnnnnnnnnnnnnnnnnnnnnnnnnnnnnagatttacttattaataaagatgagaaataacatttaatgttgc

SEQ ID NO: 16805 - DNA, 5784 bp, Cannabis sativa
aaatagtatgacattctctgtttttggatttgagtatatccttttagataattcatacatttatctcatgtggcacataccctgtatacatttcaaattacaaaacgatataatataataattagcctgttatttatgcataatgtgttatgtataacattttttccatcattttggcatttaaaaacttttttttaatcatttaatttatattttatgactaagcagggatactgcaggacaagaaaggttcaggagtttaattccaagctacatcagggattcatctgtagcagtaatagtttatgacgtcgcaagtaagtagaacatacgacatcaagccaaatatatctatagacagttcacagtagcaattttttcctttatcaaatttgagatttcgattaattagttgtagaataaaaaaaaaaagaaaactggttgctgggtcttcctctattttcaacttttcataatagaaagtagaaacgacagcaatgtctgagcctaggttggtgttttgcattgggttgtgtggaatttcgtattcatgtgagtgttttcgtttgcttcctcactcacaaatcacaatgatatgggcatggtgcagatagacaatcatttcttaacacaagcaaatggattgaggaagtacgtacagagcggggtactgatgtcattatcgttcttgtcggaaacaaaactgatctcgttgataaaaggtgagccaagtttatggtccactcactcaccacaaaactagaaacataatgtttttgttgctttattactttaatcatttctgcttcattctcttgtcattattattctattgcccataacataatacatcattatttatacaaacaggcaagtttctatagaggaaggagacgccaagtcccgtgagtttggagttatgttcatagagactagtgcaaaagcaggatttaatatcaaggtatccaaacaatttttggtagaagtctaatcattgattattagatttgactcatgttagttccttcaatggttgtgattcgtttgacatgtcctgagggctgagccatctgattcaagcatttcttctttttgtcgaattgcctttgcagcctcttttccgtaaaatcgcggctgccttgcctgggatggagacactttcttccacaaaacaggaagacatggtcgacgtaaaccttaagccgacagttaactcatcacagatggaacagcaaggaggaggttgctcatgctagcctcttcattctctcttccgaagaaaaatactatgaaaattggttcaacatatctctcagctggatataaacttttttccttttgtttcttactaagttattcgttttctcagcgcataaaacacattactcaagttctaacaaaatcagagttacaatttttgatgtatttattttgttttagatgcattgtcttggaactttaaccttttcactttagttatattttacaatataaatttattcattacatatcaaaagatacgtaagatgcccacaaacactgttaagctcgaagaatcagggaacaaaaggaaaagttacttgcaatccgtgatgctttatgggttttatctaaaataaaagtttaggatttgaaataaattttaatgggtgctcatatggatctgctaaacatgtgaacaaaagcaccaatttacatagaaagcctaaccaagaatcatgaatatttacatcataaaaaaaaggttcgttcaacattaatttctagaagagagctcaaaaaagcatgcatctgaggaaaacaaataaaaattcattaaacctaaatattataataaaagccatcatcactctgcaactctagacactataccaatatcaatatatacaatctgaagggatcctttttaactctagttatcaggaaacaactcagaaaaaataaaaaaacaaaggtgatgcgtgtgaaacaagtagccgagagagacacacgatcttcagacatgaacaatgctatcagcactctgcctgactttgagcgtgagaaatatcaaaattaatgtgcccaaaattgacctggaaaagaaagagcggttgttgaattactaatagagacaaatcaaaattacccaaaacaaggctagggaaaataaaagctgaagacaacaatctcggttgttgcttgctacttatgaagattttagacctttactgaaaagatgtactgcatatatatgggtgcacagaattctttggaagtaaacttgttttgtatcatatttacaataccatttagaacttacaagattgagaacagaagaaccacttttcttgaatcgaacgaggcagctcgtttgtaccttctccattggttatttggtgtttcatgaaccctctcaacccctgttttatctattgagaatgtgataatgagatcccactttaagacagttttttagagaaggggaaagtacaagtgataagctaaatataatcatttttctagtgaagaaagcaatttgaaattaagtaaattatatccacgccttgtatacttgaaatggtaaaagtgtgcaagtattcagaccagcatgcctgtctaactatggcagccttgaactgtctttagatgacttttttaagaataagggaagattttacataagaagagcacttgtgaagaaaattatcaaagtatggttactagacaaacttttgagcgagtattgctacgaattgtataaaaatgtttatgtacctctggaagttccgtaattcatgagaagttggatcagtttagcaccaacagttacacttgcttgcctccacaaaaccctctgcaagtactataagcaacagaaacattagagacccagaaaaaatatgtttccttaattaacttaacgctatactacatgaagatgaagaagtgaaaacttactagcaaaacactctcgcttttcaaactttccacagctttctcattagattcaggcactttcaaggacatcttttcaacatctatgtcaacaacacaagaagaaaaggtctgtgtactgttcatttttaaatcagtgctgttctgagagttcagttttgcttccatgtagacctgatcgttcttaggattagtaacttctagaaatcttaagaaagccaaatgagaagaacaatgtagatcattgctctcttggggcaagacagaaatgctaaagagatcttggacctgcaggaatgaagagagaaaaagaagaaaaagaaaaattaagttcagaaccttgggacatcaagccatgtacgattagcaatgaaatggtgcattatagcaagcatgtcttacaaagaggtatcaacaaagaaaaccaacaacagccacttaaagatgtaccataggcaatacaacaaggcacttacatgtgagccatccgaggggagttttaaacttcctgcacacgaagcctcttcaacaagaagggggaaaatacctgaatcaaaacctgacttcagcatttggaaacctgaatagctgacaggtaggttacagcttccatccacagttccctcaaccaatggatttgcctgcaacttttgcaaaacattttagcacatacaccaaatgccaaaactgcaatgggaaactactcctgaaagagaacgctgacgattcaaattaaaagagcacaacaagcctctctcactcttacgtggggaaactctttaccaaaacaaaaaaaaactaactacaaaataaagttacttgaggaaatatgtgatttgcatcccaagaatcatgtctcacaaacttggtatctgacaattatgcagaaatgcttacacttactcaccattacaaaattcaacaagctggtctcaagttaaagtaaaaggaatatacatatctgtcacttttaaatgcttactttttctgccctgctcttagttctagaatcctgagcttttttatcacacagtaacttgactataactaatttattcctttttaagatggatggggaaggggaagggggtttatggagttgaacatttaagaatctctacatgttaatagacattcaagcaaatcattaatgttagaaggccatatttattgatccactccaattaaacatcacttaagcaagctagtacttacagcttacactcttaattgctaagatgtgcagtaatctgagtacttaactctatgaaattgttactgccatgagagtgaaccataaaatcatgcaagacaaacacaacaaacatgcacaaaagaaaattaagaaagaaaaatactagaaatccccagttattatacaagactagaacagcatgcaaatctagaagtttttggtaggtgtctagaaagaaagaaaaaaaaaagattttaaaatatattcttcccattgttcaacctagaaattaacgacaattggatcaaaactcgaaagagccagaagattttgtactttctttaatattcaccccttatataatccgcgacaaggtcaatgaagttcataaattggattcaaaattttctcttcttgctacaaagcaaatgggttttcaacataaaagttaaaccttcaaatgcaaatgaaatcagaacaacaaatcttcagaaaatctgtcaaatacatacaaaatagctcaattgagaactaaaatgagccaaaagcacagaacacagagttggtacctcctcggagggcttagcagccatcgcaggcagttgcagagaatctgtgaaatgcagtttctttcttcactgattcagctgagcctagagagagagaagtaatctcagaagaagaagtgtggatgtgaacgttgcatcgaagaagaagcttatttattttatatttttagtttttattttattaattttatataattggcgcgattcgccagaaaaggctcctgactacgacatcgactcccaacgaccgtttcttcacactgttcgatccatcattttaccaaaataccctttcctttatttaatgtgcattattttattttctttgtcatattttcacttatatattctttctattattttttttgccccttcccaataaccctcaaccctttttcttcctttaaatgatgcttctttttttttttttactttactctttagagtcttttttcaatttattaaatggttttttcttttttcatctccaaattgatgcaaatactattcatgtttagttataaattactaggttgctagtacattgtcatcaattttatttcacatcttttctcaataactccccatcccccacctttgttttttgagcttattgtactatttactagtggggttgccccattatttttggaccatatctctccaacccttattttctttaaaatcttttttacactcaattatgttactcaaattacaataaccctcttttttaccttggttggtacttcattcattcatctctaacttgggttcatttaactcaaccacaatattgtatcctatgttaaattattaacttgtcttaataagtgtcggctcaagaggtgggcatctacccttaggttacgccccttaaggacaaaatcttttattataaaatctttgataatcgattcaattatatttgcacctaattcctagatattttagccaatttagggattaatgtttttgcattagaaagttaattctgtttttgacctaacccctacatgtatatgagaaattaattaggtttttaagaatgagttacacaaagcacctatgacttcttaaagt

SEQ ID NO: 16806 - DNA, 5532 bp, Cannabis sativa
aaagaattgattgctctttcacatctttgcagagcaattttaagcaggttactctttaaaacacgtgatatggcagtaaagactgacctttgattggttgggaccgtaagtttgcaaagctatctcaatcgaagtgtaaacatcaagagcctggtgggaatcaggattgcattttacaacacgaacttgttccttcaactctgttgatcttgtccgtaagtaaagtagaagacgtgaagggagagctttgggattatctttctttccatggatcaattccatggttgctaggtcatcccacatgacatcccatactattgaacatggatcctttgctgggctgaattttctctgaatgatattggagggttgctggaattgattgaaagaaatttaacactatttaatgtccttttgagatggagactacgtaaagacatagaacatttttagtcaagctagctagcttacctgtaataatattactcttcgatgagtgaccacaagaatttttgatttcgggagtaagaaatgatcttcataagcatcggttaaggcaaactttccacgtactttgaatagatcgacctggcctaaaaatgaacctgattctgctaattgtagtataatctgcatgacaaacaaaataaaatcgaaggcaggaagtaaaagtcaaatcaatgaacaaaatgaagactccataagataaattaatagcatatgtgagaacacatcagaatattgaccatagataaatatattttcactccaacaaaatgaacaagaatttttatatcaaaactaattagtgtcaggaccaaacatattacagaattgaatgtatatctataaacactgaaataattttagataataaagacttcctagtagcaaatatttagttgaggaatttatgtatgattgaaaaacagatacctgtcctcgagctttgtactcgtcataaggacggagtaaattatcaccactaattacgcgaggaagtctcctgcggagaagttgttcatcagaagttatagctgatgctatcttcattctcattgcattggctccttctgtggtttttgacaaaagatccagaaccccactaactggttgtgccgctgcaccaattaatcctcttccaacaccttgaacaaaaccctcaacaccagaagtttttgcaccttcaagaggctttgttaatattccagtgactcccctgaataggccttttgctagtgcaccacctccttctctgataacatcaccaagatcctctatgcccttgttctcctgtcatgttaattgacttcaaaagtcaaatatttgaaccttacagaaataaccaaacacaagtaccaaaaaagggtatgcaaacctgtctctgccggctttggatgaacttcttatccattgatagggcagccatacccttactcatgtgtcccagtgcactgcttgcgttacccaatatatcaacaccagaaagcaattgaagaggttggccaaggagatccttccgtatgtttgaaatagcaatatttgtcattgaactctgcctcatgcacacattctcatgaaacctttgatttatcctaacctgaataataaatacaaaatatgttattaaaatgtttgcacacattctcctaaaacattatcatgtggctttaagcctttggctttagttggataaagtagctggatatctccacctacctactaagcattttgaggagttctcaattctagagttatgtggagtggaaaacactgatgtaacattctgtaattatatttttgtttttactctaattgtaagtgccctataattttcctgttaccacagtattcatccgccacggtgagggttttcaataaatttgagtggcagtcagtgcaagacaagtgagccctttctctatttttttttttaaaaaacaaaaagaaaaaagtaaaccacaaaagcaataatgagactccacagtaatgccgtgtaatccatgatggtcagaaacataatgatggcctgataaagggatgaagatcgcaaaagtggtccagagggaaatataggaggagacagcagggtattattggaaaacactcatctattaaagacgtaattttgagtaggaagtttcgtagtaaaaatattatggtctggccatcgtaacagaatactgtttcctagtacagggaatcagggatgccattggggttacaattaaacaactttgctatgtaaagcataacaaaatagaattagaatacatactggcatattctcagtgtttcccagtgcagtcatcaaggatgcccaaaagccaagtacaccccttggtcgttgactgggtgacatagccattgacaccttgaatcgaacttctgagatgttcagaactctgcacattccaaaaacataattagaacttgaactcaacttaaataaagggcataaacgtatagcccaagaaaaatacaaatcaccaacttgtgcttctaacatacccaatttggataattggatcaacagcaacgacggtggtttggttatcatataagcgattgaagttgacctgctggatcatttcatgaaggcgccatataataggttcgtgaatgtttatcagaaaggcagcattttcaggtccctacatgattaataaagatatgatttagcaataaaataaaataaaatagaaaatccttcctctaaacaatgatctactcacataaaaaccaatatatggatagacacaaagatccagtaacccatttgattgcattgtcacagaaaatttcaagatgtaatccgccccatccccaactttctggggtctgaaaagaactggcattggagttaatggcaactgattatccacttgtatcccatgcattcgtaatttgaacctacaacacagaagaaagtggaagcattggaaccccgggcggttgtggataattagaaaaatgaaagcagaacagagcaccaaatcatagcagttgaaccaatgtgacaatacaaaagaaacacacacaaaattattctggagagctttagcgggaaaaaaaaattatcctggagagctgatcaaactatagatgtgtttcacattcaagaattatcctgtctttcacattcaagaatacatatggatgtgttcttaggagaagaccccaataatttacggaacactgaagcacaaattactaaccaacaaattttatccaccaccagtatagcacatacctttcttgttgataaaactgggcatttccctagttagagtaagttaacacatctaacaagaacagatgacttccattaagaaaatcaagaatactgcatgtatccatgcaccctaaagatattcatgaaatacacacatatatatatctaaataatatattccattttggaactgaaattctggcttgaggagccattttcccatcttactaaagtcatgcttgtagaaaagaccgacctaaactcaattataaaacattcaagggaacctacctgctaattccagagcccaagccagttgaatatgcaaaaataaaagtctgaaccgagaggtacaaaatttcttcaggtgtgtgatcaatgattgatactccaagctcagctaattcaacaataacatgaaattcagactctgaggtagacggtgattgcagttgtggtgggtcctttaaagaaagctgcgatagaggagatgtgcctgttttactcaatattccaataggttcactctccggcatccagtcactgatcttaacaacattgactttctcctcttttattattgcaatgcttagagctctataagtcccacttgtaacatgcatagattgagcagaaatttcatcaatatcaaacttctgagatttagactggtcatccccatctatgaggagttccaacaagcgttttctaccaagatcttcccatagaaaggaagctgctgaattaggtagaaggaactgccatgaatcattagaaccatctacttgccggaaatgaataggtaaaaacatagagcgattttcaatcctgtaaatagaaatttgatcattattgcccagtactggagactatgaatttagtgactaaaagtccaaaaaaaaacgttattacagaaataacttgagacaagttcattatagcagaatggaagaaaaaatatctcgcacaactaatacagttgcacaaggaaatccattactattttctctgcaactttggtgcgctaaaatcctatgtatctctctgtaatatggttttcctccgtcataaacgaggcttattaatttatttcgagagggtcctgtctaagacttgcggacccgttcccttttcaaaaaaaaaaaatacagttgcactagcatatcttctttaacaaaatcgtggaggatttacaatcagatgagaaggtataatacactaaagtagaatagaagtataacctgtaaggacttgatgatgaatctggacgaaaaataacttcatagcttgagctctttgctccacttctgattgctactcttagctgcagttgatcgttaccagtctctttcttcaagcatattcgcatcacgccttcattacaaacactaaagggagtactccatctatagccatcaacacgcaactgaaaggaaaaacatatctccatcaatgtcatgtaaatcctaattacatatatatatttgaaaggagaagagctgcatggaccttcaaaatttctaacttataagactgccaacggaagggtttaggagaatcggtgggatgaatccattctaacgaatgagattcacactgctgcaggcaaagactgtaaccaaccctattaataaacaaggtgtagggctgaaaatggagaacctgaatatcaatcaatttagtagttgttagatagttattaggtaccataaaagccagcaagattcacaacatagtaaagaagagtaacatttaatgcaaacattacatatacaagggaccttccctgaaaaattttgttctgacaactatagcttatacatttgaagcctttaccataagtgagaaggtttttcactattttataaataagcaaagttgcaaacaattgtacatttttaagcctttgtaaatctggatctttgaatatagatcgtttaacagaaccagcagcaaacacacatagtagcaaacatagtacacagatttttctacactagactacttagatgggttaacttaagtgcatttgcaatctgcttatacaggtctgggtcaaaattgtcaagttgaaatcctgaagccacatccttttgcaaagcgataaaatttatttaaagtacacactgatatggacaaaagcaagagaattgggaggttccctcaaaaccaaacaaaagtaaaacttcataaaaccagactataaaataccattttgacaaacagagagctagtaaatatccttactttcatcaatcaatgtacacatagagattatttatgttgaggattattgg

SEQ ID NO: 16807 - DNA, 8757 bp, Cannabis sativa
gacggctgagattgatctagggataattaggattaaaaagtagaaatgtaccttgacactcatttaatataccctgagacccatctaatgtatcaataaatacattccgtaaaagtacattacgagacaaaatcatatccccacttatatatgtttgataacaatgctcaatattttagcagccaaactcaaaagtcctaattaatataatgagattaggttaattttggaattaaaaaaataaaaaaaaaatggtgtatttgggaaatagtggctctctgcccaaagtacacagtacattgtctctctcttaaacctgtcctatgcagctatgctttgctcttcttcactcaccacattccaaagctcaaactcaaaatcccaaacccaaactcaaacctaaatcttcaacttcaactttcggatcaaatcaatgtaagtacagatcttttttaaccataacaagaagatgaacaacatcaagttacttcaacctccatgtcattttcagtcaaataaataaacttattatatctttccttttcatacttctgttttattattaaccttaactttagtttaatatcacttcaaaccccaaaacccaaagaaatctctttttctccacttaaaaactcagacccaacagaagaagaagaagagggttcttctctgccattaatgaaagcttaaaacttcaaaacccaaagaagaagagaaaaagttgagttttttatttcaagcttcaaacagaagaaacccctcctcttcagttctgccattaatgaaagcttgaagaagaagaagagggttctgttctgccattaacaactgtcattaaagattggatttttatttgttcttcaacaaatcaaatcaaataaaatcatgggttgttgttactcaagaatagagagagaagaaacagttagtcgatgtaaatctcgaaagagatacatgaaacacttagtcaaagctcgtcaagccatgtcagcatctcacacaatgtatcttcgttctctccgaacaactggctcagctcttcttcacttcgccaatgcagaaacccatctccatctccaccaccaccaccgcccaccgccaccgccggtaaacccatcaccatctccaccaccgccacaaataccaatgagcccaagttctgacacgtggacatcagtaacagcttcccctgctcttcctcctcctccgccgccgcctccaccgccgccggctccgtcatcgacttgggatttctgggacccttttgtcccttcttcgtcgcggtcggtgactgaggaagaatgggatgacggaaccacggtggcggtgacggtcaccggagcggcgagtacggcggcaccgccttctgttgtgagtggattttcgaaggagagttcgagtgagttggctatggtggtttcgaggaatagtaaggatttagttgagattattaaagagcttgatgagtatttgcttaaagctgctgaggctggttctcagctttcggcattgttggaagttccgagctctggtttttctactcagagcaacaatggaggtaataaaaaaattaattaattaattatattttacataagaaaaatatggaaaatgttttttatttttttattttgatatttgacgcaaaagtgactagagttttatttttattgataatttgaatatatgtggtacaaaaaaaaaagtattttttcccataaatatgtggtaaatgatttatatattagatattattggggaaaaaataaattgtagctagctaaatgtccaaattatttaccattttttttgtatgtacttaaatttgtttatttagtgtcaaatttgcttagaattggatacttttattgtaaaaaaaatgagtacttaaatgttacaaatttaataatttggtgtttttgctgctaaattaataattatttgagtacaaataatggaggtaattatttgctacaaatgcaaatatttttttctattgcgagtagtaatggaggtaatttttgtagcataaatttgcttataattggatattttcaatgaaaaaataaacaaaattgagtacctaatacaaatttgataatttaaatatatttgtgatacaaatttagtgtaattaatataatggtagtgtatttttttttcaggtaaggtttataactatggttggagcttgagtccatcttcatggtcatggggttcaaatcccaagctttatggaggaggagtagtccaaagtaatattttcaatcataatattggtaataataataataatattaatggcagtcattgttctactatcgagagactttatgcttgggaaaagaaactatttgaagaagttaaggtaagaaactaagaagattttgttttgttttgtttgttcacattggtttctattgtagttgactatgttagtgtttttttgggttattagtgtcaaaatctttttatgttttgattttatacacttaactctttgttttttttttttgtcaaaaccttcttatgtttacattttttttgcaaatttgatgcatcagttagatatcatcaaactggattacctgtattagctttgaggttgtactatcacatcaaatttgtaaagaaaaataagcttaagaaggtttaaggggttaagtatatttaaatcaaaacgtaaaatgattttgccgctaatcaggcctgacacttggtctaggtttgctaggtctgtgcttaggacccactacgcctaattttttttccctaattaccctttttctttttttattatttaagggtgtggagaccataaaaaaagaacatgaaaagaaaatgtcaattttgaagaagctagaaatgaagagaggtgattatatgaagactgagaagactaagaaagaagttgagaaattggagtcagaaatgatggtttcttctcaagctattgagtcaacttcaactgaaataattaaactcagagagacagagttacatcctcagcttattgacctagtcaaagggttagtcaactctttctctatcactttgttttgtactatgttatatttatgtttgtatgtccgtacaattcttatctagtttctgaagctatagtgtgaaaatgaagaattttggttggtttcatattgtatgtctttttttttttactttctttttgttttgaagggtaaatgggtaattaatccattttaataccatatattgtctctttgaaaatcttaaaggctttatttggtgaatttcaccaatagtttttttcagagaaaataatttaggctatgttaggaggttggattttttcggtgaggaaagaaagatatagagaaaaaaaatgtgtggagaataaaaaaaatagtttaatttttcatgtttggtatggaaaattttgttgaatcaagtttttttagtacaatttttgcattctacaattcaaaaaaaaaaattacattctataccaaacatgggtttttattattattattattttcccattttttttacatttttattttccaccaaaatccaacttccctatatattaagaaaattatacaatatttattttaaaaatgaaatcttttggaattttttttttgttttttttttccaattgatgtcacactcacactcttctttagtatttgacaaggtacccttataataagatgcccataaccctatttttcttttttatgtctaatttatatatatttttgttaggaactataaagttttatatctgaattaaatgacccaaaaaaattgtatttatgtggcttatgagagtaaaagttcacttttttattctgaatgaaggactcagctcagaaaatgatgctgaaatggtacagtaaagaactttactttattgactgcttttatcttttcttgtgtccttctctcttttctttctttgtaaagatagctcacagtcacagttaccacatctcttccttatctatttattttaaagaaagatataaataaaaaaaaacttgtgctcaatgttttttaaattgattctaggatgtagtattcaacataagaaaatcgagcatcgctatatgactcgattgggatgaatgcacaatcttgttgtccaattccttgttgttgttgctaacttactcaatttactaggttttcggtttaaagaataatgttgttcaagtgtttggtcattaaggctcgagaattgttaggcgagtaggtcaaattgtaaggctcaagttgttggtttttcaaagtttctaaagtttttaccgtctattttaactctttctcatgttagtcgtaattttatattgtaatttttgaattgacattaaaaaaaatcgagcattgctatatagctcgattgggatggaagtagaatcttgtccaattccttgttgttgccaacttactcaagttactaggttttcggtttaaagaataggtttttgttaaagtttttcgtaatcaaggctcgagaagttggtttttcaaagtctctcatgttagttgtaattttattctcatggattgacttaatgtgcgttttgagtagttcaaacggttaaacatgtgatttgctcccacgagatctgaggttcgagtaaaaaaaattgtaggattagacggagaacctaattttaaaaattaaaaattataagagctattgttgttaagaagcacactcactttacaaattactttacttgattttgcagattaatgtgcatgtggaggagcatgtatgagtgccaccaagttcaaaaacatattgtccaacaactcaaatacctcaatgccatcccgtccaccgaaccaacttccgagcttcaccgccaatcaacactcgagctcgagcttcaagtacaacaatggcatatgtcattttgcaacatggttaaatctcaacaagattacatccaatctctcacgggatggctccggcttagcctcttccaatttaacaaaaatccactctcgagaaccggtcaagaatcgaaaatctattctctttgtgaagaatggcatctcgcaattgatcgcattcctgacaaagtagcttccgagggaatcaagagcttcttaacggtgatccacgccattgttgttcaacaagcggaggaacataaacaaaagaagaaatcagaagctgtgtttaaagaactcgagaaaaaggtagcgaaccttagatcattggaatccaagtacggcccttactcggtgcctgaatcctcgggtggtgtttctagaagaaacccggtagctgagaagcgattaaaggtggaaatgttgcgagctaaggcagaggaagagaaaacgaaacatgaaaaggcagtgagcgtgacaagggccatgacactaaataacttgcagatgggattgcctcatgttttcgagggaatggtggggttttcgagcgtgtgtatgcatgcgttcgaatcagtatacaaccacaccaagagttccggtcaagaggtggatgttaaaaggcttctacagtaagaatcgcctttttttaaatcttttaggacgaacggtcgaattcttgtatatagattgttcgtcgtttttggtaggcaggggagagctagactcgtagcagcggtgttagcgcagttggtttggtacatagcggttaaatctgttgaagatttgtgtatgaaatgcaccagagctacgagtttcgaattactttattagtacttttgtcacaaaatatttgatattgtagttctttgttatctaattatcttttaagttttaagtgatggtttcttatcataattatttgtttgcaaattaagaattttcttatcaacaagcttcaaataacaaactgctgcctctgtatcttagtttgtagaaactatactaacaattttaatttccatagccaaaaactatttttttttcttttttcaccaattgggattcattaaaacaagtaaacaagctgctaccacattgggctgcacctccccgaaaataaaaatgacctccggccttgcaacgtcgggacggttttagcgattctattggctagagaaacataagctctaggactaaaaccgaaacaacaacaaacattaaaatgtctagaggcacggccctccattttcgaggcagaggaagtctcaacaaactccgtcgagtagttacaacgaaattaactccttccgcttgtagaagcagccaaatcagttcctttggatttgccaccagcacacaatgacacaatccatccgaagagcccaacgagaaacaaaccagatgcatatttacatccaaatacatctgtctcagcacatactagaaactagaaatcaaagaaaatttgtagtaaaattatccaactacatatttacaaaggtaaataatcaagttattaattagtctcttctcttaacaaacatgtctagttgtttctttgttgaactaataaggtaagtgggcttcgccaagaactttgcgatgtagccaagtcaagcgcttatcgcctcttagagacaaaaatatttcccttgctaaaggcttgttgaacatttcgagtgcagccaagtagagtttctcatcaacaccttgcatctcatccaatagtttgatacattttgttacactgtatttagcagcattcgattgttgtatggctgttgtcctcatctttgatgcagttgccatctccaatatagcttcagcaatcgcatcatcaattcctttccgccctctttttcgagtagtaccagtcataggcgtggaaggctgctgacctttatcttgattttcggtaacatcatcagcttcttctgattcagatgaggactgctgctgcagggacaagggtgttgtttgattgatctttgatggagtcttttccccgacttcagccgactgatcatgcttcccgttggttactgattctgagaatatagtgcatagctttttgtaaatcgggcagccactagttctcaaagactcagcatcaggaagttcctgtttaagaaaaagactccttcacctaagacacatttcgaatttttatctttgcacacaaaacatcatatagcgaaacaaaacaactaccttgatgatttcggtccatgctttctcactcgcagtaatagttcctgtagtttcatcccaagtgaaaccacctcgaccgagaagggactttaaagtagcatactgcttcctcagcacagcataccggctctttagttggtccttgtcccatttaagacctgtttttctatagaaaccgtcacacatgtgctcccaagatttcttgacaaaataattgttttgcctattccctttgtaaacttgttcaaccatcaaatctgcaagaattttggtaagaaatgatgtccatttcgctctattttgttgttcctgcggctgatgctgttgggattgttcgctctttgatctagtcactcggcttgccatctatacaactactctacaacataaactatgttagagaatacattgaaaaaatatgacatgtccatctcaaagagttcttagcaattacccattactatacatgcattgataatgaaatatcatagggatagaaatagaagggaattaaatttaaaacgcatacaacattaatataaaagttgttaatttttttctcaatcttgcattagaattatctttcctttctattttaaaatggaatagttactctactgaaataacttccaatactttaaagtgtaaccgaagaaataaaaattgtttcctttatattctatttcatttcactattcctagtcaaatgacagatggtggtggcgtttggttagaaggaatgaaaacataatgagaatgagaacataaatagaatcgaatggataagaaaataattaaaattttctcataatacaatggcctttactttcaactttcatttcaaagatttacattccattccatttcattacccgagccaaacaccaccttagttcattggagaaaatcagaatgatatacatgagaatatccaaatgagtttcttttccatccaaaataatcattaacaaccaatctatatagttctcacatgtattaagatctaactcaaaaaatctcaaatcactaactcaataaaattcagatatcaaaaacccaaaatctacctctcaattattagccttctgttcacttagaaaatcaattattagtaaattattatatgaaactactatgaaaatgattgggttcatatctgcatagaatcacagtaataaaaaaagaccaaatttatgaaaatgaatggaaatgaaatagccacaagaacaatctgaattagaaaatttcaaagcatttattagtaaaaatggcacagttgaaatcaattcgtaaaccctaatttattacctggctgaagtagaagaaggtctgcgttgaggagaggagtgaagctttgacaaaaactacattttggaatgattctccgattggattggagattatgaagttcattcaaaccaaaattgattttcttttataagaaaaaactaaagaatggaattgaagaagaaaaaaagagcgaaacaatatgtctaacttaaaacgacatgtcgtattactatacatttcacaaactttttttttttgaaaaaaaataaagttagaaagatgaaattacatttcaaaatcattacaaaagaagtttttaggtatggaagaaacattttaacaactatattgattgtaagt

SEQ ID NO: 16808 - DNA, 3782 bp, Cannabis sativa
aataatttccaacaataacttcaaaacattattaattgtttagacaaaagaacaaaataagaagaattttattgcatatttaattaataataataaaagagaatacatatttttttttctttcatacaactgcatttgcagtatgctaataaatattatagacaccctcttattactaaaatttaatcttatttggttttcttactattataggcacaagtacacataaaaccatgcaaaaggaaaagatacttattttcaaggggcatagccaccaccaccaccatggccaccgccttcgccacctccatatccactgccatgtgcacctccaccacctgcataaccaccgccacctccagagccaccaccagatcctcctcctccaccaccaccatgagctccaccaccaccataacctcctccactacccccaccttggccccctccaccaccataccctgcattaccaccaccgtatcctccccctgctccacctccttcaccaccgccataaccaccaccatgctctcccccatatccagctccaccaccgccaccactacccccaccatgtcctcctccaccagcaccaccataccctgcaccacctccttcacctgcaccgcctccataaccaccacctccagcaccaccataagcaccaccaccaccacttccaccacctccaccaccgccatgtccaacaccatactctccaccagcaccaccatatccagctccacctccttttcctcctccaccaccataagcaccaccagctccgacaccaccataagcagctccaccaccgctaccacctccaccaccaccacctccttgagccccacctgcaccatacccagcaccacctccttctcctccaccacctccacctccataagcaccaacaccaccatatccagctgcaccaccaccaccaccactaccaccgcctccaccaccgccatgtccaattgcaccgccatatccagcaccgccaccttctcctccaccacctccatagccagcagccccaccaccaccatggtctcctactgctacataccctccaccactgcctgcacctccaccaccaccaccgccataactaccagcaccggcatagccttctccaccgccatgtcctccaccagaaccatagccaccaacattgggctcataagtgagcaagagtctagtagcggagcaaatacctaaagctagaaagagaaagagaaagcgagtgttggtatggttattattattagccatggtgtaacaaataaatgaatgagtttgaagaatgttagaaatagtttaagggtttatatagacatatacacgagaagatacaaaaatagatataaaggtgttgtgtccactgagtgaatagtagtagtaggaaaaagaaaagtgggcggaagagcacatgcaaaagaagaatatttacatactttgatgaggttatgattatagaagatagggtggtccattcaataactactatgcacactcactcacactactcacactactagtactgtttatagtgtatagtgtggttttgctgtcgcccacatatatacccacgggtagaggcgtagtgtaatgtatcacctagttagccacaccatgtgctacattctcccatggacctttcacgcctagctatcttcttacctaataattcctcttcttgctttatcttgttcgctactcaatcatattttaaacacttattatattattattagcctattattaaagtactgaatgatcaatatacatgtagtgatctccgtaaatattgattgcaattaagttcaaaggttatggaaattaaagaaattttaattgatgtaagtgctttgatctatatgcaaaattcataagtacgtgatgcatgcgtatgcatgccttatcacttgaattaataatgtgtcgtgtccacctctcctccctctttataatgaaattgtctataatttcacatatatatatatatatataaatatatatataatcaccaaacaagttgaggggtggtaattaagtattgttggccagttgatccaactttgggctgcaaagtttacttttaactttcgcattagtatactattatcaaattgtgacaccttctaaaaaagccttatagtaatagagtagttaaattttatatttaagggcattcttttaatgtaagatttgagttgatgctccaatattattagaaagacttttaacacgatggactaaatacattggaatcgtcaacgggacatgcagtcaaaccaccacaatattaagtagattttcgatataaaagactatatacattttttatcgagatctggtcatattgagagcttctcctacgcaacgctaatgcagcccacgtcccctttggctctagtaccacttattgggcctcattcatccaacttgttagcgaggttgcaacctcaccttaattaacttttacaatagtataatattgtccactttgagtttaatcgcacggatttgtcaagtactaatttctaattaagtatccttattagaaaagagaatcgaaacaccattgattcgatccacacaagatgatccctcttgcgtgaatattgctactgaactccctgcatttaaatctaaaatccctttagaataatcagaacaatatccctcttgctcttcaagatagtagctccaagaatggagtttctgcaaaataaatttggagaagagagaacgagagaaacaagaaaagaaaaagtccgaagagaatgtgaaagcaaaaacttatatataagtttaaaccagataaattaactgacttaacaaactgttaatgttaacagaaaagaacagagaattactaaaaggcaccagtagtgtctagcacccttctacgtgttaatatcgctattggtccaactaagtatcaggtcccatatagtttcatataatagtttttaggaagtatcgctagccaatagcaatgcgacatatcgagaaagtgctaagcaccacttgtgcctaatagcaatgctgaaaagaataacaccaattaatctacttagctaacgtggaaatttaacattcatatacaaagtgcattttcaactaagacacagccatgttggccctagaatctaatttgccatatgctgaacaatgattgttactgactgacttcttacacaatttatttttaaagctaattattacttcatttcttttttttttttctggtatattcaaaaaaaatttcgagtaggaagctcttatttgaaggatcttagaattgaagaaataaattttttggggacctttacagttatttgagcaaaatgtgtggatgtgatgataacgctttggagcagtttggcttgatcgccattgttattttgaagcctcagcagattgtatagtatggagtcataagcattaaaattatttatttcacatacttcaaattattatcaaaattattgtggttgtacccttttaattatcttattaaaattaaccattttaatgatatatattttttaatattttaattgtccccactatctttttttttttttctccagtttttgcactttggtaatggaaatccactactcttttgagaaggctgtacagcacagtagggaaatccactttaagtgtatatgattattattgatgtcaactatagtgacgttgacaattgtaaaaaatgattcttccatcttataaaaataaacgcacacaatctccttttttttttt

SEQ ID NO: 16809 - DNA, 2979 bp, Cannabis sativa
aaagaaagagaggtacagagagatagagtaccttattagaaggttggccatctgaatgcctgaaaaaatctgattcaagattcattggccatcctaagctaaaacatttcttggacctaaaacagaagtataattagccatttaccatcttcaggagcatatacacagtattaagaattcaaagatactcaccaaaagtactcattcagatcatcatagtttctccaatttgaatgacttgccttgccattgttatttctctttgcttccttcgcaaagaacaaaatttattttcagataaaaattaaaatgtaacatcaagtattagtgattcataacacctaacatcctttttaccttttgcaacacatcaaagataggggttataacatgtgttaagaagtgctcttcatgacatgcctcattttgataagtgtctccgataacatcacttgcattgctatagaggatcccatacacctcattggccatcttccagaaataggagtttatatcatagtcaaagcagtttcgtcaaataccaaacaaaaatgccacgcataaatgctacaatgtagaataatgacccaatatattacataacatattgattaaattccatcagtcagataattaactaaggataagggaggactataatcagtttaaaaaacagaaagcaaaaaagacactggagcctagctgaagtagttgggtgtgtgtaggaggcctgaggttccagccccatctggtataattatatcagcaaagaaattgtgttgctttcaaccaaactaaagatatgtaaagtaaaatgtttgatattatgaagccattaacttcattagtggagctcaacttccctaattcatcttcaaactttctttatagttacaacgaaaacaaattaacaaaaataaataggtaattatcttaaatggtttaaaatatttgcaaagaaagaaagatttgatcctaatatctcttacgttaacaatgttaaatggttgaaaatatatgtaaagcaagaacgatatgatgccaatatctcctgaacacaaagaacaatgattataagaaactgctaaatacattaaatggctaaaaaaaaaaagacatacattatgaaaaatatagcataagcattcgggcatgaatcgaatatttgaagcttcaccccatatcagaagataaagtgcaatgtaaataagctccagttgttgtttgtcagtaacttgtggaaacctgtgagccaagaagtaagggaagacactacatggttaaaaaatcaatcattggtctgaaacctagtttcttacacactaagaacaataaatttgtagttgaaaagcagcgaagttcttacctaagatttgatttacaatgcaaatatttacaccacgaacggtaatttttaaagaatttgtccagcaaattctgtacagtggcagctgccaactgtaataaagttctaacaagtcagtttgattgaatgaggtattatgttgaaaatctatcaaacaattcaagagcttataattcaacaaaataaatgaaagttcaaaagatcaatgagttacttcggtgtgacgttcagaactcctcctcctcacatcaatatttgcaagaagcaatatgaggtgttctctttgatttgcaacatttcctttctttatatcccaagatttcagcatgaaaagaagagtcagagatattattgctccttcttacaaaaatttgcagtaaactaaaattctaaagttagattcaaagaaaatttagttcaaacgaactaaactcaactacgaaatataacattggagaattttggacatcacaacattgtaaaatgagaggattgttggaaaatctcaagcccagaaaggcaaattctgttctcagagcataaaacataactgtcagctgtaccccaaaacaacaattaagccttcatatacttctagaaggtgagtttacaagtaaaaggcaactaactcaacagaccttcttcactggttgtcattttttttcagaaaaaaaaaaaccttaaaaatcaaaatattgaacatttgatggcaactcaatcacaaggaaaacataagaaacaaaaagcatatatatggattttgtggtttctatttctatccattctagtccaatttatagtgtcaaaccacaggaaagaatgagcttaaacgggaaagagaagatggcaacaaaaagtagaattctccatcttcaagagcttccagcgagtgacatttagtgttaggcagttaccacagcatggtatgacaggagcataaataagaggcattaacttttaagggatgatgaaaatcaaacttaaagcattcattgaacaacttgcctgaaacccaaatatagcagaaagccagtcaagtatatcattaacaggctgaaccctctctgtaggaacattgtcatcaggtccagtaggtgtacgttgaattctaggctttggaagactccccacattacttagagcccgaagagctgctttgatctatacaatttccggtgaaaatgaaaattacagtaactaagagaatttttcttttagaactatccagaaaaatcaaacttacaacagtggttacattacctctggaagttccataatggctggtttaaccccaacagcatacaatgggagaatgttataatgtgcatactgatcccgcttgctatcaacatcctcggaaattttttttgtctgtgatgaaatggaagttcataaatagttaatcatatatttcctgagtgcctttcacaaaaactgttttaagatgtgaacctacaaaaccaagaccaatgaaatatcataacctgggcatctatctgatgtggaggtaccactgtcttcagcacctcatagagtactgtagcaatctgacaaatcttggccatctcctcccttaaaatgttgaaaaagaacagcaaaattattttataaaa

SEQ ID NO: 16810 - DNA, 2361 bp, Cannabis sativa
tacaattaattaaatttaaactcatagaaatgaaggaaattcaattatattataaatttaatttaaaatatgtataattttaaattacaccatactaaataagtattattaaaaatataaacttacaaagtttgtatctcaataaaacataccaaataatatttaccctacattaaaacattatagtaacgtaatatatttttcatagctttcaagatggtacccagcacggccccaggcataagcagactacgcctggaccgaccctgatggtaccaactttattaaaatatctatcatattacaaatatttgttttataatatgccgtaattaacattaatgtgataaattggtccggtcgctaagacttgttttgacaatggagttctaagttaagctctatcgcaatagttctcaaattaaaggacttgattgccaaataattttctcgagggctaatatgctaaataatattagctagaaataaatgatcttctattaattatatttcaagcgaaaatgaaagaattcgaccattgaatctagactctagtcacttttcttaaataagagcggcacatttttctgcctatatgaagaattcaaatacatacgtactaaaactccacaaaaataatttaggagttcaattatcatgtcactaaatcaaagaaaatattgcattttttttgttttatttttttatttcctaggacattaatcatacatgggcaatgggcatgcatgtatatttcaacaacatgattcaaagtcaaaaacattgaaaaagaagcagtagaacttggcttgggtagaagaatatgagaatgtaatgtcctaattttgggggtggaaaaagagaaagaaaaaaaaaggaagtgaaggaaagtttagggagttttagaaggggaggaatgaggattttgtgttgaagttgaaagtgacagagagtttaacgctagctagttaacggtgggaataagtgccttaaatgcaaaagttgtggcaaaggaaactacaacaaccaattctactattaatgctatctacttactaacaacagaacacaatttgggtgtggtgggcaggtaggagggagccccagcccatctatatctgattttgaccaaattcaaaacccacctataacctccaattattcaattcatacgttcccacttcacacacacacacacatgctataggcttcaaattaacttatttcaaaacaattaatttctcatttttggaatgaaatgaattgtataaaaaaaaatgatcaaactaaattttttaaatcgaaaatgaaaaattgcttcttacctttgtatttttctaccaaaatccaactttcaatcataatatatatttatatatgtcaagaaggtttgaccgagtggtttttgaaagaattaaaaagaaaaaatggttagtgtttgaaaaagaaagagataattgggtcaattggaataaagaagtgggggctgtttagattattagaagttagcgaatgcaatattgcatggtaatattattattatggagtgtgaaaggtcatatgagtgtgaggtgtgggactatggatggcaacgtaacactcaaccactttgaaattggatcagttgatggcttcgattggatttatttctctctagcgcagttgaacaattatatatatttatatagctactattttcttctccacgttcgcttatataataaccatataattggaacgaatattatcctatatatgaattttgggtttatatatatgtcaacaagaacaattttcataaattccatttgtttccagaccagattatgactcttccccattcaagtagtttagttgttctgtaaaaataaattgctatggtgtttagtactacttttgtttgtgaggtggcatcttataaatgaagctagcaattttttttataatcattcttatagtaaaataagtaaatttaggggaattgtagtgtatatggtaaataattttttttttttacgtttactttttttatatatattttttacttttgttaaatttatttctattttgaggttatcatggttttttatgttgtttttattttataaaagttatttttattttgatgttatgctatttttatttagtggttatgttatttttatttttataaataaataaaaaattaattataaaaatataaatgaaaaaacttgtataattttatattaaactatgcaggtaacaataaaatatatctaggctaaacaacacgagtgtcttaaaaatttcctatatataatgtattattttactacatgaaaaaaattaataaatagcaaggttatcacatatgtactt

SEQ ID NO: 16811 - DNA, 3258 bp, Cannabis sativa
tgttgttgtagggaatgaaatggctgagagaatggcttattttgggttgtctgtgaacatggtggcttttatgttctatgttatgcatagacccttctcaagctcatcaaacgcagttaataacttcttagggatatcacaagcttcctctgtcctaggtggattcctagccgatgcttaccttggtagatattggacaatagcaatcttcacaacaatatatcttctggtaaggaattggggaaatgggatttgcttcatttatcattttattttccattagtcactgaagattaagaaaaagattcaatacttttgtttgctttgtaaagggtttgacagggatcactttgtgtgctgctctggatgttttcacaccaaaccaggaccaatgcgaccagctatctctgcttttgggcagttgtgagcctgcaaagccatggcagatgctttacctttacactgttttgtacataactgggtttggagctgcaggaataaggccatgtgtttcttcctttggagctgatcagtttgatgagaagagcaaagactataaaacccatcttgataggtttttcaacttcttttatctttcagtcactattggggctattattgccttcacagcagtggtctacattcagattaaactcgggtggggtgccgcctttggctcactggctgcagctatgggattatcaaacttggtgttcttccttggtactcctatgtaccggcataggttacctggaggtagccctctaaccagggttgctcaagttcttgttgcagcttttcgaaagagaaacacttctttctctagtggcgatttcataggcttgtatgaggtccctggcaaacaatctgctataaagggcagtggaaagatagtgcacacagaggatttcaggtaatttttgctaaaatgtatggggttccaattcaaaatcaacaacggattctctttcgaattgctatcatttttgatcagaagctcatttaatatctataaagttctgacttaaaatcagtagaaaattagtggattctataagtgaattggtgatttttacatctattcaatgtgaaatttggtgatctttcgtctatgaactctactcaaactcagattttcctctgatttacgttgcttctgtcaaatattgcagaattttggataaggcagccctgcagctgaaagaagatggtggtgagccaaatccctggaggctctgcactgtgactcaagtagaggaagtgaagatccttttgaaactcattccaataccagcatgtacaataatccttactgcagtgttgaccgagtacctaacactgtcagtgcagcaagcatacacaatgaacacccacattggccatctaaaactcccagtgacatgcatgcctgtgtttcctggcctaagcattttcctcatactgtcactctattactctaccttcgttccactgtcccgacgcttcacaggccatcctcatggcgcttcacagcttcagaggattggcattggattagcagtttccatcctgtctgtggcatgggcagccatttttgaaaaatacagaagaaactatgccattaagcatggatacgagttggtatttataactccaatgccacacttgagtgcatactggttgcttattcagtattgcttgattggcattgctgaagtgttctgcatagttggtttgctagagttcttgtatgaggaagctcctgatgctatgaaaagtataggatcggcttatgctgctcttgcaggtggtttggggtgctttatggcctccataatcaacagcattgtcaaatctgtaacggggaatccagagaaaggggagccatcatggctgtcccagaatataaacactggtagatttgattatctctattggctgctaacagctcttagtgtaatcaatttctgcatttttctgtattgtgcaagtaagtacaagtacagggcagctcaggttgaaacaaagaaaaacaacaatagagataactcttcctagttattcactaggactttttttctttttttaaagaaagggtaaacttgtgaggccataaattattggctaagtcaatgaacatcaagaaaatctattagtattaggtaatttaaatgttttcaaatgattggtgttggttcatactgtgaaagtcagtacaagtgttcttagcctttttgttttccttctctataaattaattgttctttttgctgcaactacatgacatgtcaaattttcagcaaaaagaggatagtgaaaactgcaaaggagaagagtactgatatgcaagcacttaaaaggatgttatttaaaattgctagtgcatattgcctattgcagaaagttgctacttttaagatcaaaaattgtagaaagtagtaaaggaaagtatatttaaaattgtagagagtgtttttaatatgaagcagaagtgagaaacacttcaaatgtattaaagctaattcttgaatatacttcttttctttttgttgttgacagttattaagattatgcttacaaattagactatgttaaagtgatgagagagagagaaagagatgcagcaagttgttggaggattttgttgttgattgaaagtgaaattaagaaaatactgtgtagtcatatgttataaaaagtaactatagtaagagtgaacttttatgtttttaaatttttttataactacttgtttttataacggtctacattatacattatagttataataagttatttcacttaatttttttttttaaaaaaagtattgaataatttatgacatcaaaaataaaattcaaaattatctcaattatatgaaaaaaaaaaaaagaaggaaaatttacattttaaaacgttaaaagcaattaaatttcaaaaatattgtagttttatttaatacctaatatatacccttttctataatgtttttaaaataattatttttttcaatagatcttctcaatttatgtttgcaacgatgacaatgacatcatcattgtttatattcatcacattttaattcatgcacaactatcaacaattacatgaaataattaaaagagaaaaaaacatctttgttgctgcttaataattgtcaccaatggagtaccacgttctataaatagacacataagagcagctccaacacaagctaatcaaagtagcttggcagggctgtgtcaggtggtgagttactctctaaagtagcttatgcat

SEQ ID NO: 16812 - DNA, 2898 bp, Cannabis sativa
tcccttttaatgaactcaatataggcacaccttcattctttcgagcatagagaagcaacaaatctggcaaactgttgagaagttacttgtagacaaccaagtcgaggcaagttccttgctctcttatattttgataataatctttctactttgctgtaaatttcggtttgttcataggatgttcttgatctaatgtttttgctctgcttcaggtaagagagcatgctgcagcggttctagcaggtctcatgaagggcggggatgaagatttagctaaagactttcgcgatagagcttataagggagcaagtgctcttcaacggaaaaggaaacaacggtattatatgctgatcatatgtttagaatgcttgtatgattaaaatatataatagtattgtgtacataaaaagactggtgatttctgaatgcagaaactcgagttcaagttcatcggtagcttccatacacggtgctgtacttgcattagcagcttctgtgttgtctgctccttacgacatgcccaggtttgtattgtttaaagtaatacaaagcatagttttttcagatgtttatctcttttcttctctaaccatgtaagcaatgtttttgttgttttcgcagttggttgcccgagcatgttacattactagctcgttttgttggagaggcctcgcctattaaatctacagttacaaaagccgttgcagaattccgccgcacccatgcagacacatggaatattcaaaaggattcttttaccgaagagcaactcgaggttagttttcttttaattcaacatctaactgtaattagtttgttcaaagtttttcttaacctttttttatatggtttgttgcaggttctcgccgatacatcttcatcgtcgtcgtatttcgcttgatttttacattgtatttgtttgtagtgagagaatagaaagtttattataaaacattgattgagattgatagaaagaaataatgtattggaattattcttatgatcagagtttataaaaatgagctttatttacactttccatcattattatttgctaccattagaaatttattttcctaggaaaaggatttctctccctttttctttatttgtttgttaaaaactaaactattggatgcattaagtcatcagaaggtaaatcccataagacactgtctgtgttaaataaaatggcatcatttcttatttctttccctgtcctcgagtcgtctccattttcttcgagtttgtcaggtaagcggctttgcctatctccaaccatgcacgtgcttcccgtacagatactctggttccatggcgatccatctctttcattgctaaaagaagatggttcgtactgaaacccagagtaagggaacgcactactacaattgcctgaaaaactcgagaaagttggtccagttgttgctgagtcccaaagcttgttcgggggcaacatatcgggttcttggatggatcttgagagaccaaatttgatcttttcaatggcttcgtcgtcttgatgctcttcttgcttactattcatgtaggtggttgttgcattccctatcgaagcatttgattgttgcagttgaaaatcgattctcctcttagtaaggaggtggagcatttcatctttgaagcaaccgagcgctgcttctgcaagatgagccacttgtgggggttccaatgttgtggctatctctgccatgagatgggaaaatggtttgtgagtgactggatctattcccataccagaaagcttctttttcagctttgtgttccaatgatttttcacatcattgtctgttcgcccgggcagttgggctgcaattattgaccatctgtaatatggtcaatttgggatgagttaagctatgaggtgaaaatgtatgatatgatatggtcacccaattgcaaggtgattgtacctgttgccaacaatggagtgaagcttgacaatggtttgctcttctgcatcggagaactgaccgtgctttagatccggtcggaggtagttggtccaccgcagcctgcaactcttcccacatctttgtagacctttattaaaagaacacaaagattagtatgtataagaaattaagaagcaaaaacaagaactagggaggaaaaaaacgagcacaaaccggcattcttaggtatgagacgccaattgcgagtaccatgttgagcaatgtaagaagatagcttgttatcttcttcaggagtccattgtcccctcttcacattctccttctcacaacaaggaatcctacccatcttttctaaactaaaatgacgaataagtagaacagaatagaagagataaaacaaaatcgaaaaagggtttttaagtttgtatcttaaagctttaaaacaataaaaaaaaaaccaaaaaaagaaaaactaagtgttgttttgaggtagttttagtttcttttttctcttgaataatgggtgtgatgagataaaaaggatttgtagaaaccaatatttataaaaggagtagtgagtgtagcaatactttgtttgtataaagactgcatgagaaaattaaaaagaaaaaagggttaaaattacaaagtgaaagcatcaaaggtgcatgattttattaaagaattcaacgctatagagcgtgtgatagataagctggtagctcacccacaagatgcttggtcaactctctttctctcttctttttgacctatcatatatggcatttccatggttgggtggctttcctcttttttctcacacaaaaacaaccttaatcaccccgaaaatgctaaacatccccgagcaagctcacgtggcatcttttgatttgttgcttcaatagccaatcgagctgcttgcccggggacaagtgatagtttagttctcatgtattggcatata

SEQ ID NO: 16813 - DNA, 3587 bp, Cannabis sativa
attttctatatgcaggcgaacatttcattttcatcatgatcaattcaaattaataaagtattattaattagttggaaataattctagtgatttataattatatcttgttttagtggtaataaggtctcctaaattaaatattcaataaaacaaaaaaaaaaggaaaaaaatgcttgcttagtctacctatattactatgtattcattagtattaaaagaatattatattattaatttgggtttataaaattaattagttattatgagtcattatttagaactcgattggggattgatatgcatttatagaactgcagctgcttggagtatcagaacaaaaaaagcttattaagaggtgaggtgggtcacattaatatgggacagtggcatatagtctccatgatttaattcaggagattcttcttttcaatgaaataattaaataaataaatatatgataaaataatcgtaattcagaaacagtgaaaatgattagcagggcaagaatttttttaataaaattattattattatcattggaaaaaaggtaataaactggtctcttgcatttggaattgagcttttggataatgacaagtattataacatacatgcatatgcatataaagatgcacaaacagccagctaattctcaaatattcctagctagtttagatatagtaaattgtattttattcaactacctataagccatttttatatcattaaacttggaattgaaaaattaaaacctcttggtattattaggtatagataagatttcaggtgaggtgtagctttcctagatgtgaatattttctacttcaatttacttaataatagactcctcatcgactatatatagatttattgatttttcaagtttctagccaaattaattttgaaatagttacttgtataagtaatattgctatacagattaagttgatgtatctgtgagagagaaggaaaaaaatattaataatatgttactgaaaaagtaatatattcttaatactggcgagcactaaaggccaatggggcatataatttttgctacttacacttagttgacaacactattttgcttacgtttcaatcaaaggaatatcatcaactcctaatatttatccttattcatcaatgagtttttttttttttcaccaaaatctttttaactgtcgtgttactagtatttaactttcaaactcaaattttagtggtaaaatcctctaaattactgaactagtggtaagtttaaggtgtcattcaattaactgtcattatgggttgtttatgtgtacgctcttctacacatgacatgtttatattggtagacctaatattattatttttaaaattcattttaaaattaaataaataaaaaataaaaatatgattaattttgaaataatttttaaatttttaaaataataatattaagtgtaccaatataaatttgacacatatacaaaagtgtatacatatgtactttatattagaaattaacggcaaaaaatagatggcactttaaatttacaagtagttcagcagtttggagggttttagcatcaaaatttgaacttgaattaagtgcaagtgcagtaatagttaagaagatttagcagcaaaaaactttcatcaattaataaggtataaggatcacgcggttccaattaatatttatatgtataaaatataaattagaaatctatatttgttgtttgaaaaataaactcatcatcatcattagcaacactatatatacttaatagcagttagtgataataataaataaattgattaattactcgtgagattcgagactaatcaagctagtgcctgcagatggtatatatgaacatatatttatatatcttttttaataattaatagtaatgtttatttattactctcttcgtgagaaaaaaataataataatgataaaagtagttgcccaatactaatgatcagaatcttgattagcatttgtttataataattattaaaaagtcaaaaacatttcagtttttctaagatttgatggtaaaaggttgatcctccacttcattttaatttgttttccataattgttttatcattgcaaaacgtgccttaactatataggttttcacaatttttttgagaaatttccactattattataaatcaaaggtggtttacaataatagagaaaataagatgtggtatatttctctcatctaataaacatcttcatccaactctagagagtactttgctaagccgtgggcagcttgattagcatgcctacgaacatgagtgacagtaactctaaggaaaaatgataaaagacaacaaatatcatcacttagatttgaaaaataagataagtctgtatgtaaagagattaagcagaagacactcttaaagcatcaatttcaacgtgtgctatcgagatttgtcgttgattagcctaatcaagactatgaaagaatgactttgcttccatttcatcgcttctaaaatagtcttggactggtttggataatgcagcaacaacttcctctttgtaatttcgaatcactgctccaatttccaataccttatctttagtgttggcagctgcatctacatttattttaagacaattgaaatctggcggcttccacagtatcccattcattggcctcatgttgtaaccagtatcatcatgttgtggtgagccttgttcgattaacacaggtgggtgatcttgctattgcaacacatatcgtgataggtgctgctggtgcaatgttgcaggggctgacgtgccttggtagtgtagtgagccttattcaattgacacagcatatcgtgggtgatttgctggtgcatcacatgtcgtgatggttgctgttggtgcaatgttacaggggcttacgtgcattgctggtgtgacaaatgaggatatttatccaaataacttatagcttgttttgcaagagcagaggcaacacgttttgttccaccatgaagccctttatttctatcattccaagtgctccacataaggcaaattcggagttcaacatcaaccttatccatagttgttgcgagatgaattaaaaaatcttcgtcgaacataccatgagcacaataaaaatcaatggaaaagtgcatttgcttccaaactgatttggcatgcttacatgtgaataatgcatgaccaattgactcccaagcgctattacaccttgggcaagttgccaaatcaataacttttcttttatgcaaggtagtggctacgggcaatgcttgttgaatgaccctccaagcaaatattttaaccttttggtggtaactgtaaagcccaaaaaaacttccaccaacttttgtagttgtcagatgttgattcatcgttaacttctgagatagaatttgctaggtagaatccagacttaactgagtagatcctagtagtgttatgatgccatttaagtcgatcttgagattggtaaaagcttaatggaattgggagaatcctatctatgtcaatttgagcaaaatgctcttgtagaagaggtaaattccattccatagtattgcatatgaaggtagaaact

SEQ ID NO: 16814 - DNA, 10629 bp, Cannabis sativa
  modified_base (10578)..(10586): a, c, t, g, unknown or other
tacatataaaaagaggtatttttcaactaaatataaaaatagaggtaaatttgattaattgattaataaaagtgatatttttcaacttagcccttttagaaaatacaatgtccattttatcatttaacaaaacagaaggtccaattgataaaagttttgggaatcaatttatcaaaaataaaagtttagatataaatttatcaaaacgtatataatttgaagactaatttatcaaaatataaaatttaaagattaacttgccaaaatttatataatttaagataagcctaatattaataataaaaaagagatgcatattttgtttgtgataattcagttaccaatttagtcatgagttatgtaacattcttacattttgaatattaagttttagagcaataaccatgaccttttttttttgtttccaaacctaaagaatgataactttgaccatattgattttgtattttggttagaaaacgtgtgtagtctagtctgtctaacttcccctaatatatatattttttttgaagagaaaataaaagtaattcaacatctcttacaaaataaaataaataatagtctttgtaatttccgtcctctcttctctctttcttttatctaaattaaattaattaatttcttattttacttctagaaaattagagaggcggtgtccggccgcctaaaagtcctaaccttgaatatagaaatgtatatatatttgttctcaaaagaaaaagaaaaagaaaaagaaaatataatttaatttaatggaaatagaataggggtagagagagaaatttagagagagagcttccaaagtcaaaacaatcaaatccatacccgttttccataacctcaaaacctctctcattcccaaatcccatcttcgtcttcgtcttcatttgggtctggaggtgttgttttgtgttgtggttgggtttcagatcgattaattacaaatatctgccttctctcatgagttccaatacggcaacttccagctcagcggccgctggatcggccgattcatctgccacccgaagaaattctaagcgacccaaatgtaattattcctctttcatttctatatatatttattgttattgatattttgacgagtaccgatatttgatttcgatttgtattcggatatgaaattcttgttttagaagggctctggggttttcttgtgaagtgaaaaaagattagcgtttatgaatttgatggtcaaattggttataatttattgtttaatttaaattatggatatgggatgttgtttagatttaagtttctacttttaatgttttaatgttagggttaaattgatatataagactgcatatttgagtcaggaagaaattaataactgtttatcacatgagataatcgatcaaagtgactcctgtaacaatttttgaaaccaggctctctttcttaaccatacaatatttgggtaccagaaaactctctatatatatatatatttttttcttaaccatacaatatttgggtaccagaaaactatatatatattttttttttggaaaagagacagaggtcacttgtcttagactgacccacccaagattattgtagagcctcacttatggctgaggaaaactgtggtaaccgtggtaccagaaaacaatatcaattgctatgttattactcagaagaaactagaacatcagacaataatgtggggggaaatcacatacctgcccctttgagttacccctcttcggttgtcccgtaacaacttttggacctgaaacctctgcactctgtgatttctgtgttgtttgtttggaactagactttgcagcctgataggttgtaagttgaggattaggaggtttgtttaagtttgatgtggaattatatggattgacaactttcaactcgggcgtgcctaagcttttgagtttaattttaaaatgtctattggaagagcgaaagaacatcatggttgctgcagattgtcattttgatattgacacgttattccattggttgaatgcatgctgtttaatttatttagtatctttgatcttacaatatcaaagaaaagaatttttctaaacagacatatggaagtcacacaacttttgttttgataaaaagatgatagggttagctatcatctgtattatagcttagacgctagcaaaaagtctaaatctaaaacattgtactagagtatgaattattttattattgttaccgactaacttctataaagcttttcgttataattttttttcttgaatgattctacttgaaacaatgtcagattcaagatttactcaacaagaacttccagcatgcaagcccattcttactccaagatgggtaagaaatacttttgttgttgctctagatatatgtgtacatctatgatgtttctagttgctttctacaatccagaggaattgacttatgtgtgtataattatgttgctgcaggtgatttctgcctttatgcttgttagcattgtattcatccccattggagttgcgtcactctatgcatcacgcgatgtatatttactaatcctcaactcttcatcctttcataaaattacattttagaatatctagttgcatagttgttaatcaggaaagacctttctggcaggtggttgaaattgttgaccgatatgaaactgagtgcatacctgagccttttagaaagagtaaagttgaattcattcagggccctggaactaaattgtgcaacagaacaataacggtaggactattcttttcttattgtctttttataccactgcaacaatgtaaatgttagtgcaccatcagaagaggtttcatatgtgcactgagattttattgctaacatataaataatgaagtctagttgctaaaagtgtatgatgttatcctttttttcttctttgaaggttccgaagcgtatgaagaaacctatatatatctattatcaacttgacaatttctatcagaatcaccgcaggtataatacttctttctattttattcctaaatttttcctttttttatatgattgtgctgaccttgagagctatttgagtactcatgcatgtagaatttaagagtgaattctcggcctgctatgaataaccgctactttcattcccacctgccatgtgggttctaagatcttagaatgtaaatagagtttaactgtgcaagaaaatgaaaggaaatcaaacaggtctatcatagagcaaaattttgattctagctttattgtgagcattttgtttgtgctgggtaggtgcataatttgacctaatcatttgtgtgtgtgtgtgtttttttttaactgaaaggaacgaagcatgagtttgctctcttgttcttgaatccattgtatggaatgatgaatctattccttctctttgcaagtaaaaataaacagattttttatggagtatagaagcaaatattacaatgcaatgatacaaatgagtgaactacaggtgtaggacatgaatataggtaggtgtaatgtgctgtgtcgcgactcacaagggtccatgtgacccaaagatggtctcttagtgtcagcattttgtatttgacttcataatggtatcaatctggattttaaaacatggctctgttttctttacaaaaattgtcccgttcgtcgaaatgtctaaattaacagattgattaatatggaaattattttatttttcccctttcatctataatgattgaaaaggctcaaataaattcttaaaatgttaaaaagagaagaacaaaattctcttatgtcatcgctctatcttttgagtgtcagtgggattggagctaatttgccaccagaatgctgctgacaaatctaacattatttttcttccatccactgcatttccatcttgatggcttattgtttcagtagttccattggcccaagttgtgactccctttatatagaggttcaaagaacttgaatataaatctcagttatattaccaattataatattttctatttacaatttaggtatgtcaagagccgaagtgataaacagctgagagataatagtgcgactgatgtaagctcttgtaagcctgaagatattgcaaatggtcagcagattgtgccttgcggtctaattgcttggagtttgtttaacgatacctatagtttttcccgtggaaaccagcagttggcagtgaacaaaaagggtatctcgtggaagagtgatagggaacacaagtttggtaaagatgtctttccaaagaactttcagaatggaactattaaaggtggcaaaactcttaatgatacgataccggtaagcattttaccacgttttagaaataaaatattcccttctctttttcagtgctgtccatggggtaagacgtgaaacaaaagaagtaattttgtgtatcattaaataacaattccatttttatataagtgcttttttttcctcgtctattatttaaaagttgaattataaaacttgtatgaatataaaaaatatacaagtaaatcatttttgatgaaccaatttttttacaaatgtcatgtttacttgagaaatgaagtaatttgttagtgtggtttctcctttctctgcatgtcgtcgtttctctgtttctctttactgattgtggtcggataatctggtcaaaacatattttattctacagttgagtgagcaagaagaccttattgtttggatgcgaactgctgctctgccaaccttcagaaaactgtatgggagaatagagacagatctggaggctaatgaagtcattcaggtggtactggaaaacaactacaatacttacagttttgatggaaagaagaagcttgtgctttccactactagttggcttggtggcaaaaatgacttcatgggtattgcatacctcactgttggtgggctgtgcttctttttggctatggctttcaccattgtatatcttattaaaccaaggtaaatccattgtttgttcatgagtaaatagtaagaaatgaatactctggttaatcttattgatttgttggttaattgttctgtgcagacaactaggggatccttcgtatttatcatggaacagaaatccaggaggacactaaggttgtggaaccacctaacatgtttggcttggcgtggctcaaacaaaacatggtattttatatgtaatatgtaaagtgacccttgatgaatatgcaatcaagaatcattttgctctctctgacgctggaattgattatttttaattttttttttctcttgttttgtatgaaatgataatgacagacattaaaagcttccatgtataaatccagaaatagtattaattaattacttccaatgtactgtgttcaagcagcaagcagtgatgatgaacatttttatatattatagtaaaagaagggtgttagaaaaggtaagtgccttccgggtaagctgggtcaataggatggtcacacatgcataatatggatgtgttgtatataaaaaagtgtaacaaatgcatatggatttgataaaaaaaaattgtagtagacatattatattcagttaatatatgcattccttacatcttatacattttataacggtgtatttaattacaaaattattcccttcaaaattgttggtctatttgagtttagcctttggttgaacataccgaaattgtttttcatttgaatggaccataagatattgaatttgttgtgtataagtttgttaacaaaatatgaaagcatagtaaattagcaaaagtcaatgttttctgtatgcgagaagctttaaagaaactggtttgaaattgattcaaaataaagaaaaacaatgttacctaaagaatctttaatctttaaacaatgttaccactttgtgtcatggcccaggacgaacaaatagttatcataagaagactacttctctttgtcaatttcactgttaagcaatttaaatttctatacatggaagtggttctttgtagaacttgggttcagaaccaattggttatgtggtgaaaatggataacagcataaggttaccagtaccacttttgacattgcattataaaactatacatatttttagtgagaattattattatgtataattacgcaagacactattttgaaaaaattacatttttacgtttgaatattttttattttatatttttacggtttttataaaacaatacgaaaattacataaaaataacatacataaaaataacatgaaaataatatctaaataacatcagaacaataataaaaaatcaacaacaaatgaacaagagtataacataaaaaaattgtattttttgtaaataaaatcacaaaaatcgtaaaactatttaaaatttcgtgaaattatatttttataaatttttttattatatttgtgtatttgtgaaataattcctaaaataaacttaaaaccctatattttcgataacagccattagaacactagagtcgagtgtttctgtaatacatacaattgcagaggaaagatagatcatagataaaggaagaggagcttacttaattcaagtagtgttggtaaaagaggcatcttcaccaccaactataccagccgccattgctttccattcactcctaaggtgttagtgttaggtacctctcaaaaactacttttccttttctttaacatattgcgatatgagattttgcaaagatattatttcattaaacccatatgtgttattgttgttgtttttaattattagatatatatatatatatataaatattatatacggctctgatttttgtatcaaccatgaactcttggtgtttgatgaaaagccgaaatgggtgtttatatatatatttggatgagcaataattgagagtagacctctccgcattcattttacaattttttttgtttccttaatgattatttgtaaacgtggagtaaggtctgctagtttatgtggttatgaactaaattcaactggcaagtcaattgctcattttggaatatgggaatttcagtgatgtgaaatgtgttgaataaattcaagcatttttggttaacttttttttttgggggtttgaaagtatgtctattttcctagcatagtcatttgtgctgaccctgttgtacaatgaaatgagatggtgttacttgagatttgtgtgagaaacagtaattgtttagaaaccttttggaccttgatttgtttaattggattaccttctctctttgtcttttttttcttctcatatttgaatcataaaaatcagaaaattctatcgtaaaattatagttgctttcttcttcttaaagactttaggcccgtttggctaagcttaaagagtcatcttttttgagatgctatttttaaattagaatagctttaattgatattcaaacacttgaaaaaaaacttttcatctaaaaaattttcatgtaataattataagagaaaaaataagcagtggcattacttatcttaagcttttagctataagcaaaataagaagctatccaaatgggaccataatactttagtttagattattagagctaagttcaggaaatagtctgcaggctaatatattctgctttggcattttattgtgaaactgcctcagagatcttacttaaggaacttcagactttttgactgattttagtttgtagtgaagtaagtgattgtgtgtttgattcttcagtaaaaagaagtttcaacaatgaacaagggtaagatttttaagctagcaaaggggttccgtggacgggccaagaattgcataagaatagcaagggagagggtggaaaaggcattgcagtattcctacagagatcgtcggaacaagaagcgagacatgcgttccctctggatccagcggataaatgctggcactcgccaacatggggtacactctctatttcttgtttcatagatttgtaactttgaattagagttttgtattttgttctcagtctatacatgtcctaagagattgcggatgattcagggtttcctactgtgtaagtttggtagtattgatctcagaatgaatcctgctctaattcttaattctgtattcaatttctttttagctaaactataccaataatttagttaatgcactcattcagctcaataaacttgtatcttataaataaaattaaaaatgtattattggaatttcagaggtgagatacttctattctatggaagatgaagagaataaactattttgtacaatttctggatgagtaaattacctttgtttttgtggctaaaaaagcttgtttgcattttactctggagatttatggtggaatcagcaaggcagagtgagtttttattttagatagattttcctttagttgaaaacgttgtagccattgttgacgaaccaaaactagagagaaaaattggtttgatagttgaagaggaaatgtgataggattgtatgtatcttgtcacaccaaaacacacaagaactactgaaattcctcattattattcagtcacaaggctgggttagaccaacactttaaacattacaaaggttgagaggtatccctcttccaaatattgccaaaattttctagagtaaatctcactctctctatgtagaatatcttccaacttaacagccccacaaaattctaacataagtcattcttattggaggcttatcaaaatgcttatctaatttaatgtttttctgaacttgtgttggctctgcaaagtttattgggaacgcatttggcgtttggcatttttctttgcagtttttgtgtactttggtgagctgaatatttgctcaaattggctgttgatacatatttaagacaggaaatagcagcttcagtctactctcttctctgattcttgttgctgtttgtggcctttcattccttatcaagacatcacaaaatcttgatgttttgtttcaggttaattatggcaacttcatgcatgggcttatgaaagaaaacattcagctgaacagaaaagttctgtctgagttgtctatgcacgaaccatacagttttaaatccctggtcgacatctctcgtactgccttcccaggaaacaagcacattgtttttcctcccaaaaaagaaggcatttcaataaatgtgtaatcgaccaatagagctctcttcatggggaagaacagacagccacaattcttcatgggcagattgtttagggacaaattagcataagaagcaacagacattttagcagtgtctctttcgatatctttctgtttggtagctgatattttggatgtacttttcaactgttgctattagtattagcttagagtttcttcagaacacttgattaacattaagctttcttgttcatattggttttaataactggtgcccagtagatgtgttttgtttactagtatgaagttaatttttttttttttttttttgacttagtgattagaattattgatatagattttcgcaaacaacacaggaattttgtcgattcaagatagtttatttttttaactgaaagatatgctttgtcaaactatgaattactaaaataagtgaacaatacgagacaaaattgtctctagaaatttaaataatgtcctcatataaacttaatttgattggttttttgttaagaaaattaatttgattttgatgtagttgaagtataatttgacttttagtctaccggtttaattaaaataaggtggagtttagttcattttatggtaatagtggtaatggtaatgaattgtaataggaattgtaatggaattgatattatgatgtttgtttatttttggaacggtaataaggatgttttagtaatgagtttacaatagaatttgactaattcaaattaaattttaattaaacacactaaaatctacaacaattttctaaaatttggaccaattaagtattaatgagtttttagaattttccaataaaatttaattttttatgcttacatttagttaaagaaattttcttaaataaaaaataactaatatttgtaggatatgatttatgatatccttaaaataccccctcatttacagcacccccatttacacaattggatcccacattggacacaatcggacccatcagaccaccattggacccatcggatcatatctgctaccaattttttttttattttttattttttattttttttttatgtttttatacaaaaaaaaaaaaaatagcatcaggtgaccatcggaccccatcggaccagatctgctaccaatattttttttttatttttttttttatgtttttgtacatacaaaagtatcatcaagtgactatcggaccaccatcggactaccaattttttatttttttttatttttttttatgtttttgcactaaaaaaagtatgggaaatttgagaggggtatttttggattttagataaagtggtcatatattttgaatggtgatatgtattagtttaaggataaaatattagctatatgtaagtatagaaaatcaaatttcactaatagataacccaatagtaactgtaagggtgtgtttggaagtaacnnnnnnnnnactaggtagggtaattactagggtagtaattacacagtttagt

SEQ ID NO: 16815 - DNA, 4081 bp, Cannabis sativa
tttgagttgttctgctttgtgttttactggtgttttataaaacacagcatatgacagtatttttgtaaaagttaacccaaatttcagtattttttgtaagttttcagatagttagtctaaatctttttgaaaatttaaactggtgatttgaatgttgaacttgacttattacatgattatttattattaaaaataattaaaaaaaacgatggtgtcgtggcattatatctattccacagtgacatttttttgttttattactgatatttgtttgtgtacactgtactctaagcaggatgtagaagataagatacaatatccattcaagactacaatttcatcctagattttgtttttgttcttggcttgtcatttatttttcatgtattttattactaccaattaaaacttttcatataaatgtaaatttagtgatgtagccatggtgttcttcttaaaaaaaaaatggtagtattgtgaatccaaacactactcactcatagtcacatataatattttttgaatttaaaaagggatttggttgaatctgtggaaaacttgcctcgttatgatcgaatacgtaatccatagaaggagataaactagtggcactcaatggaaaactaatattgagatttgagagtacactgctaaaagtgggtcctcctgtgttttttggctcaaactagtatataacttctgaaattaaaagtggtcctagatatatatatttatagctagaaaacctcagttttaaggagtttgaaacattctataacgatgatgatgatgaagaattgatttctatccactcatgtaccattctaacaaatcttttaagactttttttagtcattggtaataccgaagtcgaatacttttgtgactttaagaatatgaaatgaaagggacttaattgttctcccactcctagacttgtagtacgtactactcatcaccctcctattcctaattcctaatctcaatataaaataatgattcatatataaattgggttggggattatgtgcttcataaagtacaatttacattatataaatgcaattatatcacatctataagaaaatctcttacatcaatttattttatatataaaaattagttacatctaaaagctttgcacgtgtatataactagtaccctcgggtcattggtagaggatataataaattagtttttcagttttttaaggagtgttccttatttatgtttgttggtcaaccactaggcatgctcttaatttggatagatgagaatatctcaaaaattgatctttagtttttcaagattgaatgtcattttgattattatgaatgaagctttcattgtttcaaaagaaaattctcccataaaaaatcatttaatggttgatgtttattttggttgggcagggcactaaaggatgtctaattggatataactaaataccttggataaccaaaaagaaaaaagtatataatgaatgaaaagaaaagtggttggctgtcgttctcctttggttgatgagttttcctaatatgtacttttgtagactgtgtcgtttgtgtgaatatcaaatttaggagatagtttagttgagaagatggggttggcttaccagttttgacttcataatatatactcacaagttataatctgttcttattatatgtaattggtgagaagatatatcaccaagaataatggaaagtgattcatagtaacataatacatattacataactccacatatagcattccataaaaacttgcctaatatattcactatctttcctacttggctacttacgtaccctttacattctttcatcaaaatttccaattttctcaacactatctagaaaagaattagcttgactcattcaacctactcaaactatatatatatatatacatatacaaggcatatagatattgctgagtacgtaataataagtttgtatatatatgtgtgtgttgacaacactagcacgtttatgcatggacaactaaacaaacacaaaaagaattaatgtcaatttgacaattttggttattaagtgttttttacatgatcaatatttttgaaatgacgaatagtagagttgatggaagtataacaaatcaaccatgcatggccggtggccaatcatttatactattaattaattaaataataaacaatcaataacatatattaaaaacaaaaacaaagtgtgaaactatttacagccacacacacacatgatatcatacacccctccctagtcttttggagagtgggctatgcattatcggaattgacatgaaatttaatttaaattaaaccaaatatattggatcatcacatcaaatcatgacttgtggttttcaattactgacatatagattatttataatactagaggtaccaattatcatcgtaaagaagaggggattttccgtgttgaaaatatctcctttacattaatgttaattttttttaatggcactaacattaattaaattaaccgcgcgaaaaagcgggctatattatctagttcaatatacttaaaataatttgggttacgtacataatgtactaattggttaaaccatcggtgtgatacacgttgattttctactttaatgtcaaacttttgacaatatacatataaacttgatagtaacccaaagcctagctagtctttatatagatttatagcagtaatggacattgaagaaaaatatatatagtgacggatatgtaaggtactattcaataaattattggatggtccccttatattagtgaatttgtctcttgaaaatattagcagccagaaattttaaatcacattatggtatgtagtagctagtgcaactatgtaactgtataaataatatattagacaaagtttaatgatctcaaatcataactttatataggtaaatatttttattttaaaattggtaaagaaatcacatttaaatactatttcttatttatattattttttgttatatataattttaaaattagaagcatactattttaatatcatggtatatatatgattctatattaatttttttaaaatattttttattttatagttatgtcgaatattttttttttgattgttaggttgtttgttaattttttgtttgggttttcattaattttggttttattaaaatttgaattgattaaatagttctttacgttatctcatattggtagtgattaatagttaatgagcttaacatctgtgtgtaaaatttgtgtgagcttttctacttaactgaaacctttgatgagtaggctcattccaacttggattctgtagctaagtctctatattatctcattacaattgtatatttttgataatcagatatataaaactgtttctaatttagaaatctaagaaatcgatataaatcaatcaggtatgtatacctaattattatctattattgttatgttctatagtatatacaaattagtatcttgaatttattatttatttttctaatgtggcatccgagcaccaattgtatatgatttatgacctataatttatataacaattgataattatctatagttacatattaatttcgtaataattaaaggttaaattttttgttttaaaatcttaaaactttaggagtttaattcctcatgaaattattttcttttgatatattatttgcataaaatttttaagtattttctagaattttaagtttaaagtttcgaggtttatgtgattatgttatgaaattgattttgggtagtctgattctattgaatataaactaaaattgattttacatatctcattaacaattgtttaacaagtaactcaaccaagggtgattaaactaactaaagctaatcgtaataggctaacacacacctgagaattttttttaataaaagaatatttttgacatttgttgtatattgttaacactataaaaaagaccattaagtcataaattttttgatcaagaaggaagaacttcattaatcaactgaacaaatacagccaccaataaacaaaacagtacccaaacacaaactccttacaag

SEQ ID NO: 16816 - DNA, 5392 bp, Cannabis sativa
aaaaaaaaaaaaaaaacaacagaacgacgtggtttgatacgaggggagagggggtagggtttgctcagttgggacttgggagagtagggaggagtgtttttggctaagaagacagtacattgtttgggaaattacgacactcaatttcaaattcggtcatctgaactgaagagctcaatccaagaattgcaacgcaaccatgacgggtaattgatcaaatgcctattttctaaaaaaaaaaaatttcccaagtacttcaatttcggttgatcaagaaataaaggggtttcctttcaagtatatattttgttgattttacggaaggcgtgaaaatttatgcttatatatctcaatctattgaagaacattttgttttgaagttctaaattttcatctgtatgagttggggttgggattggggatggagttggggttggtgaggggcaaagtgcaattggatttgttactttaatttttaatgttgtgttgggatatttatggatctaggttgataaaaaaaagagtttgttttgtaattataatatttgaaattcgcttcttaattaatcttttgcgtggttatattcaatcattctagaacatatgtgtatgatatcaattggtgtattaccgtgtggcgtgagttattttgtttatatagtcgtttggactatgatgacctctgagaaatagttgtccatgctcaattttcacctaagaaaaccagttgaattccttgagcaccaaacccagttctgacccacatggagcaaacacagctgaatattggatagagtgctgaatatttatcagtgagcttgataccaatgtgctaaacttaaaatatatttaaaattctaattcatcttttaaggttttgctcaaataagtatttcatttagagattggtatacaattgagtttagatgtaacccttcattgtttgttcttaaaattttggacgctcttacatttagttgctgtgaactatatatctacagactatgcacaggagcaagagatggaaatcgaagcattagaagcaattcttatggatgagttcaaaggtttaacgtttacatattacttcatatatataagattgcaatttcttgccattttcttcttcccagtactgagttgtctctgctcacttattttttgtttgatttttcatgctagaaattcactctggagagagtggattaaatacttccaaccggtgcttccaaataaaagtggttccacaggtatgtaatcctcactatgttttttttatagttgtactaacactgttattgggactcatcacaatttttggaggaagtgattagaatgattctatcaaattttttgtaatttgtgatactcttctcaattatacttgtttatttgtgtttttttcaactatgaactcccatttaattgtggccctttcctaatatgacttaaaacgacatgaaaatgagtattcttatatgtaaatatttctttgctctatttcaacaggatgatgaagcagattttgaatcttctccaggttattaacttacaaaattaaactagctcttttcttctaattgttgaatcattacactttctttaaccttgtggttttgaaatattctgttgcagttcagctaggtttgattttttcgcacacagaaaaatatcctgacgaacctccacttttaaatcttacaaggtacattctgactgctcaagtcatgcttattctaatatgataaattttgtaattcagagggggtaagcctaaacgatcaggcctgtggtatgctcccacaaggtctgagattgagtggtacctacacagagattatagttcctctctcctcaaatgttgtagggtttggcaaatagccctgattgaaaaataataattaattttgtaagagtacttttaactttgttatctatcatatagatagtatatcaattgaaagttgcttaagggggagaacccatgctttctaaaaaaatatacaaaagtttcagctaaatatacacaacacacagtaaatagggaaaatgttcacattgttaaagaagtggaggaacaatggctcactggtttcgacttagatctttactctttttaggaatgttttattttgcagataaatcagttctcccagtcttatgccgtttagtttaatcatttccgagaacatattttggtttctgcaataatagttatttacttttctccatccagtttacgaggaattcgacctgacgatcttagaatattgaaagaaaagcttcaacaagaggtttattttgcactgccccctgttcttaaagcatttttcttataaaatttgtcttgtccagttaatgctagtaatgattcctactctttgtaagtgtgaacaactgtaagacatgatgttgggtccgttcatataaggctgacttaatgtcatactaaattctacaggcaactgaaaatcttggtatggccatgatgtatacccttgtctcatcagctaaggaatggctctctgagcgatttgctcaagaaactgacattgataatgccgaagcagaagaagcaactaaagacgatgtatgttctttattggcattttgatatcttttattcttaaaggctataaatttcagtttataattgtgtgtgaagaattgagtttcatctctaagctaacctttttgatgcaatgtactaattgattgattgcggaaagggaaagaaaaagcgttgtcacttgactctgtgtgtttgctttcatgattaacatcattacttgaatcaaaatttgaggtttaaaagccaaaatatgttttctaaaagcatgccaagcatttgcaagctgcttgtctccatgtaaattaaacttgacatgttgcggaattggtacttattttctttcactatttgtaactttcattgggagtttgtgcttattgtacgtggaagtgttttatattacattaaggtgtttcatttgttatgtttttttagttaaaagaggagttactttgctcatttctttatgtttcctttcttattttcaggtaatcatccctcatggtgaaccagtgacagttgaaacattcctagcttggagagagaggtttgaagcggagttagcactcgaacgagctaagtaagtaaattatacaatttctttataaggtttagtacacaaactcaagtacgagtatgattgtaatgcatacttccagttggaaaggttgttatccactcttttcttgtttaaagtcacactattgatgcttcccaaccctacttattagcttattcaaaaagcagataactctgtacaatgttgtgttcagccttcaccagcagatgtgttctaactttcaggctaatgcccgaggctgcgcttgcagcacctaaggataagaagctctcaggaagacaatggtttgaaagtggaagagtggtacttttttatccttgatttgttccttgacgacagtgaaatttttgcaggaaacaattcaaaaatcaatatgtacttggaaacaataatatatacatgtacatagaattggcctctaatgtccaataatttagttagtttcctggtatgtatatgatctctttaatgaatgagcaatactaaacgtgtatcttttttgcagaaaggtacagttacagccactgaagtttctgacgaagaagatcttgaagatatcgactttgatgatgatgaagattttgaaggtgattctctctatatgataatttttttgttctccttttgtataatataatagtataatcagatcaatcatcttggttacattgaggtttatactcatttatcatcaaaaattatctaatgttgaagccatatttctctacttgttgtgatgaccagacgacgaagaagatatgcttgagcactacttggctgagaaatcggactcatcgacacattcatccaagagagccaactaaaagataaagcttgcttgtggagcgttatggactggcttgaaaaagatgtgtaccccttttcttggtatcatctttggttgtagtcatggtgatacatgtgtcaaaggctaaaagtgtaattgctgaatggggttaaggaaagcatgctgtaatatggataagctattaaacgattaaagtctttattttgcatgaggagaaatatacgaagagttttgtcatcagacttcagacatgtatatgtatctgccttccaagctttatactttttgaaagatgtttcatttttgtgtttataaatcagaaatcagaaattttatcatggtcctaaactattcaaaatgaagttcgttaatcattatacgactgtttttactttctacaacactaaataatgttaacagagggtaaataaattacaacaaatgactaattttatttcaaatattttaagcagtctgacaagaatgcggtatgcgcatttacatctcaactgtactccatgaattttggagaacttacaatcttttataggctcactaaagtttacaactacacaattttcttgcattatgcgtatatttcagttctcttacccacaagctaaagctacccctttccacgcatagctattatgcttgcatgtgtgtgttacagagggatttcctataacttccattataccattacctggtctgaacagacagacacatagatccccaaaccttttaaacacaattcccgcaatgttccgcagctggttgcttgcatcaatatctctcagttaacagaagcaatcttttgaagactaatcgggtcctctactacatttgcttgagctttttctatacacatccttgatcagtcatggcttgagcaacagttagaaaagccgcaatgacagctccgtgagccaatgccctggtgaagttgttggtgagttaagaggaaaatagagcaatccaaagtgtgtatagaatgaattattggcttaatcacttgaggctagctcaagtggccatatataaggtattggggggtgtgtggggagtcatgggatcgaatctcaggtgtgtaacccaaaaatgtaatataaagacgcttctatcaaaaaaaaaaaatgaagtattggcttggctgtgtgctctttatgcaaagtgcgaggcgaataggagagaaaaatacttactcgggactctctttctgatatccaaaatcggttgctgctttgagtgctctctggtaagtctgtttcattgcttcctggagatcgccaaacaaaatggaatcagaaatcataatacaaataaaccagttcaagttccaatctgacataaacactccaaggaggatttttcgtgtataatcatgtttatttcaaaagctccacagcttgtcaatagaattttagagtca

SEQ ID NO: 16817 - DNA, 9816 bp, Cannabis sativa
  modified_base (95)..(107): a, c, t, g, unknown or other
  modified_base (3219)..(3229): a, c, t, g, unknown or other
  modified_base (3682)..(3685): a, c, t, g, unknown or other
  modified_base (8072)..(8073): a, c, t, g, unknown or other
caactatgtagtcccatacctacagagcctcagaatcatcccacttgacattccctaagcggtgtgggactgcacagcttacccggtatttcccnnnnnnnnnnnnnggactactgactgtcacataaaatgagtggcaaaaattagcctatggttatgcaccttccattactaatttgctaacttaggcttcctaaaattaacaatggatatgatccattcctttaactaagaaaggacaatgttatttctttaacagtggcgctatggcctagtcatgtagattcgcatcccttgcggctggaaaaactatactggcggatgggtgagactttgactcacagaattgaggaagatcgtggttcgcgggagtctatctcttggccagcagttagggagcctcctttcatagaagctttccccacaaggttaattcccatatctttccgggatactcaatgaacttttgggcaacctagtgacttcttgaccttctttgattaaaatccacgtgtcatgcttacaacaatgcagataacaaaaaccatgattcgaatgtcccaatggttcctagaatgcatgttggagtacttggtctagattccacatgaacgtgggtgtttacttgcctttgcactcatggttcatatcaattatagattacttttgagtttatccttaccaaataaatccaaatggctacagaatcttgtcaacctttttcatcttttaccgcctaaggaaatggcatgtcccaactccccatgaaattaatttcctttgtgacttgaaaagaattcttactcaaaaagagaaaggattttaccacttccatcaattcagtccatacatagagaatgtgaccaagagcaactacgacgtttatcatcaagaatatttttataccccagtctttcaatcaagacacattacctttgagaaggcaggatgttttaagagactcgcttctttgatgactattggacgatgcctcttgaacatgacaaagaggatggtaaaagtgatgtaatttactctagaacaaatggcagaagatgagagttctattcgaaatgacctagaatattcagcaataatatttatgttcttagattaatgtgatggagaagttaattctgttaacaatgtgccagagaatgttggagaatcagtaggtcgttaatactccatatgtagtaattgtaccctactatcttgttttcatgtcccttctattgtactaaccacttcccttttcttctttgcagacaacataagttttctagtagccatggaaacttgttggaagagaaagattattgcaccaaagagactgaacctccagctagggaggttgtacatggtatttgttgacctcaaattcggtcaactgacaacagagtcgtatttatgattgaaatcaccacttgtacacaacaagaataggtaaactaaaaggacacaatatttttatagaggtttgccccccttagttagtaggtaattgcctactccccttttagttgtattgataatagagataataccaattagatcacaagtgttatggattccatagtgatactataatgtcccaataagcctaatggtgagtaattaatatttataattatattattggttaatcaagtaataagtgaaattatggtcctactaatatatttcaacataaattttaaatttgttataagtgagtaaataagcgtaatttataaattacggagatttatatagcatgtgtgtatgtaatatgagatatatgtggaacaaaaatattttcaggtttggggaccttggagactcgatagtggaccaaaaatttcataacatgtttaattgatagaactagtaggaatattttgataagttaataatataggtattggggtaattagaagtatgtgatgtttgacttagcgcactaaaaatatagatttcttagtagctaagaaataataagataattatgaataataataaagtatttcttaatattattattattaatattaatatttatcaatatattataagtttataatcagaaaacaaaacaaaagtgaaaccctcatcttctttcgacgaaaaccctctcctcctatatttattttttctaatcattaaccggaaacctaaaattctaagctctgttattagtggaagaacaatccttgatgagaggaaagcttcaggtaaggattaattccgatttaagtttaaaacaattagttttatataggtgtttcgtgattagaatagttatgaaatctctgaccttataggattattctcgggtagtcataggaataattttgattttttttctgaaattgaggtaattttgggttgaaaattgagtttggaactttttataactcaagtacgaacactagtggtgtttgacaattaagggctccattttagattttattacgtaagtatggtagtgtgtatggtacatatgtgccctatgaacttcaaaaatcacattttctgcccctgaacacctggtcaaccggttctgaccaactggtttttgtcataacttttcacttggatgtcttcttttgacgttctttatcctatttcgaagcttggaacgagatctaccatatggtatatattttagagtcaagatataagttttattttagtgtatttgagctacgaggtttggtaggaaaccctaggttggcctttacaactgttaagcaaagttttaggataaacacttattggtatatcattgttatgtcatagggcccaggatcatcgatcgtactccaagcaggtcagcccacataccttaattgaaacttcaggtaagaaaaatctaatgtatcacatggcatgacatgttttaaaatcatcgattgtgtgattaggcaatgataatgtgatgatacaatggacatattatataggctcacctgattaggtgatgtaatatacctagcgatgtaccgtccataggtacgggaggcagtaacatatgatgagtactaagcgtaggtacgggctcacttgattaggtgatgtgatatacctacagacgtattgggcgtaggtacgagcattagtgacatattatgagtaccgagtgtagttaagggctcacctgattaggtgatgcgatatacctagcaacgttaggcgtaggtacgggcgtttgtgacatatgatgagtaccgagcgtannnnnnnnnnnacctgattaggtgatgcaatattcttggggatgtatcgagcgtaggtactagcgtcaatgatatgaaaatgattggttatggcaaagattgaaaccattgtcgactttcttcttggcgatgtatctgccataggtatgagcgtcagtgacatatgataagtatagagagtaagtactgggtcgtctgattagacgatgcaatatattggtgccaggttgtggcacgggctcacctgattaggtgggtgcaatgatattatatatgatattgcattatgacatgggcttgcctgatttaaaaaccaaaatatatgagcgtatctatttctatgcatatggctggttatattgtctactgtcaaatgttatgacaatgatattatatatgatactgcattatgacacgggcttgcctgattaggtaatgaaaatatatgagcatatctatttctnnnnatatgactggttatattatctactatcaaattttatggcaatgctattatatatgatactacattatgacacgagattgcctgattaggcaatgaaaatatatgagcatatctatttctatgcatatggctggttatattatctattgttgaatgttatggtttaatcattttatgataatgaaaggtataattaattatttaatgtacccatctttattacttttcttattgagtttatgtaactcacgggtgcttagtggtgtaggtaaggacaagggaaagttagagcatccatgagaagacaatctcctccaataatgtacatattgacctcaccgccctgcgttccaggttgctatgagttgttttgggctgtatctatcatgtgttttagttttatgtttttaaggtgtcatcttatatagttcctttgtaaaaattttatgataggaatcccaagaaacaccttttactgcccttatgatgtcaatttttaatgatttattttagtcaagttttttatattatcacgttttttaataattgattatgctactagtattaaactagtttaaaaaaaatcacacatgtggagtccctatagattagggcgttatagctttttatcaaagcagtcatggttttaaaggtcttgaagactagtcaaatatgtacatttgctgcgaagacaggtcgactcatggtatagcaagtgtttatgttaattgctatcgccttacttgcttagataattatagtgtatgatggggagaagtagtgtaatgataatctatactaaaaatatgtgtatgatatatgcatattaatattgatatctatctaagttttacatgtttgtaaaatgtggattaaatgtgtgataagttatacagtaaggttaattaaattgcgtgattattgagctaattgggctcggggcacacagtaaggaaaaagaatcctttattgctgtaatattagaaacatgtaagtttcgctatgcaggatatgattagaaaacatgggaaaatagagccaaaaagggaaagaacaacatgctcatcttgtgtctgttcttgtactaccgacacttcctgttgtaccactgggtgtgatggagatatatgaagccaacttacaagcaaatcagggagcaaaaactaaatgaaccaccaattacaggacataactaaaaggttcaagggtggtcaggatagcggtcaacatgagaattagaaatggtgaccttatcgtaagtgttcaagatgcaaaaagggaaccatttgggctaatgtaaagccaaaccttgttttatgtgggatagtgggtcatttggtaagagcctgcccacaattgagaaaggttaatgttaaaggagaagagtgtacatgtcttgtccaagtaccagttatgattctagggggctcggatattagtcctttgactgactcaagttctaattttatgggaaattttatattttccattttcctatatattggtattaaacattgtatactcaatggggggacatcgaaagatctgaatggactgtgtgggtatgttatttagtggtagttcatctgacatggtagataaattagagaaatggcaatatgagataaatttgctgatattcccaagtggaatataggacatgtgtagttaatggaggtatccatcttattgatttggaaaacgaaatcttttgattaaaagtgatccagtgttagtttaagtggaacaatttatgagtattgtctgaaaccctaagtgaattaaaagtgacaattgtgtgggtggatatattctctatcaggggtcatgagtcaagttgtgacaatcagagccccgtgatttgcgaagggaagaccaggagctatgcaatcccacattgtttgggaaaacgttgtatgtaatgattctgagattatgcatgcgtgtgactacatagtggttaaggacatgaatggattgcttgagattacctatgttagggagaagcatcttcttttggtagctcgccatgaaggaactccacggttaagtgtccttgacctggggtgatttcatttaggaagtttccccatgaagcgtgcgagccaaaacaaagcgcgtgaggatctcagacaagttttgtttaaaaactaggtcacgcctcacctcgaacacaaggtgcttgcatctggaccctgcaagacgctgagttttcatagccaaaaaccctggaggtcctttcgtacatgtgcaagaatggctgcttttagcttgtttctcggccacaggtgattttttcaccaattttaaaaattttcaatttcaaatccctaaatatcaataaaaaaatattatttttaatatttgatcataaatataaaattttgaaattaataatatttaattatttttatagtttattattaattttttatattttaaagtttaaatttaaaaattagttattttatatttgatttatggttagattttaaaatttcttaaaatttacagattatttaataagaagattagatattttaatattagatatattttcaattaaaatatatcactatccttttaatttcaaatattatataaaaattatattatatgataaattaaatgacaataaatttaaaattaacctagatattgtcatcaatttcctaaccataataatttaaaattcataaattggttattttatgatataatttattatttataaatcataagttagaaaatgatatttatcacaaaattatatcattttacttatcagaaatttataaataatattatatttattcaaataacttagatatttttgtagaaatttgaaaatgcttaacatgagatattttgacatattattttaaaaattatcatttatttattattttattctttaaaataataattttctaaccatatctattttaaaattagtttatttgattgatttaattttattaaattataagattagaaaatgatatgaataaaagctagatatttgaaatatagtttaaatttaaaatttttaaaagatattttaagttgttttaacaaccctaaattttcaaaataacttgttaattaaatgatcatttagttacagaattaatattaaatatttcaattcacctttgttacatgtcttttgtttatttatttaattgttttattaaaaattttaacaaacctattatttatttgatctaaattgctataattaacttgttgatagattcaatgatctaattttaatcatagtctaattgtcaatagatcaaataaataatttgtaacaagtaaattttattatttctttcatctgtgataaacctagtaacatgatagggtccatccaaatcagtttgttgtatatgagcctatatgtttgcgattggacttagatgtttacaggaagcccatttatttatggatctataaatgaacaaggttactgaaaataagatatcactttgatagttttatttaagcccaattagtattgggcttattgaattaataacaattatttaattaaatgttaaatttctcccttttaaactttttgtgagagttagggggccaatagtagtgggtacgacatactggacccaaccctccctcacatgaacaaccccaaatgtgaagacctattttccttatttaaataatcgtattaggctaatgatattagtttaatctaattaaattgattcgcaacataattacttttaaaatatatgaaattaatttttcattagattatttcaaaattaatttaaaatatatacttagtttaatgaaatattctagatagaaatttctagtaactagtttatattttctattatatacttaagtagaaaaatatatttatgttaaaaatcaatttataattaaatttagaccaacttaaattagaatatttttcttagaacatgaattagatttaatgattaagttaattttattcaagatacttaattatttatttctatttcaagaaatttaataaattataaaataaatttaagttgaaaattaatgtataattaattttgaaccaacttaaattagaatatttttcatagatatcaaattataattaataattaaattgattttattcaagatactaaattatttatttttattttaataaatttaattaaatggaaaattaaatttaagttagaaattttaattttagaataacttaaattagaataactataagaatatatttgatttttttcaataatccctttttaatgtaaatttcgaaatatatttattttaaatatagattatttgaaatttttaattttaaaaattagattaatattgaaaattaatttattaattanntttagatcaacttaaatcaactaatgtctcgttaataaataaaataaatagactaaatatattatactatcaacagttagtttatgaaaaatctagagagttattttctaaggtgactttttggtatttttttaaattgattaattattagatatttttggtatctaaatagttaagacacttaaatattagatatttttcatgaaacttaattaaataaataaattattttcatgtgaaaaattaatttcttaattaattttttatcaatatgaattagaataatttttctagttttattttattttattttaatgtgtaatttaaaaatatacttttattggatttagagtttaattagatatatatatatagagaaaatcaaatttgagttgaaaattaattttatttaattttggaccaactcatgttatgcaatttttataatatttattgaaaattaattctagggatggaaaatattttttttttcagatctacctaagatataatttataaatattaaactaaaatttttgtttagagttatctaaattagtaattttaattgaataaatatattaaaacaaatagattaaaataagtatcaaatgaaaatacaatcctttcaaataatgagctttagtttaatggtattccatctccattgttcattctatatagttcttattttaatgagattcatccctaatagatgttcattcattagtaatttaacaccatagaatctcaaaagataagtattattgtaaatcttttattctttgtaacgatcaccctaatagtgattgctaagagtagggctgacaaagtatgaaacaatggtagaagctcatgaaatagattgatcacgactcttgcctaaacaggaaaatatcctattctcatttcgattcaataaaaggttactaaaatgctatccattttagatgagctaaccaactctattcaatgaatgatatctttaactctcgccgaaacgggatattaatatcgatttgttagaaatcttggaaatttttgaaaatgtgtttgtattttaacatgtctttattacttgctaaatatttaataatttcaaaactgtgtatgaatttatattgaacctaattgtatactgttattaatgatgtaatataaattttgaatcttcattgttggtctaacttggcttgttattaatgattcattgctagaataattacttaaggaatatttggtataaatttaagtctttgactttaaatagaaattttatattttagttttcctaatacattgaaaactacagttaaacttccacaagttgttgataactattttctaataatggatacgaattttatgttaatgtatggattataagttttgtattctatgactagaatccacttgaactattctacgaattctttgttctgagtagacctaggaatcatcaaaatgcatcaaaccaccgtattatatctatgacatttgcatcatgttcatagtagtaagatcagtctttacaaagtgaaaacatgccaatattcacttgaaaataggatcatctttattcgaacatatggatatacatttagcggtggatatgagttatcattaaattttaagacgatcactctagattatatcttaaataaaaaaatttgaaatatttgagaattttcatgcatttctagtaaatggtgtaaatcattgaggtaagtggttaaagatctt

SEQ ID NO: 16818 - DNA, 3937 bp, Cannabis sativa
tgcttgatcatgatccatgagatacaaataagagcattcttattaagtatcagtggtgcttagtaccttctcgacatgtcgcgttgtgattgactaacgatattccctaaaaactataatattaaaactcgataagactcaatacttagttggaccaataacaatattgacacataagagggtgctaagcactccgttacccttttagcatttacaaataaatagatgaatgaaagattgtatataagggtgtgtgtgggtagttgggatacaaattaattatgaacttttcaggtggagtaattagtgccttatttccaagttgatagggaaaatgaaagaaaaaagaaaaaggaagtaattatcaaaacaaaaataataaatgttattcttagtgtataccccatattgaggggcatattaataagtggtaactcatgactattcttttcatatggtgtactgtagtagttgtacaagtaccttgggaactaaaaattagaaaattaaatatttggagagagagaaagaaagaaagaaaagtcatggcctataattttgtgcttccattcataccctgagtagtctgactgtgagacagagtaagcagttccccatcaccaaccaaccagccaacccttttcaaaagtcccttatcatcatcctcttttctttacaaacagacaaagtttgagtaacacccatttcgccacgtggcagcttaatcacatacacagctgttaatcacagccttgtgtgccgggggatcatgctcatgggtgggtctgcatgactctgctcctgcaccctcaccacaccctgctcaactcactcttttcttttccacacacacatacctcaatgcaccaaaacagtcactacacaaaacaaataatatttgtgagaacatttttctcgaaatgtaaacaacataaataaactaatgtaaatgtcaaaaagtacccacaatttaaataattttgttttttaataaaatataaatagtgaaattttgaataacttaaatgtaatagatatgtgagatgcttttaacaagttctgaataatttattatatatatataccaataatagaaaaatactaagaacaaaagtgatgctccaaacaattttataggtatatttttttctttgaatgagatgggtttaactggaaactgacatttttaccggctgcaggcagttgtcgacagaagagagtgtggacgagctcttcttttctctctctctcacaacgctgtggcagcagagagagacagcacgcgaggtgactggttaagggaacaacaggtcatgaccacctcccctcactggctcagcccgtggccgtagtttgtaggctggtccggttgataccccacattcacctcgataaacacccaaattgcacgccctttttcaccgctactacttaataaatcaattaatataatattaataataacccctttatacataatttcactctctcatatatataataataataagtcaaatggggtcatgacatgtcatcgaaactcccaaaaagtcccaacaaggaatgtgcattccacgctctcttttcatgagtttctatatgttacaaaatttgaaatatataattcattaattgctctattgattgttcctggaataatataaatatgtatttaataatagtagagtatgactatgagttgaaactgatcagtttcccgctagctctaggaataaccttaaataatccccctgaaaccaagttagaaggatataaatatataaatatctatttggggttcaaaacaaacaagtttgagtagtgatagtactaataagttatactactagctaataatagttatattagtactagtacatacagtagtgtattgtactagttttgcaattgaaataggtgttaaggtggagaatagccaaaacgggtttgccagtgtggatgttggggttgggtgcagatcggttgcgggccgatatgagtcgtttgctcgcactactctttcaccaggtacatataaatatggcccatttacatacatttacatatgcatatgactctatatttggttttgtttgatattgtatgtattatatataaattgtagggagtattggatgagcaattcttgcagctgcaacagctacaagatgagagctcacctaactttgtatctgaggttgtaaacatctacttccatgagtctgaaaaactcttgagaaatctcagaaacttactgtaagttatggattttaattatcttccttcttcaatataatgggatacattaattatgtggtttataattatttgtatacataggatggataaggagttttgggattacaagaaaatgggaatccatttgaatcagttcatgggaagcagctctagtattggtgctaaaagagtcagaagtgtttgcgttgcctttcgagccgcttctgaacaaaacaaccgtgctgggtactaacattaacatgcatcattttatcccacatcgataattttaatcacaattttatactataaaactttgaacgtttaaacgtttaacgtttaatattatattatttatgtttttgtgtatattttaggtgcttgagagctttggagcttctggaacatgaatattgttatctcaagaacaaattacacgaacttttccaagtaaaaaccattacttagttaaattataacttacttttatagtaattaattattagtacaggcttttgcatatgcttttttactgaaatgggatttaattattgtttttattatgtattatgatataatgcagttggaacagcagcgagctatggcagctggagttaggtatccaatgcaaaattaaaatcaagagccacaaagtcttcttagttaagataacataaatttaaaaatctaactgagatatttatatatatatatatatatctcttttgtactatttcttactcatcatcaaaaccaagcgttttaagtcttgtcaagttggaacaagttaaagcactacaaccacggccagtacagaagtagaagaaggggttattttgtttcaaaagaaaaaaactagaagagaaatattaattaatgtctaaatatatatatatatttatcttttctagctacccacctgcctttaatttaatccttattaaattatatatatgtatttatggaatgtcctagtatttatatctttaatttcatgtacgttttaatgttatctctctggttgtaactgatgatatcaatattgatcttgatatatatgaaagcaagatcatgaagacttttaattaattaatatatatatttattctgctgttgtgattctcatatcaaagttttaattgtcagctttaaatttgatgagtaaatgcttgtgggaagtagtagagagctgtcacttgtcacatgtaatcaaatctcatatctctatttaatttgcatgtatttggaaagttacgaaaatgatcggctctatatagaaatatgtatcttttttaagtaaaatcccatcaatcagtaagagctatagctttggacttcgaatcgatatactatagaaactgtttaaatatataaacgttgaattcttgattttgagttttgagagagtcaataaaaagaggttggtttttatgtatgtattgtatgtatatatatatattggagcacgtagatttgaagtttgactgtgtattaacagtagtcaatgtatatatagatagatatatagttacacaggaaccaagtcttatttggactgagacagacttttgtggtcagggcggcgcgcgttgcctatatatgtatcgtcttttgttttacttttcatgcccttgtcaaattttcagtgatttattaccatctagtaatatgggcattcttatttgacattaatagtgtc

SEQ ID NO: 16819 - DNA, 2519 bp, Cannabis sativa
tttttgaaaaaatttccgtgtgacagtatttttgtaaaaattcactcaaattttagtatttttgtaagtttccctaaattaaacataactgtcttttctttctttttgatttaagcgtttatatatatatatatatatatatatatatattacaaacatgttttatttaggactcgaaccaggacctcaaaaacacactcacttataattaccacttgagctagcctcaagtggattaactatcttttctttcgatcataataaacataacataagaaccaaaattaaattatgaaaaaatattgtacctattcccattatatatatatatatatatatataaattatgcattttgacaatacaaccaaattttagcattaataaacaaaaatatttattattatactgatgatatttgtaatactaaaaataagtttatttgtttattgtatggtaacttttgaattttatataaaataagtttatttgtaaactgatcagatttcgattccaatttgaattttgggatttggattcttgccccagtcttggactcggaccatgtctccaaatccaaaactgattaatcccgacttaattaaaatcaaaaaataaaaatacgaattatagaacacacttttttttttcttttaagttttttttttaaaaaaatagttataaaacatatttttgtgatttaaaaatataaattttactttcaattttgtgattaaaaaattaaaaaaaataaaaatattaccaaatttccttaaataaataaatataaaaaaatattattgtgccaccacaacgagttgtttttcttaaattaagcaacaattttattcttgtataaaatgaaattttattcttgtgaaaaataacactacaaccttccattcaataagttaatcaggttgaaagggaatattgcagtgttattcattatattagaaattttattatagctgaagtgatttatcaataatattttttagtaactcttgctcctttaataactgaagtcattcctagattatattctttttaaaaaaaatcatgaactagtaactataaatatgatgagggactcaccgtgctctatttcggactgttcccaaaacatataattacgcttccatcgatcaaaatcaatatgacacgtgcccaaaatttcccatcgttcactcatgcattctgtattagtgtctacagaaaataaaaatgagaacagtcttataaatacaagttagaggatttcttaaaaattaaaaaagattgcaaaaaatatttccccactagtcttgataagaattaaatcattgacttttgccatacatataatttagtttaccgtgctaatactatggccataagtattatttttaattacaaataaatatcgtaactaattaaattgcatatatatatttttctcgatttttttttttttcagggaacgactgccctgccttgcctaaggatgtgcataaattatccaatctaatgacatctgaccgatctaattacaaccgacagctaaacattaaaaatctaattgtgatcgaatcagatttgatgttattttttaatatctaattgaattggatcagatattggatggggtgtccaaaaatccaatacatctaacatccaattaaactaattagtattttcatttagtttggatgagtaattaaattttatattattatacataaaatatatatgtatagataaatattaacattaaaattttactctttttttttttttggattggatccatccaatccaattaaatacattctggacaaaaatattagatagatccgatccgatccaaaaaaatactaagtcaataaactcaaattaaaacaataaaaatataaaatacgtccaacgaatagaaccgatccaatccaacatccagtgaatgttagatcgattggatgactgaattaaattaattagatcaaatcagatagtaaaatctaacattcaatatataattggatcacatctggatagacctaaaaatattagatgtggtctaatgaacactcctctcgtctacatgtgagtccacccttgactttaggtatataaatattcttataatttattagactcctatttatgaattttttcttttgaatccttaaatagattaatgttatattagtgttacatcaataatatttaaagaattgggcataatataattagagtggtatatttgcaaccatctttatagttaaatgaacttctgcaataataaaaaaaaagatattaacggctaaaccacctgaatttaacgttttgtaacacttaactaaaaaaactaaaattttggtggcaaaacctactgaactcccattctgttttactttgtacccctccgtccaaaaatcacagtctagtgccttagtggtccacgtaatattagttttaaaaaataattataaatattttttttaaaaaaaatcaaaaatcaaaaaaaaaaaaaactaaaata

SEQ ID NO: 16820 - DNA, 8405 bp, Cannabis sativa
tctcaggggtaagtgtgccccactcgagatatggcctagctccaagagctgaacccatccttgcacttggaagcaaattctctcacaaattataacatgttccacaccagtctgtgaatattgcagactccccctcagtggacaacttttccatcatattataagtcttgatttgttaatgttctgatccatctccaaacggaatcattataaataacgggagatgaggatgaggcttttgctttgacctttgttgtagtttttcttgttttctcctttggggcagcctcgtgagcagggtctcgttagggcccctccacaggtacatcaacctttacatcctcgatgttcacagcctcgaggtcaaattcatcattaaggttagccactgaaagggaaaagaatgaaaaacaacccaaacaattaaataccctacgtcgtaaggatcaccaaggtattgaggagagcctcccctaaaattgttaggagagctcccctccagactccatgcttggaaactccctccttgcagggtgtcgcctttaaacattgggtcgggaacccacaagaattgtagaaacagagaaagctaagcaacagtcccattaggagccctaatggctctcaatgagaaaataaagaatggctcgggcacgaaaaagcgaaacttaaactttcaaaccaccctacccagaaaacaccaagatgacaatcttagccatattccagtgaaggtcattatctaatttatacatgtatatttaataatggataaatactattttagatcctatattttataaaagttattaattgagccctttactttgttaaatgataaatttaaccttgtatttctaaaataaatagtaccattaactgatttttttcgtaaactaaaacataataataatttgatacacaggtgttatgacaaaactagttacgttttttacatctgatcgtgctcgaaattgtattgatcaagttggttatattaaaaaaaatcaaaaattaaactcaagatcttatttgtactattttagacaatatataatctattttgttatttaataaaaaaaagatactgtcagtaattttttataatacattgatccaaaatagcattaactctttaataatttaaaatattttgtattatttgagttataaacttggtggagaataaatctaatgcgtgtgtgatgtgtgatatgcattatcaaattaattaaataaatgtgacaacttgtcaaaggaaatggcaatgccttgaagagacatggcatcgagttttcaagcctgcattttggaaaatgaaaaccatatatttccaactaatttctgaatggtggtggtccttttggcttcctcaacaacacaatctcataactagtttttatattaatcattttcttcatgccaagtggagccctctcctgttattgcaagctatcaaataagtttcaaacttagaaatacccaatagcttcaaacaaaaaagccaacagttaaaaacaaacaaattaatcagttaagataaggaaattacttcttggtttggaattgtaaaagaaaaaactaaataaaataaacaattaaacagcatatatgttgtacacacacgtaaagccttttgaattcggcttgaccgatcatgcccctgcataagaaaagacgttggattattcttttttagaaaggggactttgggttattctagtgttatttgagaaatactaaagggcactactagtgtctaacacatttttatgtgtaaatatcgttgttggtctaattaagtatagagtcttatatagtttaatataataactttgagagtatcgctaaccaatcacaagacgacatgtttagaagtgctagacactactgatgcccaatagcaatgctcagtgttatttattaggaaatactaaaggatactagtggtgcctagtaccttcttatgtgttaatatcactattggtctaactaaatatcaagtccgatatagattaatataatcatttttagagagtatcgtttaccaatcataagacgacatgtctagacgtgttaggcaccactgatatctaatatcaatgtttttatttattgagactttttcttatagaaaatgacattctattaatccttcaaaatagaaaatgacaattattattattagttagaagacttaatctggaattgagcattcaatgagagattacgtgatttgtaatgatctaattggtcatgttgactatgggtttggatcttgggcaatatggcattatcagcaataaataaacaatcctaataggtgtttttttttttggttttatataaaaataaaatcttaaaaaaatagaaacattgaagggcataggagtaaatatataaccaagttttgatacctccttttgtaagttacatattatatttaaaattgaagcaccatcatcactaagagcaaaccgtgcctaaatctatgtacataccagtttttgttcttgttttctcgtcagcttgttcagaacaaacctgtctctgttccattggttttgttttccattcatataaatacaaaacttgttacgtttccaagaagacaaagtcctagattgtatcaccgctctttgtttttcttttggttttatatgcaaatgttctggtctggtatatgcagttccatttttgcttgatggtgttctaaggtttctttccaaattttagaacaatgggatttctgggcagtgtctttgggatcattggttttggaattggactgcctcttggtctccttattgggttcttcttctttatttactccaagcccaagaaagttgaggtattgtatataaatatgtgtatatgtatatgtgatatgtcttcttagaggagttcatatgagtcatgaatatgtttgaaatggtgaactggataccttacgttttagtctttcagcatctgtatctgaagttctgctttttcttaaggcacagttattattgaaaaattgttaagaagagtagaaatggattggtatgagatgtattcaatattctgaccctcttataaaaattgccttttataattttgtgctcttgagaaacccttcctgtaataattctgtatcatgtgttctttataaggaattattttctgagtattccctctcttgttcacaccatctggagttgaatttttagtaacaaccccttttcaaaggaaagagatttttttatacacaatatatttataagtaaagcttagttcaaatctgatatattcgaataaattaaggacaaagttttgatttttttaatgctgcaggatcctattgtcaggccactttctgagttggacacatgtgctttgcttgatcttttgcctgaaatcccattgtgggtgaagaacgctgactatgatcgagtgagtatcactgttaaatcttattacaacatttttcatttgtattttatttaccttgagtttcaacattattccaaatggttcaggttgactggatgaataaagttatcacagagatgtggccttaccttgctaaggtaataagatgagtaataaagtaactatatatgtttcgctttcgaatttctttgcttgagttcattttatttacaggcaatccctggtattataagaagtacagcagaaccaatatttcaagagtacattgggaagttcatgatcgaatcaattgaatttgacactattagtgtaggagatcttcctcctttactctatggtaagtgtgctcacaatgtatttttgtgttatcaaagtctatggtaatttcattgtaagtttgaagtgttttgtaatatcatggcaatttcatatgatattacagatttctgctaagtaattgccatttttttttcttagcggtattccatctcaatttatctttctagtgtaaagttacctatggatggaatcactttgaattcggtgtaaattttttgtacattgcatttcgtatcaatcaaacttccagaaacagataactctgtttttctttaattggggattattgaactttctgtcatcctcagattgcatctattagacaagttaatgacaatggtttgcatttgacttaatataatccagtgccatgccttattacttgtttagtactcttagttgtttcggtttttcatatgttttcaggtcttaaagtctatgagactaatgagcaggagttagtcttggaaactccaattagatgggcttccaattccaacatttctttagtgattaaattgatgtctctaaacattacagttcaggtcagtatagccttaaaatgtttccttaccaaaataatcagtctgtaatttatttatttagtccataatttttctgttcctttatcttccactcttaaaaggatgctaaagcagtaattatgcttcttcacagttagtagatttacaagtcttttccacagcaaggatatcattgaaacctctggtgccctcatttccatgtttttctaacattgtggtatctttgatggaaaaggtaaatagatctttcagaacatcaattatcttgttttgcccttttaaactagggtgttctaaaactgatttggttgcagccacatgttgatttcgggttggaagtattgggaggagatatcatgtctataccaggcctctatcgatttgttcaggtgctgcactggtaatagtttcatggttttaggagtaaggttttggtttaagctagtatgctattattgcattgttatgttttggtgtatagaactcacttgacaatataatctctacaggagactattaaaaagcaagttgcaagcatgtacctttggcctcaaattcttgaaatacctgtactcgatgcttcaacgtaagcttattaaatctctattttctgacgtttatatcacaattttaagtctgagctcatgttggttgtaagatttcaagtatagggagtccaagtaacaataaatctttttgcttctctgtagagctgcaataaaaaagcctgtgggaatactgcatgtgaatgttgttcgagctcataaactcttgaagaaagacctattaggagcttctgatccttatgtcaaacttagtttgacaggcgagacgctttcatcgaagaaaacaactgttaagaagaaaacattaaaccctgagtggaatgagaactttaagcttattgtgaaggagcctgagtctcaagttcttgaattacaagtctatgactgggacaaggttaactttctattaccctctattcaaagaaactcttacttgatttttcctgtgcttcattggtagcttaattaacacagctcaagtcattttccatcacaattatgatgtgccccaatccccttggtacaattaatagcagcaaaaatccaagaacagtagcagaaaaatagatattggagcaatagaaatacagtgacaatggccttaggcatttgagaggggcctagactctccatgatgcagagtgatctactcatttcatgcataacaccactctttccatactctccagtatacactttcctattcccacacagtaactacccttaaccacaatgaatcatccaccattattccattggtgtgagtctttaagattgaaaccttaaattagcttctgcatcatagctattaataagaattttgagctcatttcattgtgttactatgtagtataaggaaaataattcagcaggatcgtcagagtaagtgaaaggtccatctgaattgttgaagatgattactttaacatgttgagggttttctctaatttgcatttatgatttttcactcttcataggttggtgggcatgacaggttaggattacagttagtccccttgaaacagctgacagcttatgagacaaaggagtttacacttgatttgctcaaggacacaagtattcgagattatcaagagaagaaaaaacgagggaaactcgaagttgagatgactttcattcctttcaaagaaaacagcctcaaatacattaatggacctttagatgcatatggaaaagcagaaagtgttattgacagggcatcagatgatggatctcatggtggagcaggtctgcttacagtttttgtccaaagtgctgaggacgttgagggtcgaaatcacaacaatccttatgccgctgttctctttaggggagaaagaaagaaaacaaaggtaacaagttacatcataatagcagagttttttgctaaattatataagcttttgttctgtgcagacaatgagaagaactcgtaacccgctgtggaatgaggaattccagttcatgcttgaggagcctcctctgaatgagaagattcatgttgaggtattgagcaagagagggctgattagctttctgtcaaaggtatgttgttccattactttttacttttgtttacttgagatgcaagttactccacatactttataaattgcttcattgttttttttgtatcttgtaggaatcactggggcttgttgaaattaatctgagggatgttgttgataatggccggatcaatgagaaataccatctaatcaattcaaaaaatggaaagatacatgttgagattcgatggacaacagtttgagaaatctgaaggtaataaatagctacaagttacaaccataccaaatgctgcactaaaaaggtccacacatgacaagttatgtatactcataatttttgtgaaaaagataaattggccaggttacagggctggcttaagcaatgtatacaattattctttgattagtggagtacttcacagatatactgcaatgcaatttagatagaaaataataatatgaagtatacatgtaattaatttgagccaatctgtaaaatcatttatgatgtacatagtttgtaatctttgaaaattcatttaatcgacacctatcaatcttatttttccagcttttttatttcaagacttttttaatataagtaaattgaaaaagtaaataacacttgttggagcaattttcatgcatgtacgtgtggcacgaaaaggaattcatattagagattagtgactcaaaataatgactttactaggagattttgacaaaatgtttctttattcttttataaaaggaaaaaagaaaataaaattgtgaactcactatctcctagacgaacgtattttataaaaagaagtcagctttctctaaagtaaacacaaattagaagaagaaaacagtacacctcagtgcattattgagttgctaggtacagtttttcctttaaagtaagcccaacccaacccttttaatgataaaactactcataattttggtagaactttacatcataataattttatcccatctaatattactttcatctcctttcaaaaaaaaattattttcatgagtaccattttctttatccaattttatatattatttgagataattttatatccacaaacgtgtacgcataaataaatattttggtttagttaaaagtaaagctatttaagacatgtcaaatctaaattttgtagttgttggatctactcctccaaatctcagctaaaatatatacctggctaagaataataagaatgaatatctgtgaaagagatttgcttatagatgcctaatatattttgaaagaagattttctcaattataaaattatgggagattcttatgttgtttcacgaatattcaacaacaataccaaagttgaaacctgtcgtgttttttttctttcttttttattcgttttttattttgttatatttaaaaaataatagtgatctatttatagtacaatttcttattcatttgatgcataagataagatctttaaatcggaaactaataaaatttaaattaattttcacactaatgtgtgatgttgtttaaatataaaatattagaaacagaatctttgacaagaaaccactacatggtactaacaaaatagaagttcatatatatcctgaattgtttcacatagtaaaggaatactatattgttaaataattatccatgttatatattgttatgcctaagtttaatggtcttataacaatagtaaactagttgtattgaaaagtatatatggcaagagtaattgatacctttgaaccctttccaagtattaatctctctctttttttttttaatgcagagtaaatctcttttatatattagttagtaagttacatttacaacactaaattgttgcatacatacaactagtttggagcgtcctattaagttgtattatattgtattttagtatattagattagattatatatcatatttttatataatattatgttaaattttaatttatactaaaatattatatatttagg

SEQ ID NO: 16821 - DNA, 2970 bp, Cannabis sativa
  modified_base (864)..(881): a, c, t, g, unknown or other
aaactattttaaaatataaaaataaaaaaatctcaattatatattaatcacaccaaattaacctaatgtcattagtaaaaaatttttagggacgtgcgtaattatgtagccgcaatttggacggtgtggcaagttgctttcacctttcagtccaaaactttcatatttcaattgatttaaaaaaaaaaaaaaaactttcatatttgaattactcatgagtcatgatatcattacacatgtcaagtctttatcttcttctaattaattaaacaaaagaaaatttgattaatatttgcagaagagggggacctaatgttcatgttgacatttaattttggcagttatatatgtgttattattacggcgccatatgttttgtcaatgttacaaaatagtacttcatcacttcataataatactataattgaatacaaaattaaacccacgtgctatatacttattttacgcaaaatggataatgttttcagctcactagcaataataataatttaattttatttacattctgtaggatgataattatatttattattaaaaaaataaatttaaatcatttttaaaattaatttcgatagttattttgattttatttttatattttttaaattatgtatgtgtatttttatttctcttaaaaaaattaatttcaatagttattttaattttatttttatattttttaaattatgtatatatatgtatatttatttcttaaaaaaatgaatttttttaatttttttgtcataatatttaaaatatgatttatttttatatgatagaaatattttttaagaatataaattgttagaataaaatttaaaaacttagtacaattaaagatannnnnnnnnnnnnnnnnnaaaattattaaaataaagtgtctttaaaatttttttgcgtaaataatttttttttttagaaattatctttcaaatcaaataaaataatatttatattgagctaaccggccagtgcccttcattgtcacattgaatttattggatggtggcaaggtgggcaagttgttcacttgttcttaaattgttaaattggttgtagcttttacaatatttatgaaaaaaaaaatgttcaagaggatgtgtgtattaatatattatttttattgtggtagcttcttctttttccactaattaaattatcattattaatgttacttcacgtatattgtttatgcaaaaattaattaagctaatatatggtgcaattatttgccaagactttgtgcgcagtcttttattttaattagtcaatatttactctttgtttgaatatatatatattatattaatatttatttatttaaatttcttgcatggccaacaaacaaaatgacatcattgacctcataaataaatgatctgatcaatgatgccattatttttttgtttagttggaactttttaattaatattatatttattctatatagatgatcatatttttcacgtttaatttgttttgaaatggccggacgccggagccctctagagtgctggcccactcgtatggtcttcactacacccttcaagttgatcttcctatagctcgtcgacatttatatgcccattaatttatattttatatatatgtatatagtattaattttaccaaaattaaaaatgaataactttgttaaaaaaaaaaattaattactcttagctatcacgagcttaagagtacaattcatatggatctttcgttctcaattagtaaatttgttccaaaatttatgtcactactaatttataccccttaaaatatgagttgttaaggttttgcaataagtaagaaacacacatagatttacgacaagcgaaaaatctgagaaagttgggtgcaagaactgtgaatggggaagaaaggggtttgttcgtcgatgtcccattttacggtaagttttttggtttttattcttctattttttcttctttctaaaacaaggtttgtagtgtgcgttctaaagattagggttattacgatgctaaaaattcaacaaaaaatagatactttgattaaaatcccgtttgtactaacttttatctacatgtaaaaattagagtttttagttattttcttttgtttgtttggttatggtcagagagcagatgggagttatactttgtcaaagttttttggaatcttaaatggggtcgataaggtttgtagggtatatcttgaaaattaccttgataacgtagcatggagttatatgacacatggcaagaatggtcaacgctagacgaataaaagatggacaaacagtttactcgaaaggaaccaagctgagtatgcatgcacaaagcccgtccagccaagtataagtgctgagcagaacatgttgtgtaccctttcaggtagccgaaaaggtattatgcgaaagagcacctgaccagtacattgagtgaccaaagatccatctcacagagaacgtttgactagtaaattcgcgagagaaatatccagattcatttcttagttgattctcccaaaaattgattgaagaagattcatattttcatggaattaaattaagagaattgtgagattgctcaaatctccatgattttctctctttatttcataattaaatgtaaatattctacatcttctttataaatagtgaagttatttcactaaaagggaaatcgaactctgtattcttaagagagcaattactttgctaaaatatttgtaataatttttagagatattgagaaactcacttggtcggtccttgtgatcatgatattatttcataagcaatacaacaaaaaagcgagtaggctattactgctgaaaggggctgaacctctataaatttcatgtttcgtttataattttttgtaatctttattattagggatattggcggctaaaccacctgaactttacggtttgtaacacttaaccacaaaaattgaatttttg

SEQ ID NO: 16822 - DNA, 3090 bp, Cannabis sativa
atatattacagtttgctttgcttgtaattatcaatatatatagtactgtaatctttggtgtaagagctgatctaatctttcctacatccgtgtcattgaaatctaattatcgtttgtcaagaaagttacatacaattacaaatataaataccaaaccatgtacaatttagaattttttctctactatctccctatgtacttttttgtaattaacagtcttaagtatgtaaacactgtcagagctaagattttaccagagccgattaacatggaaaaggtgctctgaatccactccattagttctcccactggtcaataacacactattttgaactatgaaattttctgtcatgcactgttctcatcctcaccaatctgtttaaacataaaaaatatcatcaaacaattactatttccaaatgtcttatgccccaagatatttgaaggaaaaaaataatagaacaaaattacctcaaacttctcaaaattagtaactagcctcatatattgctcacgtgcttcaggatggcgaaccattgacttgactcttgcaagagctttgtctacagcagcacatttctgttttctcccaattacaagatattcataatcatcacctttttttgtatctcttgatgcatcttcagttgactttttgacccgaaacccccgcaaaccagaaccttttcgcctccaacgaagtattaacttttccaatatactgacagaccagacaaccttcttatactgtttccgaacttgatgtcctctcacatgagcctgaaagtatgatataagagatataattaacaccccattatagctcttaactcaatcatggcacacattttatctcgaaagaaaaggacgaagcagtacaatgcatgtgcacacacgcacacgagataaacatatgaaaaaaaccacaattatataagcacctgaatcttaacaatacggctgcgaatatccaagaattctttcctccctttccagccacgatatttcttttgaatcttcttggctgcagaatgaaggtaatcttcaaaatgacttgacttctgtaccttgtttaaagaatccagaacaaaaaggtcaaccgaatcgttggaaacattgtccccgctcttggttaattgtttatgacggaataagtgattcctaaaggcagcttggattaaagcagctgtatgagctgattttcgaaaagcagctagagaacctttaagaaaatgattatcagcatccaactctgatgagaaacctttcgagtcattatcaattgaaccttcagcagaaacaacgacatcacaaatatctgctacattctggttaatgttcaatgaagaaagatggcttgtcaaatctgcttcggccaaatatcccgctattcctttatgtccattaattgaggctagatcagctgctttttgccctcctggaaaagatggagttgggtcatcaaccgcacctggggcaccacccaatctgaccagtgctacaactgtttcctctctagataaaggataaagatacaattgattatagatttcaaactcttaattctttatctaatgaaaacatgttgagcttgccttttatcaacatgtcagcactttatgcatgagataataagtattcaactagcccaaaaagtactgtgtacacataccatgctcgatcttataggtagggacgacaaaatatcgaaaaatgcacagctaattgtgtgtattttaaaaattacaggcagttgtttttaacatacgaagcatttgtataacaaagagtataaaagacagcaacctcacctcccaaaacatgatgcccaatgaagcgctgttcttccacgagcatctctgaaattgggactgacaccagcagcaattatgggaccgatagcccattgataaccaagagcagctgctaaatggatgactcctaggccttcatcgtcgaatacattaggccctttaccttcttcgtgaattttgaaaactagccattgataaagtctatccttgagcaaattttgaatcaagatatcactcgacgtcaagtggctagctttgattctcgtcgaaggtacataatctataatcttacacttgtcacaatcaagagaacaatttaatgacttcctctctgggcctatatttaacaattttcctagccgtatctgtaaccgtaattcatcttctggtgctctgttgtcagcaatgacctgaggtttctcccgatattcaaactccctcacctcgctgcacgccaatctattactgcaggtaacatagaatggaacacgtccaggtgcatgtaaaggagttctgcatcgaatgacattatcaataacaacttcagcaggaacctcaatttcaccgaacatacatccccatttcgtctcagaagaatgctttttgctacccaaaaatctacctgctactaaaacctgaaattataacaaagaaagtaaacgtttaaattacctattattggaatctaaacttatcttgcacttgagttttcctcgaatttgctaatacctttgtctcaacacccgtataagtccaatctggtgaaatgtcacaaatgctgaataactgttcctgggaaagagatggaccaagtgaatcaatctccaactgcatatggtgtgataaactagatacttctttgtcttcgttctcagcatcaattgcattccaataatttccagagtcggaagccatcaaggaatcatcacaatcgacaccgatttctttgtccatccatctcccaaaactatctaactttttcagctctactgattcattgttatttgcagttccatctttatcttccgatttcttctcaacttcatcagtgaaagttgccaccatctgaggatcagaataaaactgaaaaggggcgcgggtggaattaaaaccatgctcttgtgacacctgaaaaaacaaagtagatcacttgagaaacttctacacagggaaaagtaacaaaacaaaaattgagaaagaaaggtataagataaataatatattacatgaacatttcttgatgaacacataaacacggctgatttgacaccaaaat

SEQ ID NO: 16823 - DNA, 6258 bp, Cannabis sativa
atatatttatatatatatataaacccgatacctaattcagtagatgttatttaactaaacaattatctagccactagcctgaaactatagatgtacagagaaccaaaatagagttttttttttttttttttcttttaccatcaacaaagacaagtagaatctaaatagccaatgtccgattcaatgacagcaaaaacattgacaaacccatatgcctcttatttcaaatttcaaatggctgtgcaaatgttcgattcaatggccaatttcatttttttctcattgtcaatcgatatacgttagtcaatatgatattcatgtgatatataaaactcataaattcatcaatttgaacattatctaagaaaatgaatataaactcttccccagccatacggcaatgacacaacgcaacttcgacgagagaggtcaatgaactcatgaaactatatgcctccaaattagtatacagttgaatttctcgtccaaggaatatatagaactctgtagtcatttcatttcattgacctcaacgtttaataaaactcgtctacaaagtataatgtataagttttacaaaagtactgaaaccggtaaaatcgtaactctgtaacccgaaacttttctacatttgcttcttcactaaaacaaatggttgcctactccgttcaacttggaaaaatccagtggcaatgtccactgtttcctttttacctttgtacttggccagggttcaaaccccactttggggaggtaaaaaaggatccgaagcctgattttggcatcgttcaagaattatgttacagttgttcatggtacgtgcatcaagaagggcatgattccaaagtttgatcataaatattctccaacacctatcaattcaaaagaaaattatcacacataattaaggtcgagtgaaaatggaaaccataaatctattacagtttcagatttcaaaatctcaaaaaccataattcgtttatcacctaaagtttagcatcccaacaaacaggctacaagtcgaattgtaaattgaggtcccaagattataggagaaagccatggacttattcctcgttcacattagtgaaaatgtatacataaatataaatgtatgtatgtatatatatgtataccatgcattttaaaatgataaccaaaaatatttgagttgaccaagtaagcatcatggcatgcgctttcattcttgttctttaagaaaaaaaaaaaagacggcagcacatgcccaaaaacgaaaaggtccacaaattgcatgttggcaaaaataaaattgtgaatgaaaaaggattgagaccaaaatacagccagtaaacgaagttaccatatcagagatggatttttgacaagatcgggtccatgcaatcttgaaaatgcttcacatgcccaaggaatatgaccatcagcaagtaccctacatagaaaaagcaaatattttcaagaatttgagatcttattcacacagtgatatgaactgaaacatgttttagtactggtaacagccaactccagcagtatcaactgttggaagctccaccaagtaaaattatgtttagtttgctagtataccaataccacaaggaaaagagccacactttttacttttaagcatagcaattttgctcatttatccttaatcaatgtacaacaaaattaaaggaccaacatgatcagaatcaccaattacagcttctattttctttcagtatagcactgacttttttaaaaaaaaaaaatacagtttttttgtttcagtgttgtgctcaagtatattatcagaaatgcaatgctgtaacttgtaactagccaatagacataaagcatgcaataaattttatatattagatgttttcgtataatgctttatctggtgctatgtcaatttttttgatttgatgatcatgtaataggattatttcatattgttctactttactgaatctctcaccgttatcattcttaaaagttccagttccacacaaacaagaaaacatcaagaaaaacactatctagatatattctgaaaaaaaaaactcccaataaaagaacttcattaaatgaataagcaaagtcgatagaatagtaccgttgcttccgtacgaacgaattccacatatgcatcatttgcttctcatctttggtcacgtcaacaaaatcatcaagcatctacaaaatcatagtgtatcaatgacagtctgatgaacttcctaactttttgtttttcttttttcaatttttctgctaaatattatttttactcttaaaaaaaattctctattagagttgatgagctttctcaacaaactcgcactttccaaaagatgactgttaacatttaatcaaactagaaaaatggccaatatgacaatttaaatgattttgtctaaatgagacccaagccacactaaaataggactaaaacagaaaaagaggaaaaaaaaaagcaaacgaaaaacaactaaaattattgtaatgaatctaagggatatacatgctttagaaccggttctacagaatcaccactaagaaagctaagttggtccctttcctggctaaatctggcatgcaaaaagatggcattcaatcaaatagcaaggtagtgatgatagttgttgcagtaataatgatggaggttgcagtagttgtggtttgaatttgcagcagtcagataaaaaacaatgtggtggagatagatgatgtaggctgtgcttgtattgtagtggcgatggaagtgacaatagtggttagattgtgatgaaaagtctaccaaagctttgtatgaagaaaatttgacatactaaaagagagggagagcagccacaattatacatacccttcgatcttccaaatctgcaacaccatcatcaacttcatcctcactgtccctatctgataagacttgttcgatcgacatcggcttcaagcaagaggtgataagagaggcagatttcagatggacagttagttgcatgtaaattgatcaaaggtaataaatgaaatctttgatgcacgtgaaaaatagaaatatgaactaaaatagttcatgcaaaagctaaacctgttattattgctcgcatgagtcaaatctatcttagcaaataacatcaaaacatggattacaaattatagaaaaataatgatagtaatgttgtttagacaagtaaaaggttcatgaagcaaaagcataaaaattgttactgtagcaaatataattaaccaacattctaaactttcaataagattgcttgtgaaaacaacactcccaatttcgtaaagaatttcaaaataatacagtgaagattctgaaaataaatatgataaagttcccattcacttatttaagacaaaaggaaaagagtttagcatgcgaaattgtattagcatgctcaggggatgctcaagtgtcctaggggctttttgggtgatgtacaacattgccattcagttgggataagtttttgctgatatggggactcttgtttcgagggagggtctaatttactggaatttagtgactttactgagctttattagctcttgggagaaggtgagtttagtgactctacagtcacttggtttcagttcaaacttgggagtatattgtagtgcagcgagaaggtgagtttagcaaggagagatgcataaacaagcctaggccctagaccatgaaatgacgacagactaataaaaacaaacacaagcacaacaaccctaacattgaaaaacaatgaacctttttcttaaaaaaaacaaaaacaaaacagcactacttgtattagtaaaaaagagaaataatacagtgaaaaacaatggacttctaaactcttaccaacacatcaattatttttttattatttatctaatcagctacaactgtggcaataaattgggaaactcaagtagatcattcagaaatggcaggcttaattagttcacagagacaatcttcaaataaaagaaggaaaagaaaaaagtaaatttgaaaggggacgaaacattagataatatgagtcacttgtcacctgggctctgtgcgagtgaaagaactggcgcttccgcaagagggcacaactaaaaaattaaaatgaaatctaggtcaaaagaaaattcaaatttatcactctgcaacaattacaataccaagttgaaacaatacataattagatggccctatagtgcctacttcgaatccaaataaatgtatcttattaaacaataaataaataactaaatagaaagggagaaaaaaaaagaacatgaaaaagtcagtggttgtgatcaactgcacagtaatacaaacagcggatgatccagtaaaacaatcaaaatcattaactgaaccaacattgcagataatcagtacgactcattatgttttctacacttagccccatcctctagttacttatcctatatccttttgatactagatcctacagccaaaccacaagaatctcaaacgcaaggaattctagaatataagtgtcattatatacatgtcctttgttgatcaccacactatgtttgcatgtaatcaaaacacaaaagaagcaacatacacaagcaaaagcaatggatccaaacacaacaatgtcctggcctaagatttgctctgattgactaggtagactagtggaggagatcttgagagtacgctaccttactttaatgagctaatatctactggaaatgtttaatacaaattttaaactaatccgcaaaaagttaaataaaagcatgaaacagaggaaggcaaggaaagacatacttccttgggtctgtccgttcaacagataactttctagtccttgcaaattgcaacatagcaggaggtgcaagaatatttccagaggttaactgggcgcaaggagggtcagattgtggtatcggtaagacagctgaagctcctgcaacagaagagctagatgtaacacactgtacacacgctgaagcaccaaggccagaaatataaatgaaatccacacttatgttacaagccatctaacctttacaggagcgagcaattgagacaaaagttttagttttgaaattttctaatgacagaacataacaaaagaaaaaagtatataaattcacctaaaaggtggagcaagaaaaggactaaaggattctttacaggaccagcgcatgcagacatatagtgcaatgcaatgtactagtccctgggaaaaggattccgggagcgtgacaaaatttgtaggtatcagctcaatcacctacaatgcgcaatctattatagatgttacatgcaaattccatttgaccagtaaacaaaccgatccacgcattccaagttccttcaacaagagaatcacaagaaatttgtttgaggtgttttcataagttttactttatatatgtatatattaggacaagactatagtaaggacaccatttttgtctctatcggaagagacgtttttgttttaggtatccaaatataaaaatatgacgatgtgtattataattataacatgcatcccatcaattttagaaaaatttgaataatttacagtatcaaaaataaaattcaaacagtcatttgatgcatactagttttctaatttatttttttacatgcaactaactattttgaactctattcttggcatcacaaactattctaattttttaaaaaaacatgtaagatgtgtggtatagctataatgtacatattcatatataaaaaaaaaaaaaaaaaattataatttctccacatactgaaaacaaaaacgtccctagcaaataccaatagaaacaaaagtgatgccctaccacagaatttatatcaataaatatatctgactacccatccatgcatcccctagtcctacatttataattttgaatttcttcggacaaaagtattttcaaatatgccatccctgtcaatccccaggaccaagtaaagagaaaatatgcaacaattctttgataggcagattacaagaaaacccccttaagttgggtcgttttttccagcaaaatatttacctacatttacatagggggtttacaatttaccaacttcaattttaactagggagatctcactttcaaaaattgttttcaatttctttttaagaataaaacaaggagttatgttgtttcttgttcatgtttgcagagctttatccgttttactcttgtttcttgtcagcgtttagactattccactctcttttttgaataagtactcaatcttgtttgcctacttaa

SEQ ID NO: 16824 - DNA, 3762 bp, Cannabis sativa
aatcaaattttttgattttctaagtatagaaaatcaaatttcccatttaaactcccatatgtatatgatgaccacgtggatcactttagtctttattagggctttgcttgtcccatataaatgcatatcactcttatttatttttccttcaatgtattttttttttaaaaaaaattcaaccacaaacaccaagaataataaatactaggagcaaaaatttatcaagattccttaaccacaccaaataacaatacaacttgccaagtttaacatcattactcgatctactacaatgaacaaaactaacatcaaacatattacatagattaacgaaatcatctaatatatacttagacctaaagaagtgataataaacattgttattaattttaatcataacattcaaacaattaaattcaataataatattatcatacctaaaactaaaagagatacattgaatcaaagtgttagaaatagctaaagcttcattcaatcactttaaaacctaaacaacgatcaaaataccaatttgtcgaagctctaacaactctcaaatcatcacggattaccatacccaagttactacacttacctatcgaatttattgcagtgtctatattcactttgaaaaccccaagaaagagagcccatttggggaccgatttgaactgagctcgacctcaccgctaggccgccagcaaccaccctcggtcgaaagaactagccatcgcctgctgcttgttgtgaaaagtcccaagatagtcatgagcccaatgaacgatgagcactactggagacaactcatcattattatgaatttttttgttacgctagaactaaattttccacagaatcaccaataccaattacaaggccggctttgagtaataatgggatcaagaaatttttcaagtgtgttttatctaaaggaaatgtaagtattattgggcttctttttacaaaattttttaaaaatgctttacaatgcaaaaaaatatattatataaaaattttaggccctgagttttagtgggccctaggcacaggcctagcccgccttaacctagtgcccgacctgaccaatttaattatttcttttgaaaagagatcaacaaatttatgaacaaaatcaagaaaaatcacacaatagacttgcagatcttccaacataaattcactaatttttctacaatacaacaaaaaaacaaccccaaaaaaatataatgagtagtttcttcttccacattaaaggacataatccatcaattttatctttcagtttgatcacatatctttgttccttgtctcttttttcttttcattcttttatattacaaagtacatttaataataaagaaaaggtgtaatattggtggaagaatataattacatttttctttttaactttaataatttgaaggcaaaaaagcagatctttaaatatagaaaataacaattttagtctcacaaaatttaaaataaatatcacggccgtgggcatgcatgtttttttgaaaaaaaaaatatatgctttgattcttaactttttcttattatatgatttcaaaaaaaaaaaaaaaacctttgtattattatattttttagaaagaaaaaaaaaaaatcggtaatatataactgatcccatctccattaatgacttgtacatcaaaaccacttttctacttcaaaataatacataaaaataatcttcatttgcaacataaaatggcattcaccataatgacacgaactctatatagttttaaagaagagtgaaaaagacacatatataccttcataattattgatgtatacatatttatttatttatttttgttttttttaagattaaaaaattattccaatatttttaaaacaaacaaaaatatatgacacaaaaaaatatgatataataataaaaatatttaatattatatatttttattatatataacatgataattatagacgagataataataatttttttttgaatgaaagtaaactttattagatagaaacatccgctaaaacaatggagtgaagagcaagggaaacatcgctctcagtaaaaagacgacctgaccaataacaagtaccacgtgccatacagtgctctcacttagtcaacataacaaataattatcaacggtcaaaaaattagttatttcagttagattttcacttaactatatgagagctgtaaataagagtcttaggactcattttgaaaagtaagatcaagattggaaacacaaatagagtgagatgaattctcttaaaattctcaattgaaagtgagagttgtaaaaaaggtttttcatgtgtttgattgaatatcttcaagtgagatcaatttgtaactggtgtgaatgatcaccattagtgcgattttgtgtaagcttgatttgggtattgtaaacatcatcatcttcgccaattattaataaataatctacagctaacagagctgtttctatcataggattacataaccaaatttgtcattattgtggacattatcttacatagaataaatggtagagtattgagtcatatatcagaatatgtgatacttcactcatcaccaattggttttgagatggaaccctataattctcaacatgtatcagagtcatattccttgcgggcatgtgatcctatctagtgactatatccacgagagaatattgtgaataatactgttctacataaaataaatagtagagtaaatagagcctcataattctcaataatgactgaatttcatattatatatatgtccattttttattagttgtttaattttatattatctaaattaatcttgtgttcttattgatgcatctgtccaccacaaaaaataatatagattattttatgttaattaataccatttcaattaagtaaagttggagactgtctaaaccaagtaaagaaacaagtagtacaactacaagtgctgaactactattttatatggtgtttttcattacgtttacaaataattaagttaatgtagattttagtatcaaatgtatcatattaaataagttaattaactgtataacttaatttaaaaaatcatatattatgctatatatgttttttttttttaaataatatgctatgtatgtttttgattcttttgggtatatgccaaacatcataaagatttttttttattttttatttttttaacttttgcattattggcagcattgatcaaagaatctagattcgactgaattaaaaaagagatcataatacaagactttattttaacatcacctctattaaatcttgttatataatcaagttgacagcattaccctaccttatttacaaaaaaattagttcatttaattttcatcaaaattaagaaaaaatagttcatgacttgatggaccaaccgttagctaaaaacatagtacaaactacaaagagaaaaggattctcaaaaaaaaaaaaaaaaaaaaaaaaactacaaagagaaaaaatgttcaaatttgtatacctcaaaataatatttaatataaaaaaaactaattataaattttgctaaatcaatattaaaagaaaaaaaaaattagttagataatagtggaggaaaaaattagggtttctcattcctaaatatatagctatagaaagttattttttttctctggttttgggcttaagtgcagcttgattggggttgtattttgttactgcaattcgattttgctactatgattagttttgtctagttgtgat

SEQ ID NO: 16825 - DNA, 7191 bp, Cannabis sativa
  modified_base (7156)..(7166): a, c, t, g, unknown or other
ataaagagttcttgttgtattcaggttaccttttacagttattaaaaaaaatatttttttattattttttgaaacaaacaaaatgtgtatgatatttttacaaaaatgaaaatcattgcaaaattaaaattattatggttaaactaaaattataattaacaacatattttaaatattattttatctttttattatataaatatcacttgaagtaaataactttttaaataaaaaatgatgttgtatattaataacataaaaaaactaatgatataactaaaaatataaataactaaaataaagtacatcaaaacataatattaacttaatatatatatgtatacaatatacttcttaatggattttagcaggtaactaaataaatttaattataaatattaattttaaaaaatattaaacgattgaactttgatttaatggagaatattaaaaaaaaaatttgaatttttatgcttaatttaggtacataattaaaaaaaaatataaaaatattttttacactacatcaaaataagtttatataaaaatatttaaatcaaatttaatttttttatcattgtattttgttaaaaattttttattattgtctttttcaaccagatggaacaatccgaaataacaaatttttctaataaataaaaaatttagcataaaaatttaaatttttctaatattatttggctaatatacattaaaactgttaagatatgaacaaaaaattacaaatatgtgccaaaaatatgtactaggtatttctttaaccaatgacgtataaaattttggtgcacatatatattttttaagtattgattacttttataataaattagaggtgttttggtatatatataatttttatgtattaatttttctataataaattagagctttttcgatagatgatccattatatgtatatatatcaatatgtacattattttttatattaggggatgaagattcaaagttaagaaaccattaggttatgccaatgagcacattaggttcataatttttgtgatcatattgtttcttactcttttgaacatttccattaaaaagaaaaacactgaaatgttgtaattatatatgatatattaatgatacaacttatttagtatttttaatattaaaaagaacccattttaagtatttcaaaaatggagtatttttttatggatttggtttgtgtgaagtttccactgctatcaagaagtgggttactggaaaagcttatcgaagagttaaacaatgggagagaggaagctacaacagaactatcatcaacttcatgtgttttagagcttcatgacctacctggcggagctaaagctttcgagctcgtagctaagttttgttacggcgtcaaaacagagatcacttcctctaacgtcgttagtctcagatgtgcagcagagtatctccaaatgactgaagatatgggagaaagaaatcttatttcactgagtgagtcacttctaagtgaagttttcagcagctgggtcgactcaattaaggctctggaaacctgcgaagaggttcaaactacagctgaagagctccacattgtttcaagactcatagattcactagccactaaagcttgtgctgatcctggtttgtttaactggcctttaacggaccataacgacgttaagaatatcagtccaaaaacctcttctttatggaacggaatatactctgaaaccaaacctctgcctcttggagatgattggtggttcgacgacgtgtcgtttcttagtttgaatctctacaaacgattcatcttagctgttgaagccaaaggaatgaagcccgaaacaatagctttgtcaatcatgtactatgctaagaaataccttccaataatgaacactcaaacgagtttgaacgattacagttacgtcaacaactcatcatctggtgccaccatttccgagtcagaaatgaggactcttcttgaagagattgttggattgattccgtacaagaaaggggtcacttcttcaaagagtttattgaagcttcttagagttgcaatgatattacaagccagctcttcttgtagggagaatttggagaaaagaattgggacacaattggaccaagcttctttggtcgatcttttaataccaaatatggggtactctgttgagaccctttatgatatagagtgtgttcagaggattttggataattttttgagtgtctcccttgaatcttcttctccttgcatagttgaagaaggccatcaagttgtaagtactgctgagaataataattgtgatgggttgggacctatgacaatggtggctactcttgttgatgggtatcttgctgaggtggcggttgatgttaacttgaaattgcccaagtttcaagctcttgctgctatcatacctgattacgttaggcctgttgatgatggtatttataatgccattgatgtctacttaaaggtaaagttacctaaactgatcaaactattttgatatgaagttataatttcttatctaataataatatgatcttcccattttaagataagaattttagatcacagtactttatttacgtgtttcgcttaaacaatgtttatcaatctttgatcataaaattaagtcctacattctgatgaacgaggcaattgatgtattatttgacagaaaatctgtccagtaaaaaagatttcatatagtaaaagtcttatatttatgtgattatgcttactagttcgtctaagtttaatattaattattaaaccatgtttatatatatggaatttaggcacatccatggattacagattcagatagagaacaactctgcagactaatgaactgtcagaaactttcactggaagctagtacccatgcagcccaaaatgacaggctccctcttcgagttattgttcaagtccttttcttcgaacagcttcggcttaggacatcaatctctggttggttttttgtctctgacaatcttgacacctctcaaaatcttcctatcagcactggaaatcttggtctgatcccaagatcaaccgatcatggctgccgatcattggagacggtttccaaagatcaagaacagattatcaagtgtagcagtaatgtacttgatgatcatgccatgaagctacgtgtttcggagatcgaaaaggagtgttcaaacatgaaaaaagagcttcagaagctcaccaagaccaagaaaagttggagtcttcttcccaagagttttggctttaggaagaaatctcagtctaattctacgcaaaaggagttaaaacgctccagtattaagcttgtagtgccaccagaatcagctttggatgctaataaaaaaaatattgctgatcagaagattaataatggtgagctagctcatattagtcattaatgagtttcaataataatcggatcatgaattcatgatcatctttgcaatgtgatcagttttgaatcttttccttcttatttctggtatcaacttgttaataatctttattaacattgttcgtagttgttttgtttgttaattaagcttattagatatcatgaacaggaacaagagtccagcaatgtttattttgggaaagtaattatcattattattatggagtgtattatattatatatcatctcttaatcttattagagtttttactttttttttttaccttaattatttccaaggagaggagttatatggatactcctactaataatactaataaaagtacacttcaaaattttaaacattatgttaattgactaaaataaagtatatttcaaagtcctaatgaaaaaaaaaatagagttcgtcaatggaacacattatattgtttgtttatagagattttccgaaaccaattataaaataattaagtttaataaagaaagaagaaaaaaatcaaaattttacgtggttctcgcatcaatgagtcttattccacaagttagatttggaaaagcttcaaagtatctatatacaaatgtttttttttcttagaagatgaactctaattcttaggttgataaagctctcttctctttctttatataacaattacaataatttagaaggctaaaacaaagactatggggcctaaaatccaacccatggtcaataataatatgaacttggatttaatttttgccattttattttaatttaatgaaacaaataagtattttccaattttacttttatcttatcaaattatttaattatcaattttaattaaataattataaataattattaataaattataatttaaatatatttattaattagactcataaattgtctaaattaacaaaaaaacccttatttttattttcttctcaaaataactcaaatttggtgaatattctcaaataagacagtctatttttgaattctgattaacttattaaaataattaattgattctacaagacgatattattgtagacaatgtggaaatcatgggcctaagtaaccaagctcccaataaattaatctaaaatttactaagtagatttattaacatattcattctttcagactccaatatagatttggaattgcattgtggattacatagaatgctctatatatcaaaaatagatacgctgtaaattatctattgtttaatctaaataatcaatgatgccctatagaccatttacatcaagtaaggtcaaatttactgttttgccctttgatgtattttatttttaaaaaaattagctccttataaatgatattttaataaacaaatataattgttaaaattagagctcttccatttatatcgtttagctaagctctaaagaaactatcattttacatctaagtatttatattagcaatagattccatctctattattaaggctcccactcaatttctctaccgagctcccaacatgtaagtatgggctactactcgtaaactagtaatgaataagtctaagaactcgtgtagtacaattcagctaaagtttaaccatatgaagactgagatcaattgatctaagatcaactaagtggcattgacatagaaatgatgtaacaataagtgtatgatatcttttctactgttaatatcagtctggtttgatgtatcgtcgattcatctgatacaagtttactttactaatgctcttgaaaagatattctacttatccaagtgtaagcgaacaacatttgttgagtatcatgtccgtgtaaatctactccactaataaattttcagactaaatagtatgaagcatataataataatcatcttatattgggttgagatatactataatcatgagcaactatatgttcgggatttaataaaaattttatatcgaacttataatcatgaaagtaatcatatgaaacaagcaacaaagatgatttttgatttttttattaattagtaaataaaattatattgaaatagattttatttagggcataaaaccccaacatgtccgtgggtcttcgaggaggggcacccattacaccgttccctttgttattttctagggaggagggcccaactctaggattgttaaatttcatagcaggagggcttttttctaggaggttagcttgaacttgtagcagtgccaaggtttcttgtatctaacgcaaggcttctccctgctttgctaacctcctttaggtgtctgcaagctcctactagagtcgtattacttcaggatcttgctcgtagtattcgtcttcatactcttggttgtagtttttattatggtcatttcccaaccttcttgctcatcctcatcaatgggattgtcatcaacttgatttttgcgatgctggtcttttggttgcggacggttgcccaccttcgacattaccccattccttgcgaaagccatttgagcgtttgtcggggagagttagttttcgctgtctttaaacaacatcgtccctaacatgtcaaggagacgacttgaccattgcctttcagattgcaatcactcactattgtagatgacaactatgttaaatctttcctcatcactcgatgaaagcaccaaaatatttatcaaaattttcggaaatatattatgaaataagcttaaaaaagaatgaagaaaacaaccaagattttacatgatctaggcactaatgagccttagttctcgagtcaatattatcaatctaaaaaggcttcaaagtatctttacacaaatattttttactttaacaaatgaaccttaattcttaacctttttctaagaattgatttcccaaccaatccctttacatgaagggaacatgttctatttatagagtagaactgagtatgggtgaacccaaacccggtaggatttagaggtgtcaactaggtccccactgataaggtaaaatacaatatgtattcactttaggccaatggggtgaggcctaattcacgagataacggtcgtccatatgagtgggtaccgactataatgccacatgtcgtgcactgttgtgttggtactgagaatgtcaaagaatatgacgatagacaaaatggtggttgccttttggtagtgcgcgcactccatggacaaaccctgacatggtgggatcctgtgtttggaggacgctacgtatgatgatattcagagacttctagatgtctcttcaattgaccgcgcgtatactgataatccaatgagggcaaccagttagatcttgatggactcttcgccctctgaactaaacagcctttcccggacaaaagttgtccgatctgtctgccaactagacttacattcagattcggagccatagcctaagtccaaagatgggtcgacttataaattttagtgggcccagaaatgtgcctgctttagctgatgttgagctttggaaatgcacatgtcattaatctaaaaacgcggattacatttttttattttttagatataataatcaattattacattattctatattctacatgaaattagcttggtacattgtacacatagttgttttatttgtgaatgaagcttagacaatgataacaggttaacttctatttttattttggaagataataaaaagtagggtaaattgcgggataaatacctaatgtttcagattttacacacttaaatacctaatgtttattnnnnnnnnnnnaaatacctaatgttacaattctctt

SEQ ID NO: 16826 - DNA, 4211 bp, Cannabis sativa
cggctccgcctgcggctaccggactgactatttacttggctggtggacaaggtcaggtagttgggggaagcgttgtggggactcttattgcttctgggccggtggttgttatggctgcttcgtttagtaacgcagcctatgaaaggttgccgttggaggacgaagaagctgctatgccaatgccaggtggcggcggcggaggagggagtcttgggtctcctacaggtggcggagttgggcagaatccgcagttaatgacgggggcggatcagcaggcgaactctagtggtggtggtggtggtggaccaccaggtatgtttcatgggctgccccctaatctactcaattctattcaaatgccatctgaggcttattgggccactggtagaccacctttctaatttagtaactcacaacttcaactactacaactatatatatacatacatatggatagatagattatctatatatatacatatatgagttgatctcatcctcttcttctactccattttttcatcatcatatcatatatggccttcttctttccaagagtaaaattatgcatatatctagctatatatatgtgtatgtgtatgtaagaagtagtagtagagaggagtttcattgggaatgtcgagcgcgcgatcgagaaagttgaagcttaatatgattattattattatttcaggttttttttaaaaaaacaaaaaacaagatttttgtactctttttcattttgttttttggggtttagtttcgtttctcattttgatgacaagtttcagcttgttgattgatgaaggactttttgtatatttcatgatgaatttattatatatgtcgaattagattatttagagtactactattctctcaaactttattgtatgttaattagctttgctacctccaatgaattattgtttatttcttttacttcttgttggattatatttatacgtgccatagtttatatgagaatattaactagttgataatcatcttcatgtcataaaataaaactcgtgtctaattattataacagataataattggttaaattgttctccttaattcgatcgacaaggctaagcgctataaatatatatttctatatattcaaatacataatgatgtgccgaactaattatatactcatccatgtatatacattcacggagactgaaaaaattaacttatgtgtaattaatacttttggctctcaattaattaatgtatataattttattgaagaacggagttaaattactttacatttctgttcattttattttctgataaattcattacttttatggcgccattgtcatgttttatatatcatatgcaattgtctctatctattatgaaccatttttaattgttgaccatgataattattgtagttatttatatatgtatttgtctagtacagtgatttattaatgacatataatgcatagtaagaactaggtaaatgtaagtatatatcatatatatcataaacgtgatgtaattataattagtttacatatataattttaacattcatatagtttttgatatatccacattattgggatgtttatgtgtgtataatatatgatccttaatataatgtgataattatctatatatatatttgaactggtgaattcatctaatggtggttatattgcctatggtatatattacgtggaagaacagtgattatttgattattgtgtgtgtgcatatagagagaaaaagcaacgagatatgggcttgattagatgttctccatatgtaggtgttttgttgtgcaataagagaaggaagaagagagattttgaactacgtgaaatgtgtatgtatatatataaatatataagagtgtatgtatgcatatgtaggatatatatggagacatgaaaatatttgggtactggtatacacgtgcactgctctgatgaaagctcctttacgaggcaaacaacatctaacaacaacacttccattaaaagcccacaacacatgtatatatgtatatatgtatgtatatatatatgtgtatataatgtgtttctttcgatctcagaagcttttgaagaagtatcatgaatgaattaagtcccttatctaactacgtgtgtatctttatttagatcttgggttcagagaatcaagctattgggcagctgtatctcaaattagctagtcccactcgatcccacacacacagcttactcatattcatttcatacatctattcttaattctcttacttccttttttatcttcttttattttttggaaaaggattatatattctcttactttaacgaaatatatttatatatattatatacttaatatatgtggtgtgtacaaccttatataatgtgaacttatctattattcttgtgtggggacaatagacatatattatatataatatatatctagaaaataaatattttgtacaaatttggtataagacaaagattgatgtaatctatagtatataacaatttttttcactcgtttacaaacaataaagaaataagacatcaccaactcatcgtgtaaaataataaataatatatttttcagtgtagaactcttgcaatgtatgtatatgtacataaatttattattgttattgtttttactttatttgattcgtggtcactcaacaaaaaaaatattaattcaaatatatatatatataaataaatattactgcatcgcaatgtatcgcaaatgcgattagaagtacgtaggaaaatgtaattataataacattacattttcccacaatgttgtgtttttgtggtagttttagagcttttattattggtaataattggctaactaattattaataataattaattagaatactatttttgaaacccaacggttttattttaaaaaaggtttagttatacatacattaatgattgatctagctactatatatgttgtcattattttagcatcattattaatttctttgtcaacttgctgctttttatatcaatatttttattattattactactactaataatcattgaatggcatcaagaatgtatatagtacagacttatcataattatgaaaataacgaataataacactttatagatataaacagaaatttatataaaaataaattaagcccaacaagttaataacaactgcttcatgactaatgagtaactagaataataataataaaaaaaaaattaaaagaaaaaaataaaaaacacaaactagatatttatctattttcaatttcctatgtttttctttttctctatacagataaatatacaaactgaatagaagctaccacgagaaaggatcacacctagttgaaaatctacaccacaaaacaataatcatagtaatttcatcaacaagaagttttggcttgcggtgtgtaaaacaatcaaaactaataaatataatcactactataaaacggaaatggactagctgataaagacaaagctaggtaagaactacagctgatcaataatcaataatcgattcgtaggcgtatcagctcggcgatgaaagtggggctggaagacagtgttctttgtgcaagattcctaatgtcttctcgtggacaatctcgtgaaatgcgcaccaactcccacagagctcctccaattatcatgtctttagagtttacttctgtagagaaaaacgcagaggtgcaactagtttcagcaaagatggtggcttcttattatttttagttcatagtgaaataagtaaaatagaagaaaactttaccatgttgtgccaagtgacatagtgcgagttcaatatggcgcctaatggccgaggcttcattgtttgcgttctgtacaatccatggcagcgctccatcctcgattagaagagactttccggtctttgttcctgaatgattttaaaacaagtataattcattcattagaatctgacttttttttttgttgttgttgcttttatcaaaatggcatttaggtggcgtttggttggaggtaatgaaatggagtagaaaggaaacaatctctattccattcctttgtttgttgcatattaaagtgttagaatgtcattctaatgaaattgtctttccaccattttggtaaaatgacaattccattttaaaatggaaggaaagaccattccaatgaatgatagaaaaaatttaataatttttt

SEQ ID NO: 16827 - DNA, 4412 bp, Cannabis sativa
tctaacaattggtgctctcattgatccttcattttcacaatgaagaacgaggaactcgctgctatgattcatgcgttggaacttaactttcagaaacactccgaagaacagtttgctcggtttaatgccaaattggaggaacaagtgagaagaaccaactcagttctctgaagaggtgaacaacattttgaagaatatgcgtgtgaaagtgcatcggtttgatggtaataacgttgaagattgggtgtataagatcagtaagtttttcgacttacatggagttcccccaagtactcgattgtctttgattgcctttcacctggaaggaccgccatctacctggtttcagtggatggagaagggaggtgggttttctgattgggattcttttttacgagcattgcgattgcgatttggtgtctcggtgtatgaagatcctttgggcagaatagcaaaattgactcagacgggacgtgtggctgagtttcgagcagaatttgaagagcttatgactcggatttctggcgtatccgagcaatttttcctgaatttctttgtatggggtctgaagaatgagattaggagggaactgttgttatcaaaaccggtggacttagctgatgccatggctaaggctcaactatttgaagataggcatgacgatttactggggcgcggtaagacggcgagcaatcgtacagggtggtctccgaggtttccgatttcaccaccaacaggtcagagcccgactggatctgttataacttctcctaactctactgttgcagtgccaccaaaattacacaaaccaagttcttcgggactaccagttaagcggttgtcacctatgagatcaaggagaaacgggataaggggctttgttttacttgtgatgagaagtacagtttcggtcataaatgcaaaaaccgtgttcttattctctgcactcacggtgatgaagattcagatacagcaatgcttcctcaggatcttgatggtcttgaagaagtagatgatgagtccaccgaggaagtgagtctgaattcattggccaattcgtccaatccgcgcatctttcgtattacggcgcaacagggcactgagactttggaagtgttaattgacacgggcagcaacaataactttatccaggaagctttggcggctcgattgggactagcatgtgaagatacaaagaaatttaaggtgtatatgggaaatggcaactccctgtggtgttctcaactgtgtaagggtgtggaattaattctccaagggcacaagtttttggttgacctgtatgtgcttcctatttggggattggatgttgttttgggtatgcaatggctccaaaccttgggaccttgtatacatgaccaccgagctttgacgatggaatttcagtggaagggcaacgtgattaaactggctggtatgatgccttcgggagatcaccaactatcatccgcgcaactgcgagttatgtgtagagaaggggatatacaggatgtgttcatgctagcaacagttacacaagaggaacctgtgatcaataaggagattacagatatggaaacccaactcctgcacggacgtggtgttctttttgagtttcaggatgtgtttgccgaacctacacagctaccgccccaccgattgacgaatcaccgtattttcttacaaccagggtcaaaaccagtgaatgtacggccatatcgctacccctactttcagaaggatatcattgaaaaattggttcgcgagatggaacaatatggattcgtccaaccaagcaacagtccttattcctcaccggtcttattagtaaagaaaaaggacggatcgtggcgcttttgcattgattatcgagcactaaatgacattactatcaaggatcgatttcctattccgaccattgacgaattgttggatgaattgggtggagcaactgtattttcgaagctggatttgcgggctgggtatcaccaaatccgtatggactcaagggatattcataaaacggcatttcgcactcatgaaggccactacgagtttcgggttatgccatttggtcttactaatgccccttcgacattccaggccaccatgaatcaggtattcaaaccactacttcgtcattgtgttatagttttctttgacgatattttggtttacagcaagactggcgaagaacatcgctgccatctgcgcctagttttacagaagttacgggaacaccagttttttgctaaaggcagcaagtgcaagttcttccagtcggaaatcgattacttggggcatttagtttcagctgaaggagtgcgggccgacccttccaaaatcacagccatgatagagtggcctaaaccgcgcactatcaaacagttgaggggatttctgggtttaacgggttactaccgtcgctttgtagcacattatgcaaccatagccgcccctttaacggagcttttgaagaaagataattttgtatggacgacacccgctgagttagcttttactcagctcaaggcagccatgacagaaactcccgttcttattttaccagatttctccaaagtgtttgtcattgagtctgatgcttcaaatgtcggtataggagcagtcctaatgcaagaaaatcacccaattgcttttttcagcaagaaattaggtcccaaatttgtgggtacgtcagcttatttacgggaactaagggcaattgtcgaagctgtaactaagtggcgacaatacttactaggccgccactttatcatccgcacagatcatcgaagcttaaaagaattgctcacccaagtgatacaaacacctgaacagcagcattttctacggaaactcattgggttcagtttctccatcgaatataaggctggcaaaacgaactcagcggcagatgcactctctaggcgttatgatactgcgccatcacttcttacagctgctatctcctctgttaattttgattttctggatgaactgaggcgtgaaaacaccacatgtcctgaacttcgacacatccacgaacaacttgctgctggttccttaccggcaaccgactattcagttcgcgaagggttactgtactacaagcagcgaatacgagtcagctctcactccaattttaaacagcaacttattcgagaatttcatgagacgaagatgggtggacacgcaggtatcgaacgcacatttttacgattaagtgcgaatttcttttggcccgggatgaagtcggaagtgcgtagctttatacaagcgtgccttgtttgccaaacagtcaaatattcacccgctgccccttatggacttttacagccgttggaattgccggaacgggtatgggaggatttatccatggatttcattgttggtttgcctaattcatttggggtcactaatattttggttgtggttgatcgcttcaccaaatatgctcattttggtgcattaccgactcattattcagccaccaaggtagctgatctcttctcccatatggtcattcgtctacatggtttgccaagatctattgtttccgatagagaccccatttttactagtactttctggaagaaattgtttgagtttatgggcacaaagttgaaaatgagttccgcatatcatccacaaaccgatgggcaaactgaagtcaccaaccgatacttggaacaatatctgagggcgttcacagcagacaatccaaaacaatggagcaagttcctttcctgggcagaatatcactataatacaagccaccattctgctattggtatgacaccttttcaggcagtttatggtcgaagtcccccaaccattccggcctatactagaggctccactactattcaggcggttgaaaacgatctgctcacccgagacactattttgcagcaactaaaagacaacttactccaagctcaaaaccgtatgcggcagcaagcaaacaagcacagaagagatattgaatttcagccgggtgaactagttttggtgaagttacaaccatataggcaaggaacggtggccaagcgtcttaacaacaagctgtgtagaaggtattttggtccttttcccattgtagctcgtgtaggagcagtggcgtacactctgggattacccgcgggcagtcgaattcaccccacttttcatgtttctcagctgaaaccgttccatggcaactccaacgttccttgttttccactaccagagcatgctgtcaacaacaaaccagtggtaattccacaagccattctcgccacaagactcaatgctggccaaagacaagtgcttgttcaatggtcttcatgtgccccggaggatgccacttgggaagactttcagcaattctgtcagatatacgggtttaccaaccttgaggacaaggttattttcga

SEQ ID NO: 16828 - DNA, 7767 bp, Cannabis sativa
  modified_base (2411)..(2413): a, c, t, g, unknown or other
accaagataatgtaatctgcaagtagtgtctctgatgataccaaaaataaagaaaatacattctaaattattgaaaacaatacaagtcaggtacacgagtcactttttccctctatagttgtatacatgctattcgttcctaatggttttctcttcctcctgttctacttttttcaaactctaatcggtgttataaataaatggaaaaaagaagaaggattcctaccaagtaacaagagaagaactacagcactgctagacaaatatagaaatatctttcaacaagtgctagaaagccaggctactgtaagtttgagacagagtttctagtttacactagaaggaagtaagcttccatacactaataacctcaaactaaaaaactttcaactttatattgaataccttgtacaagccgagcactttatttattgcacaacaatttttccgttgtaatacatttgcacaaaattaacatctttctgaaaaaaatagcctttctatgaactaaataattggtcacatttgaaaatgaatgaacaattgcttgaatatgttgctgacctcattgctgagccaattatcattggcaatgcacagagctggaatgcccttcgacgaccaactccatctgcaagccacccactaaatagagaaccaacaaaagcacctcctaaacatgtacttaccactagacctacaccaacataagaatagaatatatcaataaaatttctttggagaagaaaagaaaataccaaatttgagagcttgaaagtacacagcgaagattaagactgctattaaataaagtaccttcagctaaagtattcccactgaagccaagatccacagaaatactctctagtgtctcattgaccacactgcatagcataagaacagagtaaataatctatgctcatattcatgataaaataataagtaaaagaacaagaacaatttggtaggtacccgagatggtatccaaacaagaatgaagaaatcgcagcaacaagcatatgcggtaaagaacgtctccatgaggggttgacagtatctttgccattcactaaacgttctataaatgtccatacaagaatttaacacggctgtcagtatcatcagtgatatagaacctaaatcagagcattgctctagaaattaataatgccaatacccagatacccacaacaaataactacatctgtataaaatcatttgaaatactattttaagcaaaatctacttgtaaaacaagaatcccaacaacaagaacatagaaattagaaatgatgaaagatgatttgaaagagtaccagaacttccatctttgtcataaccattgaaataatccctcgctggtccacgcttgtacgtggaaaaagcgtcgtggagacgccctctcatatcaaatattataaaacctccaacttccgcaagagggtgttctacgaccgactgcaaatactatgcttgtaaatgtacatacagagtttcagcatattacattttcttaaaaaaaaaaattaagcaataactgaataaatcaaataagacaaatatacagagagagagagaaccttgtagaaatgcagaggtacgaaacagtgagattaaaatcaatctaagatagaagacgatgctaaaatgcgccgcaatcagtgacactgtaagtgtaaagagacaaggaaatctgagcgattgagcgtgtgaaatcttttcttcttcttctttatttgtgttaaatgtaatggcagagatgttagattttagagagagagagagagaaagaaaaaggagtcgtacataggaatgatgatgatactgacgattgtactactgcaaatcacatcacatggtaatggtaatggtaatggtaatggtagtgagtctaaatctaatgagacccttttttagaaaaaaaaaataataataataaaaggtaaatcttaagcagaaagacaaagatggtaaaggaagcaaaagagaacgacacctgtcccctaatagttgtcaatgcccggatcaggtgttttgcatctttcagatctctccaatcaatttcggacaccaatttatttaacatccaaactctaatatctcaacttttgtttgtattattgttaacaaggttattagcctactactagttcagtattaactaattaatttttttttattgaaggagtattaattcactaattaatatattatatattttcccttactcctaattattgggaggaaattaggagagtcagcagcaagagcaagcaacatacgtcaaagtattattaaactactactactcaattagtttaatagtgacaattaaaataagctaattaggatttttgacccgtgaacttttaaggttgttgaaaatgctctctgaactattgagattgttnnntttaaggacttttgtctaatttcactcaattttactatttcagtgattgcttatgtactaaaccatgctcctcagattttgatatctaccaaatcatgccccttgaactttgatatgtactaaattatagcccctgaacttttatctatgttagacttttttctaatttagtccttaaatccaacaatctcaatagtgcagagagtatttttaacgagcttaaaaattcaagagacataatttaatacatatcaaagtttaggagcaaaaatcctaattaggcattaaaatatcgttggcagcaaattaaagtaagaataagatttttcaacaaatgatattgaggtgggaaactgggaatatgagatctacatctatttacaactacaacttcaaatgctgggccgattgatatattattatatggccagacaaattaattatgtaggacccaacctaccattcaaattcaatcacagacaaggtccattattactgccaccactattaatttattttcaactcttgttttctttggtgctaaagttaatctgcacaactatacaattgacctttcacatattttgatttgatgaaaaacaaagcaattacaagttaaaccttaattcctcagaattataatcaaatcgtcattagataatgatgcctaatctgcacccactctaaacttttagagacatgcaaaagaaaaaaaaaacgatagttaattagttaacttaaaaaattagccaatcttgcaacctttcgagaactcaaatcgtttttttacaaaaaaaataaaataaaaataaatagcatatgtttattaatacttgttaagatagtagacttcttaacaaaaatactattcctaacgaaatatataaattataaaaattaaacatcgataaagacattttttttcaacaacaaacttaaattctctttcaaaaaaaataaaataaagtacaacgacaacaacaaatttaaattcagttgtggggggtgaagtaggtgtcattgtaagaagacgtggtacaagagaaattaactccgattcagggaaaaattaaatgctcttattacaaataaatcaacaaaaaaaccttgttagctttttttaagcttaatcatctgtaacaataagatccatgatatacaagcgagtaaatagttacatacatatcaaagtttattaaaaaaaaaattcactatggctgcctaaacaccttaaccaaatcacaaccatcaaatgagtatggatgaaagaaaataaaaaatcgagcagtgctgagcaacccaatagcgttcacccgagtatacgataacggcaccatgaatttaagagttgggggcccttcaaacctcaagagtttctttttttcttttttttctttactatgaactcatggtctggatctgtaaagtgtaaacagaaataatcagggtgtaatgtctcagcaaaggtggcttttttattaataaaaaaaacatgtgaatgaaaaggagcaatttgttcagtcttgcgtaacccataccttgttcacaagcagattgacttgctctctgtacatctccttcaagtctataatatcagcacggagttcctccaactacaaataaagcaacgatcgtgaatcagcgaatcagcaactgacagctaaattctcggtataatcaaaagtacaaacgtgccactctttgtggaagaattattaaatccttagtggttgtcttgaatgcatgtcaatgcaagaaagtgatttcttttttaagcatcaaagacaaggcttcgtttcgaagaaacagaaaagtttggacctcatcttactaaataatataagaccaaccaataccccaccccacaacatttaaacttgaggccaaatccatttacgatcaaagcagaaggaaccaaagtgaagcaatctatacctcctcgtctcgttcacccattagctccagtgcagcagaatgtctcctcctcagagattctagctctgcctttataccaggaactgtggcagcctctgctcgtagtttttcacactgtaaaagtgtacacaattctcaagctcagttacacagacagacattaaaaaaaaaggaagaaaaagaagacaacagaacaagacgaggaaaaaacaaacataaaagtgaagaaataggagcccacctgctcagtcatttggaccaactcctcagcaagagaatcacgtattgattccattgttgcctgaagtaagtaaattatcagagtattaataaaactgtgtaaagatgaaaacttaagtagtacagaatcagttgaagaaaaaagaagaaacttttttgacacaaacaaaagcagctctttgcaaagctctgatatgaattgagatacagcacccaacatagaaaaggaaatgtagagccaaaatagttaaacactagagcttaggaggaaagagaaaaacgcaccaagcgggacatgtatgatgcaagttcaccctccttttgccgaagggcagattcaaaagcaccaggtgtcatgctcttcatataatagggattcatggctggctccccagcactcctcctctcagataaattgtcagaagagtccagagatgcttgtagatagtagctttcttccatactgccaaggctgctagcatttgaaagttttcggctcaagtttcctgcaagaagttagagattagcaatcacagaccacacaaataaaacagagtgatgttgaagttaaaaaaaatatatgtaaattacaatccaaggatcaaaccattctcaaaagcagaattctgcctagtaggagtctgatcagatgcagcagctgaatgaacacgagctgtcctttccatatccagccgagcagctttctccttctctatttcctgacaaaattcaaaagcttaaatgagtgattttgaagagaattaataaccaaacaaatgcattgttatagtctactgcaaacttattttttaataaagataccaatattttttttcgttttgctttgtgggggatacctaaaattttataaattgcattattttaagataaaattactaagaaaaatgaaacttctctaagcattaaactttaaagagaaacaaacaaaagagcaggaattttctcagtcaattccttcatcacattcctaactcaaacatacctctcaacctggccacaaaaaaactttgaaaagaagaatgaatccttgttcaccaaaaatattagttataacaaagaaccggatactcaaagaaaataaatacaaaataatgaactccaagaatccaaaaaaacaataaaaacaaaaaaaaatgttcttttttgtatgagaccaagaggctatagccacttggttggcagatcgcttcacaaacatcacagaaacattagaaagaactgatagaagtctttcacagcactacaacggatgtagaaacaaaagcatcacctgttgtaacagttccctgtgcatcagagcctcttgtaactcttgcttatgtttacgtttgagttccctaatttgttcttcaagttgggtaacacggccttcctgagtgtcagcttcctcctttgctacaaggtactcctgcctattttcagctgccctttgtctttctttttcaagagatttacttaactgtgtttgttcggctctaaggcaagaaatctggaatatagataatgtgtgagcacatgccatataaatgaaattcctttgtaagaaacaaacattaacccttaaggacaacctatacctgtgcctcaagaacattaattcgggataaggtttgagaaagacgttcgttcacagatcgttctctttcctcagcagctgcagctttgccctccgcttcctattagatttgagaagaataaatgacagaagcaagttccaaccaaacaataactagcagaaacaaattacaaacctggagtcgggagttaagggatctctctacagcagcccaagcttctgcccttcttgcatttgtatcctgttaccaataaatggaagggactcaacactcaagcaataaaacaacctaattggttacaacattgaaggaaatgaaataccactagcccaaacacaatttattctttgtaatagatcaaaagtttattaataacatgctgcacctgcatagcttcaatctgccttagaaggggccttgtagaatcaggaacttgtgtaatcaactcctcacatcggcgctcactttcctggataaaacaaacaaattaaatttgcaaaaataaaggcgaacagcgaacaaggatagcaagattagccaagggagttgtactcacttgataacgcttctgaagatcttcaatgtctcgacgaagcatgtcttctctaaatacagccttgacaataacaaagaacataaatcaaataatgagtctaactaagcagaagatttaataaaattaaacagaacaaaaacctgctgctcgtttctgcttagcgtttgcctcaattcatctagtgcctgaactaacatagactcacgttcctcggcctctctcaagcgactctctagttcagatctggcctcgttgttggctcttgcttctgctaaggcttcagcttccttggcagcatttaaagcattagtatagtattccttttgcaatgtaagttctgactggtgtctttctattgtttcctgcaacaatttctccgttgctgtcttgtctctcttgatgctctcaactttattctcttctacctggatgtaaaataagagttattcacaactcactttaaattgtttcagaaaagaaatgaatgaaactaacaattatttagctggtgaaacttctttcattaaaatggtttgacaacatttacacatccattaaactttctactacaactaccgggtaatcatatatgcatgaactactatttctgtgttttctcatcaaggtcttaaataaacttgcatgatttcatatacatttaaagtacagtatagctaaacaatatcctactagtctcaaatatgagaacgtgaacttaaatttgaagtgaagcaaatgctggagattagccaatttatatgaaagaaatctaaatacacccacattctctagaaagagtactcttaactttcaaatgagtggaacaaacactaagccaaatatatttatgtcataaaggtcatgcacattgaaagagttagtgtgacactaagagaaacggtcatttcagacaaataaagcaataatcatgaacttatagcacgtcataggaatcactgacctgaagcttagtaatgaagactttcttctcttcttcaagctccctaatctagctttcacaaagc

SEQ ID NO: 16829 - DNA, 7681 bp, Cannabis sativa
  modified_base (26)..(66): a, c, t, g, unknown or other
  modified_base (2637)..(2649): a, c, t, g, unknown or other
ttttatgtgttttgtttatcgttttnnnnnnnnnnnnnnnnnnnnnnnnnnnnnnnnnnnnnnnnntagatctaagttcctggtaaataattccaacataatcctgatgtcaaagccaccatgttcatatcatcagtagatcctatgctgcaacatccatcatatgctggacgtaatttttcaagctttctcccagttgttgtttgacactagttaaggaactagcttcctaatcaaagtttgttgctgctacgattactttttgaacactacttgtaggtccttccaattgtggattgaacctggggataacctcttccaccagtctttcacgaattttgtcagagttaatgaaaagcaaagacactttgcatcatcactagccttagcaactttcatcacacgattgtatttggataagtggtccctagggtctgtcgttccttcatacaattccatttgaggcattctgaagcgctcatggcagcggtgcatctataattctctgcacacatggttttgtatcttcttcttctgaatcggacacaattccattctgcttttgggagatcttctctatgagcgtcgttaactccgcaactttacattctaagcaatgagttttatcatttgaagattcccttctacagactcgatcattgatatgattcatcaaatcattcccatgaggtctggcttttttctattttagcattttctttcttttcaattaaccttctttaaagatcatttgtggagagacttccactgttgttgtctgaaactagatgcacctcatcgacatcatcactttgactactagaatcattatagagattcttatccttcccagtagtaggcttcttaactccggcatcagacttatctttctatgcagctctgcctctagaattagtttggtcaccctgccctgaagcatggtttcctttctttttctattgaagttggctggcagatttagatttcttatgttgttcagcctgagaaggcttcttcgaggtttcacccactttccctttccctttatcctcatatggatcataggttctaagatttttaagatcaactttttcggtggtattattctttggaattgtttgtttggccctgtttcaagaagttagtgttatcaatgcaacctccattcttgatactttttcaagaaataacaaagagaattcttcttgccaagttaatttgctttcagttaattctaacttcttggccataatgaccagagggtctgactcgtctagattgtccttctttttagcaccactatcagtaggcatgtcatggtgatcatctttcagatatcctgatgatcatcttcaagatcatcagaactattctcccttgattcctcatcttcaattataggatcgtcaagattctggtctttaccacgttggtccttgtggtgactggtcacctcattcaaatcttttgtatcccttgccttagcattaggatcagtataacgaagaccaaatttatttcaggtgaggaccattattactgaatgtaatcttcagatagtaccactgcttccttcaactctcaataaaagcatcaaaatatttagcgagatttttagaaaaccaatgataagaaattaaaactgaagaaataaatatttcaaagagagaaacagaacaacacttagagttttttacgtggttgtggtgttaaagagccttagtccacgagtcgatattattatgtattttagctagaaaagcctttgggaatacaatgagtatatgttctttgtctttgtctgagcaaaaattacaagagaattcaacccctaattcgaaggatttgctaggtattttatagtgtttataggaattatacttagtttctatctttccctttaatggggagtttacatgaagaatacatgagttaggtctttattcatgaggcccatcccatgagatgataggtgtgctgactaggcagattgaacacgatcaagttgttattatcgtgtcctataattgtgggtaattaattgtgaattaattacttgatcttcattttgagtagttttcccttttaacttgatatgatcttttggctgagatttaagaaaaattccttgttttgtgcgatttgataaaaagggaaactatgcttggcttccaggaacacgctttctagccttctaaaagcgcaatactgagaaaacttccgggtacacccggtccttagcgggagctcacctgaacgaggagggaagataccttcctggaaggtcttgctagacttaggattggcccaagttatcttctttgggcccactgttggactttggatactgttttggaatccacacgtctattaccgaatacgtgaataacacgtgtcaacataactaatatgaatacacattttaattattttattagattttaaattatttttcatttaatttttaaataaaaaataaaaatcaaatgacttggaccaaatcaatggttgctatgtatgtgtcaatgtggtatttgtgtcttaaggaactgaggatggggtagtcaaaagggtgaaggctgatagtgttctgttcgtcttgaacataaaactgtgtgtgtgagagagagagagagnnnnnnnnnnnnngagagagagagagaaatgaaagaaaaagagaggaagaatgatgctttgggggtttgaaccagagaagaaaaaaaagaaatcaattggaaaaaaagaaaaaaaattatttatattaatttttaaataaattttataatatttacataattaagataatttggaccaattatgtacacaatactaatttagttagcatttaattgtcaaaattaactaatgtcttaaatttgtaaattgaaataaacttaaggtatattgacaaaaaatgaaaaaatggggcttaaatgtatacaatttaaaacatgaggggttttgatcacaaatttctcaaataaaaatcatgaaagcgaggatgacatggaccgactccttcgaagtgttggaataggggacgatttttgggttagagctgttggttggagagtatctctgcttctataaagctctcaaatccttgccctcttcttcccagtgaaccagccatggctgccatcttagctcgcaaatctcttctcgcccttcgcgctcgtcaacttgtaagaatctcttctcaactgcgtttactttcccattttcattttgctttgtttgattcctgagaaaatctaaaatctaaaatgtcaactgaaattttaaatgcccccaacttattaattatctgctgtaattgatcgaacataatttttttgaataaatttctaggccttttgaataatatatatttttgcattgaattcgctcatagtaattccctatacgagttatccagttttattcatgggcgatcagcttagaaagggttttgttttttataccaaaatagtgcgaaacaaagatagattatacaaatcattcaatttcattgtcatttttaagtacttatgcttgttttaacaatgtaaatcctttttctaatatctatatttctatttgttaattattgacgctattttattaagtttgaaatctatcaaatttctggtccattattcggcactgtcatgactcatgaatttagtcagaataagaaaaattagagattagatctatattttgcgctttttatgtctattgacccatttaacgttttgaagttggttaccataaacactgaggctgttgtcaccattatattgggcctgcaaaactcgaatgtttatgtactattaggggaacaataatctgaaacgaacttgaatataaacaaatttgttttagtagttgttttttcttttggtggaatttgttaaactgttgttgctcatgagtttttgtttttgtttttctccctcccttttttatttatttattttaatattttttattattagtaaatttttttgtgtgtttggaaagattggaagtaaaagaatatattttaaaatgagagtactgttttgtaattgagttggaatgaattgtctacaaggcgggaatcacccagcctgagataaatcatagggaacactggcctctaggctgtagttcaaccatggatggatgaagatattaattatttgcctgccactttgatttctttgctgccaaattagttgagtatggtttttgttatattttctgttgtcatgcatcacttggatttggtttgatttgattgttatattgattattctttgtatagatgtattttttaaaattttaccaacgtctttttttcctggctttgttaggctgttccagcacaggttctgcagggttcacaccattttggacttcaatgtacacagtcctattctaccaataaaggttaaatttgctttgtttaatttgtcatcttgcagcaataacaagtagtgtaggagggaggagagaggcaatcaattgtggtttgtgccatagataactcgaaaagaatgattttgaggtccataacaattaaaatattgtggctgtttaacttgtgttaggtgcataatgatcaccattagagtgagtaaaaagagaggggaatgaagaggagagaaatattgagggaggggggaggggagttcttataagattttgaatatttttatactcaatgagttatatattggctctttaacttgtgttaggtgcgtaatgaacataatgaacaccattagaatgggtaaaaaagtggggaatgaagaagagagaaatatcgagggagggaggaagggagggggttataattagagtttgaatgtttttgtactcagtgagttatatatttgcttctgtgattcaaatgcagatgatgtagaaagagatcagcttacaaaggagatgtcaaaggattggagttctagtaattttccttactcttccttctggtccttaaaatattttttactttgctttttttatttggtactaatctatttcgagtaattacagtttttgtggtccttaaaatatttattactttgctttttttatttggtactaatctattttgagtaattacagtttttgagcgaagcataaacacactatttctcactgaaatggttcgtggtctgtcgctgacactcaaatacttctttgaaaaaaaagttactgtaagtgtatttctatatcattatctagcttgtagtctactaccctggtaattatatagtaagcctactttctatcatgcagatcaattatccttttgagaagggccctttgagccctcgttttcgtggtgagcatgccctgcgacgatatccaactggagaggagcgttgcattgcatgcaaactctgcgaagctgtaagaattggagcccttaaagttatgagtatgttatgtttatttacaaaaggagtaaatgaaacattttactatctgttaatcttgaaagttcacttggatgtgaaactagggtaattttaagagtttatcattatttgaaagttggttgtttatcgaggatatatccttcagagatggtattggctgtagaaagtgttccctagtatctttgaataattcgcattgtcattattgtgaataggtgcacccaagaagggtaactcacatggtcatacatgtttgcttccacaaaatttgaggttaggggggagcttagtttaaaaaagaacatgtatatatacatattataaatagttgctaggcaggtataaataaatacaagaaaacaacgaaagaatttcagccaatttggtggtcgctgctcattctactttgtgaatagccagaatggagtatttttacacattcgcaaattaatttaaaacggtctaaatatatgctctttttatacacgagttctagactttaaaatttcagtttaaaaagttggtttgtgttaatgtgtttggcctcttatgaacatgatagtctcttcaactatttatatgcatgtcctaattaaatgatacaactttctgcattactcactctgggtatgaaatccattcagttgacgtattattttcttctctctccttgtatatgtgtgcatatgtatgttactgtaagtatatttccatcagtttgagctttatactatgaagctttaggtaacctataagggcttggacccctggttaggttcgtgatttgttacaatgatgtccatcttgtggttacacaaggggatctacttagcaatttgctagagttacattcagttaataattgatggtatagtcagacatatgctgtggctcattaattgataagaagtgtgtatttttttttactagacttttaattatgcgttgccatatccaattcccaataataaatgatgtgcttttcagataatactgcactaaatttggacacatttgtattaccacatgtaatcgtttaataaatttactcctaaatttgattacatttttctcttcttgtcatgggtcttaatctctggagtaacctattgacacttatgtcagcttcatgtattgtcaattggttgtaacctattgtactacatttagtttttaagttatattagttacattagttttttgtgcttgtaaaatcttaaatttgttattcctttcttcagacgaaaacctgcttattattggctctttattttctactttttttttctttgtttgaggaaatattatctctttattggagcctgaattgttagcattcttctagcttcattcaatgaggctcttcagcttaattgtccagttttttctcacaaactgttgaatattagatatgtccggcacaagcaatcacaatcgaggctgaggaaagagaagatggtagccgtagaacaacaaggtgaagaatctcattcaatttcaaccctctctctctctctctatctctctctctatctctctctctatctatctctctctcatttgtgtagattttcaggtatgacattgacatgacaaagtgcatctattgtggtttctgtcaagaggcatgccctgttgacgccatcgttgaaggacccaattttgaatttgcaactgaaactcatgaggtaaagtagcatccttaacagttcatcaacaataatattcaaccatttttacgataagcgacaacaatcattaacctactcttctctattatttcaggagcttctgtatgacaaggaaaagcttctagagaatggagaccgttgggaaactgagattgcagagaacctccgatctgaaagcctctaccgttgaatttttctctacttcccatcccatggtttcatcatggtctagataatgcattttctcagactttttgatgatgtggaaataaatggatctatgaggagtcttgcagatctttgtattgttttcctaatctctgttgattaattccaagcaattggatactgaacgccacaaaagttttgttttggattatgtattttgctctggaagaaatatatgtgaaattacgttggaacaaagggaaagaaaaacagtttcttcatatttttaatatatttatcttttcaaatttttgatatattagccttttggggataatttcatgctctcccaagtttatattaaacgtttgtttctcatcatacttaggttgtgtttgaaagtaa

SEQ ID NO: 16830 - DNA, 4969 bp, Cannabis sativa
atattaaccaaattttaaattttgtatcaagttttgtaattgagcattgaaacaaaacgctaacaattgatgcaacatcacaaaattattttttgtgtcaaatataataaaaattttacatctccagaacatgggtctaagtatgataataataattattataataattataatagataaaaagatatgatgctagcactaaccatacagatgccttgactcaatattaaaaggcacatgctcatccttacatgtgatattatcttttggcataaatgcacaatttatgagcacaattatacagcaacagcagcaccatcttcgttttcctattccaactgttctgaagatttgatgagcggttcggtctgcggttgatcggctaatatgtctccaacttgatcggatgactttggcttccagtatattgcatagagaacaagctgaaggcatccaaggaaaaatcctgtcccatttggtatctacacagtcaatatgtccatctcatttctccaattagttgactaaaacaatgaggaaaaaaattgttatctataggaaaatattatatgaaatttgaatggaacttactccaacaaataagtcttttgctagtagagcatagatagtccaaattccaccattgaaaaaaaagacaagggaaagaaggaaaggcatgtattcaacactttttgtcaaatatactgttttctgtaacatcaaaaatataacattagaacaaagcaaaacagagcaaattcaaatcaaagtgtttgctttcatgtatattatctcctttcataccatagcagaaagaggagaagcatatgcaatcatactgaagatcatacacaataaccctgcaacatcaattcgagtatcgccgtggagagtaaattgggtaagcaaaattgctgctgctggaaataccacatccaaaacaaccacaagaatagcagtcctgatctgataatatgagacatgttgatttaaagagtaagaaaagctaatacatgttaaaagagatgaaaagggataccttcattcttggaggtgcataaagaaggaatatgaagagaaaaattatctcaacaagagcaccaaacatatttatggtagcaaccaaaatactgtcaggcttaataactccataataaacccaaaagtaagcattcagtaatttgctaatgtaaggtatgctctcaaattcttcagttgatctacgcttcaggatcctccaaaacacatttctgaatccaaaaagtttgtttacgaagactaagaggtaagaattgaagatgacaaagtgtaactgagttgaagtacttacgtaggggaaacatagagtagccctgttgaaatattacctgtatgaaagcaaataacactagcatcatcaattcacagtacaacagaaatgatagatatgtactttattagtaattacctaggagaccaaaaaagataattatcgcactcgccatgctcaatcctttgttttgaataagagttaggaactcctttcccttctttgaaggtgggattttcctagattcaactttggtcgatctgtaagtacagcaataattttctattcttgaggtgtgatcatcttcaatgggtcactcatcactttactttcagtgaccaatatatatgtgattcacataaagtatctatctctcagcttttcagtcacctaacaggacaaaagtaggacagcgatgagtaaatatcaacggatccatcaatcatacatatgacttggacaaatgtttagctaaaaaagaaagggaaaaaaacaaatacattagttaaatagtttaagtcaagtcaatatggtccttatcatgccttcatctcaattgtatttattgagtacgctatataagataatattatacaataaactattatataaattggattgtccactaactatacaatataatacaattattgtagttagtttactccttaaatcaacaaaatagtgacaaaaacaacttttaattttgaatagatatgatttttactcctgaattgtgacaagattttgccccttaattatttttttattttttttttttgtaagatatttcccttaaaattatagaaataattgcaaattttcccctgcagttacattttgttcataacagtctcctaatgcaagactgatacagggaaatttaagagcccaaacggagaataattacatagataatattctagtaagaaaatttgagactgtatgtctataatttttgagctaataataccattctagtgcatgactcatagccacatcaataaattatctcaaaaaatgaacaaaatacaactaaagaaacatattcacaaatattttcttaattcgagagactctttttacgaaaaaaataattcaagtgcaaaactctacaagtatcatagttcagaactaaaaatcctatttattctttgatttttactgtaaagttattgcctctatcttgtaactgttaatttattctccacaaaacagaatactgagaaccttcactgcaagctactttccttaccgattgatgagggctgataagacggtgatataccaaagagaaaccaataactcgtctaaagtagataatttatacaaaaggacaagttataatatactaacccttgaaatgagatacggatagtctgatattaaaatgaaaaatgaattaactaataaatgttcaatgctcttagctagttatgtctcttctcttttgagtgcaaaaaccaaactctttgcatgagtaacaagatgatccccatgggacggttccaaggagatgatatgaccatcggcttgttggatgcgaatgttatagaagatgagctcatcgtccatgtatgtatgtgtaattctgatttgtttagaatataatgcatttaaaacatggaataatctaaaacgtttagatagcacatttgtgttctataataggagagtggtgtgcgaaagggaatatcaaagttcttttgttaagaatgctcaaagctaaactgcttgtattgcctttcaatacaacatacctaagagaaacacattaacccccctctaaagtacatatgaacacaaaattaaggtgcacggcagcctataatattaacagatattagtaacacaaaacaatagagcatgaaaggggaaagtaacataaatattattaaaaaaataaatgaaactattactgttccgtacgcttttttagttacctctcctctctttgaactacagaaaccaaactctttgcataagtaacaagacgattccggtgaaaaggttccaaagagacagtatgatcgttgagttcttggctgccaaggttgtagaagatgatttcaccatctttagtctccatgaagagctcatccgcatcccaaaatgcaagtgggtaactaatgttttcaagaggcccaatagtaagatgcttagaccaagaataggaaccacaaacaccaccagaagaagcatccataacccacatatcaataaccatcggatccaactccggatagaaaaacagaataagacgatctttccaaaccgcaatctttgtccattcagcaagtatatcccattctttttctgtctctgagacattttctggaaatggaatgatgtgaaatacctcatcactaacattaaatgaaataatgatgcaagtaccatcccaaaagtaccaataacaagctccatcacagtacaccacttgatagtcactatttggaaagtatagaatttccacattcaactcaatttctttccaagaattagtactcaaagtgaatacctcagctttatatggaccatcttcatcttcgtacaacgacttaatgttgacaagcttgtactcatttgtgtttgaatcatagccgaatcccactactcgctctcctgagccatcaccaggggaagcattagcaacaatcttgaattccttcatggcaggattcaataaaataaagatatcatttttatcgaatgcagagagacatatgatgccattacaatgagcaacaagtttaacaaaaatattgtgcagatcacaggtaagaaacttgagattttcagtaacacaaggaatgtacaaattatcgtccagatcatcggtgtaatcatcttcgacatcatcattggccaatgtaaggaaataagttccttcttgcctttcagtgtaattagtggttatcacattcctcaggtgtatgaacggagaacacaacttcttgttcttcatattagcaaggtgtttggccacaaattcagggtttctgataagagaagtgatcagaacacgccatgatttacaaacgcacttgaatcgtctgagagaatcaggaggcaaccacgacataatttcctccaaaagctcatctggaaaattcccacaaaatctccgcatttcgatctgtttattccaattcaaactttacataaattctcgtagagaaactgtttaatttatgcttgcaccagtaatttatcgtatcaataagcttagggtttgaacttgattataaaccttggattactaaatataatctgatcgtctcctgtgtgtaattttacaaactcatacaaaatagtatatataatcttgagagagagagagggagttagagtaccattttggcatgtaagactttgaagctatggaactctgttccgttcctgttcttcttctttttctcttctccagctcagaacaaaactgtcctctttattctatgaaattacaattgaacccttaggtttgtttttttatgttattctagtttttccatttatctcttttccaccatacttcatactttatatttataacagtcgctaccgctaatatagggccagtttggcacagctgtgctgtgggaaaaagcagcagctgtgctgtgggaaaaagcagctgtagcagaactgtgaaaaaaa

SEQ ID NO: 16831 - DNA, 7330 bp, Cannabis sativa
  modified_base (66)..(74): a, c, t, g, unknown or other
aaactattttcaaaaaacaaggccaaacaagctaaattattttcaaaaaacaattttctgtttttnnnnnnnnnaaacagttttttagttatgatgtcaaacatgcactaaaattctgtatttatcaaagaaaaaaaattattttatgcagtttcatcttttttttcacacaaggttcgacaaaaagctaagtttttagtttgagatggagtcctttttttttgttattctataattttttttgaaaaacgtgatctggatcacattaagacatttttaaaaagacttcaataatcgatgcaggaacttcttcaaaccagcataactcattgtctagcctaaggacatgttttgccaaaccatgagtcgcaatgttgtctttgtgggacacatgagacaaaactgccatcagaaatttagacaataaagctatgacatcctctaacaacacacccatgtcatttgtgaacactttcctgttaatgataaccattactacggagagagaatcaaatttaatcgcttagaggaatcccacacgaatgagcccaatttcgttattctataattagtgaaggcttatattggattgatcttcttggttttggtagttgtgtatgaattaaatttatacatagaaaaacaaaaataaaaaaactaatcgaaaattgattatcccaccacaaaaactagcttacctggatcatttctaaatgactattgatatatactaccactaaatttggtatgccttttagctttaaggcccttatggttccaccttaaatcctttaaggagattaggaaatagtgcagttatagaagagtagttcatgagaaagtgtgaagttttgtaacagaaatgtgtaataaaagagctatcaaagtagcggttgtggcaagaattcaagagcttgactgtgcaaagtttgggtgtagatagaacatgatgtaaggatgaactctatgtttgattgggccttcaatcgcaggagcaacagggggacttagcagtgtgaggttgtctttgagagagaaagagtgattgatttcattgattgaaaagtttaaagattacaaacttatatatcaactactgaaactgaaaataaactacctaacctttaacaaccactcttaacaagcatagttagttaactaactaatagtctcactaaaatcatccttaacaacccccttcaaactgagggtagctttagaagatacacaaagtttagtacgaagctcaacaaatcaagagttagatatcggcttggtgaggtagtcgacaatttaagcttgagcatgcacgtgtttgacttgaatatgttgttgtaacaccttgtcttgcacaaagtacaagtcagtttcaatctgctttgtatgtgtatgaagaatttgattggcagcaagaagaacagtactctggttgtcacaccaaatagaaggtattgctagagattgaatgcacatctcatgaaagagagatattggatctaggtgacctcaaagacaacactggaaaggcttctaaattcaacttcagtggaggatacgctgatggtgacttgcttttgagacttctaggcaacaagatttcctccaatgtaaacacgatatcctataatggatctcctatcatctgaatcagatgcctaatcatcattacaaaacactttgtgagagaaatttggttcaggtctcaacggaataccatagtccaatgtctctgctatgtgaattctcttaactactattcagcgtgtgagcaaaaaagttttcataaactaacacactttgttaacacagaaggcaagttcaggtctagtaacagtggtatactgcaaggctctcacaatggatctgtatagagtgacatctttgattggttcactcccataaattgagagtttaaggccactattcatgggagtgttttttgtgttaacattttgcatatcagtgttgtagataagatcttagagatccttggtttgagagagtaaaatctcaactgaagatctacttacttgaatgctcaagaaatagtctaccaaaccaagatcttttagagaaaatgtagagttgagttcggcaatgagctaattaacaagtgtgtcatcatttatcataactaaaatatcatctacatatactaaaatgtagatgcaattgtcaaatgtgactttgatgaacaaggattgatttgctctggagaagagaaaaccatgcttcaacagaactgtagagagcttctcaaaacaggttctaagagcttgcttgagaccatacaatgctttgttgagcttgcaaacatggtttggataggtctgatcaataaaatctagtggttgttgcatgtaaatttccatcaaggaaaaatttattttaatctaattgcctaatagtccatccctttgtaacaactacagtaagcaccactcttatggtgatagatttaacaacaagactgaaagtctctaaaaaatcaaatccaacgtgttgatgaaagcccttagccacaagtcaagttttgtacttgttcaaattgccatatgcattttgtttgatcttgaacacccatttggggttctatttgctggtagagaaaccaaaatccaagttttgttctttctaagagcatgaaactcagtgttcatagcattgttccaatgaggttcttaaggagttgacttcgctatttttggttcacaaatgactacaagaactttttcgtttacttataccaaccttttgtctagttgttattagatgagttgaagctgtggacactgcaagtaaaacattagtaacaatagtggtaatggaaggggtgaatatgaatttggagactctgaaggtgagggaggtggaatagggtcagggaaaacaggaccacaaatgagacatggatgagatacttgcactaaagatgatagatgaggaacaccagattagagtggtgagctaaactgagatgaaagttgttgagttagagcagtattaacataaggaaaattgtgttctaagcccacaagatcttctgagtagcacgatccttgacacaacaagacaaggaatgaaattcaaacaagcacgttattatcttgagaaaactgagaaacactcaataagtttttgttatggaaggaacatgcaacacattggtaaaactgagttgtttggatgaaaaataagataggaatgaggaattaccaatgtgttctatgagcaagccaatgccattcccaatgtaatttttttcattaatagaataataggtgctgacaccaagaatgggataatctaatgtcaaatggtgtatggcaccagagttaggatacaaactctcatcacaaatagatctaggaccagcacatattgcttgcatttcagctatattggctgtagcaggaattgttgaaggactctgggcctatgaaggacttgtcaaattagtagaaacactatttcataatgtgattaaccttatggcacaattgacattggagcttttgtccttaagtgttgttttgaccacgaccaaagccaggaggactacctcaaagagcattgctattgggggaccacgatcataggagggaccaccatgagccattgaatgagagggcggaccaccattgttgttggaagagggactgccatgactaacaacagaattaaaaccaggaggtgctgggggaccacgaaagggtgattgaccatagaaatttgagccagaaggcttggtatgagtaagattggcttcaaccttattgaaatcaagatttttggcattcttgtctatatagacaaattatgccattaacagagcttcaatttcaactattgtataggcatcttttcttgtggtaacgaaggtgacaaacacatcataatcaggtggcaatccattgaatatggcttcgatgtgatcttgaggagtttgagcatgaccaattatggcaagaagatcaacaagagctttaattttttggaaggtagtcattcagagaccatgtcatattggtgcttcgaagctaagtttttgtagagtccgatgttagttgcattcaaggttgtatagtattcattgagaaggacccgtatttgagtcatggtatcattcaatcggtggttttctcatatattgaagatagaagctaagaaacaagaaggttattttgttgttcaccaatcttcaaacattgaattgacattgcccgatggttcatctgtgagagtcaagaactttgttggtattcgagtggaatcaagatacttgtgaagacgattgcctttgatcagggtaagtacttgatgttgccatgggagaaaattatgtttgtcaagcttgattgaatagaatgattgaaagagtctggatacgattttggtagtaggacttgttgattgttctgtggttgagaattattcaatcttgatgctccactggtttcttttgtacgaatctccattaaagaacgattggagctctcataccatgtgacgttaagtctttgcaatagaaagagtgattaattttgttgattgaaaaatttagagactacaagcttatatatcaactacaagatgtaatcgaaactaaaaacaaactaccttgaagaatcatcaccaactctgtagaattttttagagaggtcaagcctattataataaaagtaattaaaaatatttttcttgtggaaacttcattttattaacacaatgaggtagaagtttctacgatattataattggcttttgagtagtataaatagggaccttggatcctaagttgtgcatccaacaagaagtgtttcaaagtgtgtccaaacgagttagtggtaagcaaagtgttgcaaagtgtgactcatataggtgtattgtaaaggtgtttagtagaaaataaaattgtgagtgcttggtgtgttgttattaagataaagtgtttaagtcttggtgcaatcactttttcaataataaagtaattacgtttttcacgtgttgtcgtaatcaataaataatatcagagccgaatcaagttcattctgaaagagtccttggttaagttttttagagtgatcgcgtgtggtagtactacagaacttgcacgatgggtgaccttcaagtggtgcggaattaagaaacttagcaaccaaagttccaacacgtggtctatgaacatagaggcatatctccaaggccaagacttgtgggagatcgttggtggcaacaaagtcacacaaccgaaggatgaaaccactttaaagaaatggaagattaaagctttgcgatacagaccatagttgaaaatgaaatgctagagcacatcaagccagcaaagacaccgaaggaagcatgagatacattcacatcactgttcaccaagaagaatgatacgagattgcagcttctggagaacgagcttattttaattagacagtgcgacatgacgatcaaccaatactttaccaaggtaaaatctctttttcgcgaaatctctgcattagactttggtgctggcatgtcagatgctagaagtagaagaattattatccatggattaaggccaaaatttagaacttttattgttgcaatacaaggttggccaagccaaccttctcttgttgaattagcaaattttctagctgaccaagaagcgttagctaagcaaatatctggagtctcattaaaaagtgacgaagaaaaactctttggtaaggataagaaaggtcggcccgatcaaatcttagtagaaattccagaaaatatgatgacaatgatagttatcatggaaattcccaaacaggaggagctcagaagaaagacaaacggggcggtcagtcaaagaataatgataaatttgatggaaaatactacaattgtgacaagtatggccacatggctaaaagttgttcgttcaagaagaaaactacagaaagaaatgtagccacgtcaaatgcaaaaaagacaagtgatgaagaatgggacacaaaatcatcatttgctatggagggagaagaattagctttagcagctattgttcctggaatgatcgattacaataatgattggatagtcaactctggctgctcaaatcatatgattagagacaaagagaagctgtaagacatgatagaatacaatggtagtcacgtagtggtgacaaccaacaacttaagattactgatcacacacattgataaaagaagtttcattccacgatgtctaccatgtacctgggatgaagaaaaacttacaatcagtggtgcaacttacaacgacatgtcaccatgttgcattagaccctcaaggtgtcaagatctactaagatcttgaaatctttagaacactgatgatgagaggatgatgcttagattctgtctatgtaatgtcagtagagtccgcttatgtagacaagactcagaagaataaaacaacatttcatgcaaggctaggacatgtcagttattataaactcaaggtgatgatggagaaatctatgctgaagggtcttcctcaacttgaggttagaatagagaccatatgtgccgaatgtcaatacgacaaggtgcatcaattaccatataaagattcaaaatttaaagctaaaacaccattggaactggtccattttgacgtgtttgggcgagtaaaacaaccatcaatcagcggcatgtggtacatggttacattcattgacgacttcttaaggtacgtatttctttatgaaagaaaaatttaaaactttttcaaaatttaaagaattcaaagaaatagctaaaggagaagttgacaagaaaatccaacgcctccaaacagataactgtggcgaatatacctcagatgaattttttaagtatcttcgagaatttcgcatacgccatcaattcacatgtgccaatacaccacaatagaatggagtagctgagaggaagaacttccttcttgcagaaacatgtcgaagcatgcgaagaatgttccagggagattttgggcagaaggaatgaagacaacaactcatgtcatcaatagacttcctcaagcaaagttagggttcatttcaccctttgagaaattgtagggctataaacctagagtaagccaattctgagaatttaactgtgtgtgctacgtattcatgccaaggcacctatgtagcgaatttgacaaaaaggtgatacaatgtatctttgtgggatatgacagccaacggaaagggtaaagatgttgtgaccctaaaactagaatgtgttatacatcaaggaatatggtcttcgatgaggtatcatcatggtggtcatcgcaaaaggaagcattaccagat

SEQ ID NO: 16832 - DNA, 5223 bp, Cannabis sativa
taaaatgtataaatgaaaaaactccaaaataaattttcttttaataatatttttttatataaatcatactctttttttatttatttttatgcaagtacaaatttggtaatcaagttgtaaattattatcaaagctataagtaaaagacaagagaacaggcattttttttgacataaaagagagcaggtatttattattatcaaaaccaaaacaattatataactgattttatgagttagatctgtagagtagaaagttaaaacgagtgcctgcaatggatgggggggaactatctcctcagcaataagctttctaaacaaattcacctccactagctaaaacacatttggtgaaagaaagcatatttgaaaagactcaatttctacaccgctttccaacaacctctaaatcaatgttcttcattcccttggccattaccgttcattaggttatccccatcctcacctgctccatttgcatctccataatgaacccatggtagcattgattcaaacaagacagccaatgcatttcgattcgtaacgtcacgcggtggagcacgtagaacctcatttgcattggcagcaaggccttcattatgcatgccttccatcatccttgggtcaaccatgaagggttgcagattttcaggcggaagagttggcgttgagtgagagaaatccgagaccaataagtggcgatacctagcaaacaaaaagcatcatatcaatctcacttattaactaaattaaatgacatatgctttcatgtagaaatcagcatcaaagtagatattgaatagaacatggtagccaaatcagaaaaaggtgacaatttagagcaaaaagaaaattaagtgacaatacgatatgtatactcactcgttcttctcagatgaaaatgcttcttttctgacacaagcccaatccttagcttcactgctatctcttttaagggtttcaacgatctgttgtgcagcatctcttaataacttttgcagatctgggagcctccatataagataattagtctccacatatatgttgatcaggtgatccaaggatgggattccaacttcttctgctcggaataatgcatccttaacaatacctgtccatgcctggtccttcaaaggcaccttttctatcaatttcttcaagactgaggggtgaagcatcaaagcctgcttcataagctcggttgaactagactttgcagtaagagcatgagtgccttcctctgactcttgtttctctagataaaaccggcatacagcaagggaaaatgagaaatttggaaacaaccataatgagctatcactttgatagtcttctgagaacctctcaagccatgcatactcatctgctctcaatgacaagtaatcaatatagaacttggcccccattggatcatcagaatcgagagaaagcaatagcttgcaaacttccaaagcagaccgatgacaaccacgcttatccatattcttcatgtgagcaaaaagtgtcgtgaacataggtttgtttttctcatcattgaattttacttggcaattaccctgaaaaggggtgaacagtggatgccatgcacattccaatgcatacagacatttcgaaatagattctgctgacatttgctgctcaccagcaaacttaaagtaatctgccatcgttagaagggaatccaagtgataagggttgtacaataatatactggcaatgccattgagatcgtgaatagctttagcagcttcaaaggctctctgagcttgagcataggatgatgaatgcacatatctacagtataccataacagtatcgaaagggtctcaggagaaaaatacaactaaaaggaaaaagagaagagacaacatggaagcaaaaaatgatcttacctaaagtagtggtatccgtctttcacttcaagaaattccatggagaaagaaccatcccacctaggccaatgttctgatgcagttacaagtactgtctttctaggaatataacctccacgccgtccaccacgtacctgtcttgaactgccagggccagtttgattacttttctcaaatgattttaccactttagagccaaatattcttcgaagctcattttcagcattaagatattttggatctacttctaaaattgaggctgcaggtggtttagccaagctatcatgaagttttgtattcactgcttttgctttctcaggagcacgtggcagtgcagaagttttaacatctagacttaaagcttctagaattgcatccaaggacttctcgtctttatgtgtactttcacaagcaccctccttgtttttcttctttttctttttctttgatttgtggctggatcttgagacggaattgctggtacctttaagttcttgaggatcttgtttatcaccagcccctaacacgatatcttctgaagtttccaactcatcatcctgtaagccaattgaaaattaaaaatacttaagtgaacatcatcattacctccaaaacaagatatcagaccattagaaaagtgaaagcgtaatcagtaagctaaggaaactttcagcaatccattgttctcttcctctacaacttataccctacacttagttgcttgataacaatatcagcacattgcatgagcaggaccattttgatgtcctaaaagcctaaaaaggcatcaactaacttttaaacaaggtttcctcctaataccaaactccaaaaggttttcaaaatttcatgaaagggtaatttgtaaaagaaattacagttttgaatttcaaacagaaatagaaccaccctatatggataaatggagactaaacatttcaaatacaaagaagcattgacttagtaagaaccaagtgtcagctaagagagatgtacattttctattagaaacatattcaagtgccccctttctaaaaacatagcaaatcgaatcaaactaatggttttgatatcacgaaattcggatacctacacagaacaatgatatagaaaaaaccaattacttcatcatatctagctgtaaacaactttcttcaaattttgaaaagaatataagttaggaacttcaaagttgagctgggcagtgggcagaacaccacaacaactaattgtaatccagaatgaaagaagatatactaccaacaaagaaaggccttagagactcgaacctgatcgctgacatggtcaccatcattgagaaggtcgaatggattgattgaagaaccagaattgacatgttcttcctcttcttcttcatcgtcgtcattttcatctttaatatgaggatccttctgaggttgcagcagctcttgctcctttaaaaacttcttgaacaatcgagccgacatggccgaaatccaataccgatacaatgcccaaaattgattggggtcgaataaagattagccccttacgtatcagcgaagagataaatcagagggaatgaaaccctaaggtggagaattgagagtttgggcccttgttcttgcttcttgttcaatattgttctatacgataccgaaggaacgacgttaccacaagggccttggtgaagaaaccagctgagccttccactcacttctcaaagctattcaatttattttctttttccaacttaaattaaaattatttattttttaaaaaatttaaacaaatttcttttgtaaggtgattagcttaaaattagttttttcagttatttatttttttgaaaaggttagagcatattaatggagtgctgaaatattagtgtagtgcctacattttagcacttttaagaaaaatgaactctctaatggtatactaaatgttgttttgaatttgtctcttgttacaaattgtgctttattttacataagatgtaccattatatcaaatttggcacacaataaataaatggagcttctttaattacagttttgtgattaattattaatgataattttaatatattttgtttaattataatattatttaattattttataaatatttaatttattgataattattaatgatatttcactttttctcttaattttcaacaaaaattgttatattgcattggagcacaataataaatagcaaatataacatttacttttctttttggatataaaatttagcaattttgtttttgataagtgtataaaatttagcataatattgacatttgtagacaattttcaatggaatgtgtaaattttatgctaaatttggcttaaaaaatgatgaaaccttgtagccaaaggctacatgcgccaattatgatgaaactttctctcttgttgcgatgtttaaatccattcatattcttttgttcatagttgctacttatgattattagataaggcaaatggacgtcaagactacttttctaaatgaaaatcttgacgagatatttatatgaaacaacttgaagagtacaactaggggaaaatcgaaagatatacaaattgcttaaatatatttatggataagcaaacctttagatcatgaaatatcacctttaataagattattaaagaatatgacttcaaacaaaatgaagatgaaacttatataaacaaatacattaaaagtaattaatgtagtggtattcctaattctttatgataaaattctacttattgtaaacaatgtagaaaagttataagaagtaaagaagtggtgagccgaacaattccaacctcatgtagtgttatattgtttactattaatacaatcaacttgaatgtcatatacaatgtagaagtattattagatgtcaaattagcaggaatatcacttccactaataacacaatcaacttgaaaagaagatgctctaacaagagagtatgagcaaccttataccatatccgtagatcatttaataaaaactaaataaaatgtttccacactggtatgatataggcctcgcaaatttatttatgaacatattttcctaattcatactaatggaaatattatcatccttatatatcaattaggactgttcatataaatcgaaaaatcgcagtttaaatccagaccactataatccgaaccactgtaaactgtaaccggaaaaccgtttttggtggtttggtcaatccggactgtttacggtgtaatgattcgattgcggttcgtaataaatagttaacggttaaaccggaccggaccgtttataatatataattaatttatatatattttatatatgactat

SEQ ID NO: 16833 - DNA, 8062 bp, Cannabis sativa
aataataataataataaatgaacataagatattttacgtagttttgtagttaaaatctacatactccacgagtccttcttattcgagatatttattttaatacaaattagaattctcaataaagataaataatagtttcttctctccaatttgccatctttttttttttggattctgcccctagttataggtgtataagatgacaattatttgtactaggatctactcatttacaactgctcatgaaacgggacattccccacaattcatttttatgcacatgggataatatctaataactaccaaactactctttgtctttatccttaaacggttatgctgactaagaattttatttctcgctaaatgtgagttgtccttcttatccgtctttctagaaaagaatgctaagtatcgatatgcttcttctcgcagtgttcttcatatcgtaaaatatttgcgaggtggttactttgtcgcgtaaagggcaaaatagatgaatgtagttatttcctgcgtgcaccaatatatggatcaatgagatgcaagcttttactcccaagtatgtgggtcaatgagttgcaagctccttgatatctcgtcttgtacgctcttattatatactctgtttatcccgagatggatgggttgtctcatcaattacatctgataatagttgttattcttatctcgcatatgcttatgtactgaacgagtttgaatatttctatcaactttaattaattgaaacgacactactacaaaaatagtttttcctaacattttaaagcagtcgtttaaagtattgccattagtttctataaccattgcctatacgtttgtcgcaaaatggacaaaatagacgacggttaaaaaccttcgctaatgtgcacttcccgacggtttaaaattgtcgcctataacagggtataggtgatggttttaaactgtgtcctatactataagcgacggttttaaatgtctttaggggtataaccgtatttctcccatttaaaaattacatgcttggaattttggcggttcaaaactttgtggcacattatttcgcatttaatgttctgactgttcaattcttataacgttcccatgcgttagattagatctcccttgatcgaacgatgagcaccttttgggtataaattaaaaattgtgcatcttttttgccattttcaactttcaaaccttcgagcttttgccaaaatctcaaccacctacttcttaaatttgcatgccctcgttatctcaatcaaaaacttcttcgctgcataaaatttctcatcaagacagtaagtgacactctttttcattatttttttcttctgtgcttacagtttctttttcatggtaattattttccttgtctgcattgctttgttgtttgggtattttgattttgaatgtttgcataaatttaggattaggaaaatttaaggttatacaattgaaaaaaattggcttttatttgtgccctgtttttctaaaaattgagacattattattataatcatgtctcaatttacctcaaaaatcacaatctcgaaatccttagaatttttttgtcttaaattttcttccataaaaattaagcccaaaaataaaaaacctcaaaccaatgttgaagtgaatgacaagaaaattaaggatcaccttattaagtctagtcaagatgaaacttctagctgttataggcaattcttacaagagataattgagggtaggcgccactatttgcgaaaagcgggttggcctaaaccttctaaattaattgatatttcctaagcgaagccgatgttcttacgcctagccactattgctttttcaccaggtgacttagattttgaaataatagcttagaaagctcacaaatcaaagactcctcaggatcctacaatcacatttgagggctgagttaattgagtccaaaattagatttataagaccttatgtcagggacgtcttaaggtcatgcggcatatcacaaatgaaaatggatttcgcattaggtttgttgctgagggggagttcagttgttaccccctgaacatctagcttgagatgaaggctgcagcaccagtgaaccttctaggataggtgcttaaagcctagaacatattagagttggggcagttctccctttaaaggactatttcaaggatttctacaactacctcggcattgccccattccaactagcaccaaattcatatacgattctatcctatttaaagttgttatatcacattttgaagtgggagtacctcgacccgacatgaaaatctttatttttattttgtaaaggcttgccctgtaatgaagcgaggtgcaggtgatgtctactatctccagacacataccaatgatcacaggattgttgtgaggctacccaacaaaaaggagttgaaggatgacttcttttgggccacgggtctttttcccatcaacaccacaaaatttcaaatcatatgtaagtatagcttcgtctcaaaaaacttgattgagttttaattaaatacatattggttatacttatttttttttatttgttgtgttaacaacgatcactaggagacccattctaactcctgagatcgagaaaaggcacaagactcttattggtcttccctttgggttgtgagcaactgacttcttgttgcatgagaaaaacatgaaggcttgtgccctccttggcaagtatcaatctactagtgactttaaggtcccaaaattttcagactggtgacaagttctagttcctactgatgaggagaatagagactatgtggctcgcagccattatttgaaaaatgtgaccccttgggaagctgaagatgatgcctcccgaggtaataattttggtgtttgtggatggtccccaagcgttcttagagcagagcgaactacactagttaattttagggatagccgatataacttctgtatttggaattgtgtggatcttattttccataggtttgacaattgatatcccaagcaccacgtccaatttagttgtaacaactcttattttgggatcgccaatcaatatggcactaattctgataggactggccatctagattgggacatgtctcctctaaatccctttgatctttttatgattactggttctagagagtttagtaatcattatagctctttttcctcgtctgatgactatgataatattctttagtggggggctatctcaccacatattttttgtttattttgtacagtgttgatcttttatcttttgtctcgcatatatggatctgcattttgaagatgtcttgtgtagccccactagttccatcaagaaatccaagaagtgcacaacttccacaggaactgccttgagatcagccaggagacattgaaaaggattaaaaagattgctaacaagaaacgtgcctcgacccaactcatgatcgagccagaaaagagcccaaataattctactgccccagttgttgcgagctctggtgaacaagccttaggatctgttcaccaggtcaagttctcgggatctcaacccgagcttgtgttcctagaaccctcttgccctttgccaaattttgcaggcattaagggtttgcaagtttgcttgcagtatgctactacctactgccgtcactacagatgttttcaacaagatgattgggacctgattaacgatggtgatttttagagtttaaagcgaggagtgttgatctcaccctctcggttagtatgctttttcttctttgtgttgatctcaccctctcggttagtatgctttttcttcttttacttttgaacttttacttttcctttacctacttacccctgacttatttcttttataggcatcttttttgtctcacgtggctcaacaaaggggcatccagagaatcaatcagctagaaaatgaattacgcaggtcaaacgatcagcgtgaagccattgcgaggtaatggaatgattcctaacctaagatttatctgttgaagaaggattctgaagagcaaaagactgtccacaaagctgagctcgaggctgtccagaaaaaagctaaggacttcaaagatgcgattcagaaggtccaagctgaagctaataagaagattgaagaagccaaagctaggataaatatgatcgctgagagatctatttatcttgctgggttagctaatcctctgatggatctaagtttcatgggagctataactgaagagatgcaaactttctacgagcagaccaagaaaagacgaggcagtggatgctgaggaagaaaaagaagaacccactaagtcactgaccatgtagacttagttatttttattttaatttccaaataatggccattaggccaagctaatgattggatggccaacattgctaatctatataaatttatttttatgcctcttatcctgctttttcttgagttattaatgtttgcttattgcatttaattcacagcaaaacactttcttcgatctagcttgggtctttagggttacacgcataccaatgtcattatcttgttatttcatttgtgagcagttaatattctgccatgtttttgtgagcaattagtagttttctatgttttccgagaacagttagcaattcgctatatttagatcaaacttcaaatactttgaacatctcttttaagaactatttttaaatatttttgattgctcgtatgagtagttaatcctctattcatactttagcttgcgtattatttttcaagatacattggtatctcatttataatacatgctataacatgcgagtcgttatttattcagattgcataaagatttttgttgttgtatgagaaaaaatctcacttgcaactactattttaatttccacttaaagaaaggttttttaattcttgactttgtattgtcctaagacagtttttaatcaatcatcctttcctttgtgaaaaaattttaatttctaagttttagcatttttgtatatatttctaggtggaatctagttattatacacatatattcccccaagtaattttaaagaaataactttatgattacgtgaaatattcagatttttattcaagttaagaaaccactatacaaagattaatatagcattacacaattacttgtaataagggcatacatgctcgtcgtttcagtgatttttcattagcgagccattaggccaagctaatttgtaaacttcggttccaactatagctttaatgatgtatgggccttcccagttcgggttaaactccagttgttgtatcttgtatatttgtaaatacacgtcttaacaccaaatctcatactttaaagagtctctttgaaactcttttattaaagtatattttgatacggtgtttataagtagcatttgttacttgcgactcgatgcatttttcttcaagcagatccaaggacatattaagaagttttcagttttgttcttgattgtagaattcatgcctgtgggtcacaatgtttacttttacaagaaacattgcttccaagccaaatgccaatgaaaatggagtgtgtctcgttggtgtttctttcgtggttctatgggcccagagcacttgtggtagctcgccaacccatcttcctttagcagcgtgtaacttcttcttgatagtatccttcaaggttttatttacagcttctacttgcccattctcttgaggcctcaatactgatgagaagcttttaattattttactcctttaaccgaactcagtgaataattctccatcaaactgagtaccgttatcagatactatcttaattggaatagcaaacctacatatgatgttcttgataacaaaattaaggaccttcttgcatgtgatggatattagaggtttggtttctatccattttgtgaagaagtcaactgccacaacatcatattttgtgacaccccaacctgtgggtaaagactcaattagatcaattccccttattgtaaatgggtggcgaggtcatcattcttaactcagtgggtggtactcgaggtatatgtgagaaccgttggcacttgtcgcatctcttaacaaactcatgtgtgtgtgtctttattaatagttggtcagtagtttccttgatggattatttttttagataggctttgccaacctgcatgatctccacagacgccttcaagaatttctctgattatttcattagcttctattggtaacacacatcgtagtagaggcatggaataacctcttctgtacagttttcctttgaccatcgtgtagcgaggaatcgaatataagagtttttgtgcctcaaaatttatttatgggaagttttccatttaatagatacttgacgatcggtgtcatccatgtaggccccacatctatcatgtcaatatcttcctcttcacatatacttggttcatccagtacctccatcgataccaagttcaacttgtcgagatcaaattgagatgctaatttttctaaggcatctgcattagagttttgttttattttgaaataatcaaacttttccaagttctttcaaactttctctaagtatttggccattttctggcccttcgcttggtattctcccaagacttgattcaatattaactgcaagtcactaaggcatagaatgtgcttgacttttagtgcctcagctattcttagtactactaataaggcttcttattctgcctcgttatttgaagtttcaaactgaaacctaagtgcatagtgaaatttgaagctttctagggacaccattattactcctgcccccgagccattctcgtttgaagctccatcaatgaacagtttccatgtttttgcttcacttcctatttcagagtcttctactgagttaatttcttctattaaaaagtcaaccaaggcctgccctttgattgaagtcctcaagtcgtaagttacttcaaattttcctaactcaatcaaccactttattaatcttcctaatgtatcaagtttcgatagtacttgtcacaatggtttatttgttaggaccttattagggtgcgcttgaagatatggccgcaatttgcgagatgaatgaattaagcagagtgtgagtttttctagaggtgggtatctcgattctgcccctagtaaccatttactaacatagtaaacatgctactggttttttccctcttctcacactaatgatgcacttatggcattttctgagacagctaacgaaaggaataatgtttccctagtaattggtttagccaaaactggtggtgtggaaaggtgtttctttattcctttaaatgcttccttgcactcttcattccactcgaattttttattgcctcgcaggacattgaaaaatgggaggcacttatcaattgacatcgagatgaatctattgagtgtttccattctacttgttaaagcctgaacttcctttggctttgttggtgaaggaatctcgattaatgcttttatttttttctagattagcctcaattccccttgcattcacaatgaagcctataaaatttcctgaggaaaccccaaaagaacattttttaggatttagtttcatataatactttctaagtatggcaaaacattctacgagatctttcatatggtcctcgcttttcactgatttcactaacatgtcatcaacgtaaacctccatgtttcgcccaatctggtttttaaacatagcatttacgagacattggtatgttgctccagcatttttcaatccaaatggcatgactttgtaataatacaaccccatatttgtcacaaagcttgtatgttcttggtctgggatgtgcattttaatttggtatatcctaaatatgcatccatgaaagtcattaatttatgccccgctattgcatctacaaattggtcaattcttggtagtggaaagaaatctttaggacatgccttatttgaatctaagaaatttatgcatgttctccatgtgccatttggttttggtacgacaactggattagaaatccacgagggataaaagggttaaaatcacctcttccaact

SEQ ID NO: 16834 - DNA, 5988 bp, Cannabis sativa
ctgttccatatttggtgtcgggtttcatcacaagttggtgtggttcgtatcaataaccaagactcgagactcgaacccgaacctggacccaaagcaggatttaggaactggacttagattagggactagaccaggaacataggccttggaacccaagccacgatctaaatccgagactcaaaactgaaccaggacctgacctagacccaggaatctgaagtcagacctagacccagacccgaaaccttcccctaacccaaaccaggaaacaaacctggatacgaacccataccacgacaaaacctgaacccggacccgaacctaggagccgaactcaaagccaaaataagaatcaaacccaaacatggaacgacacccgcacatgaactcgaacccagatcgggatcggaacccaagacttagacccagaactaaatccagactcagatcaagatcaaaacctatgactcggacctgaacctggaccaagacccaagaccctaacccacacccggagcctgatccgcacctagaccgtgatctagacacgaacacaaactctgactaggacttgaccccatcccgaacttgaaccccgacccgaactcgaaccctaactcaaactcaaaattgcaattagaacttgaaccggactaggactagactcgaacccaaacccaaataaaaacccaaaccgagacccaaacttgaaccgaaccttgactaggacccaaacaacccgaacctagatcgggacccaaacccagacaagattcgggacctgggcaacagacctaggaccgggatccaagacccgacccagacccgaacttgaactgggacatgggcaacagaactagtcccagtccgtgtctaggtccgagtcttaatcttggtccgtgtctaagtcttgggttcgagtccgagtcccaggttcgagtttgagttctggtacgagtccgactctcggtctgggccaggctctgggtctgggtccgggtttcgatctgggtctgggtttgggtctttgtctgggtctgggtctggatctgtgttctggtacgagtttaggttctggtccaggtctagggtcacaggtcctgggttccaagttctgagcgcaggtcttggtgcaagtctgggttcgagttcgggtctgggtccgagtatcgatcccagtctgggtccgagtatcaatcccagtctgggtctgggtccgtgttcagaattgcgtctagatctggttctaggtcaaagtctaattccttttccaaggtcctgattcttgttccgattttgggtcctggtacaattccaagatccatacatcgactacgggttgggtccaagccacgggtcgtgggtcaaaatacggatcccaatcttgggtccctgtctcgttccaattcagatcctgtgtcccagtccgtgtccatgtctgggtccgggtcttggaccgagactggggtcgcgttttaggtcccagtcctgggtcttgattctggttttaatttcagttttgtgtccccaatctaggtttgggacctaggtccatgtctgagtctccaatctcgatctatgtcgtgcgtctgggtctggtccaagtccgtgtttaggtttgggttcgtgtcccaagtcccgattcgagttttgattcgggtctgtgtactagtcagattctagttccaggactgagaccggatcctagtccgctcgtcttattttcgggtcgcggtctgctttcggttccgctcctagtttggggtgacgagatacgactccgagtctgggtctgggtttgggtccgagtctgggtctaagtttgagtccgggtataggtcagatccaaacatcgactatggttcaggtcgaagccccgagtccatattaggatccactttgggtcctaggtactggtccgggtcctagttcagggttcgggttcgggttcaggtcctgggtctcagtgctagttttaaagcttgggtcctgggtccaagtcccccatccaggtccgagtcctaggtctcggtccgactctaggacccggtctgggttcaaatcctattctgagttcaggttcgggtttccgatcccaatttgggtcatgatcttggttctagtctagatccaagttcgggtctgagtctcgagtttcgatctgggtgtgggtttcgaggtcgcatccatgccaactatctaggtctgggtgctaggtcccaatccaagtccatgtttgtgttcaggtcctagtccttgttctgatattgattccgtgtccgtgttcggtttcgggtcggggtctgggtcggggtctgagtcctggtccgagtctaggattgggtttgggtccaagtttcgatcgtagtctgggtctaggtttgggtccaggtccgagtccaagtcttgggtacaggtccaggttttggtcttggtctcggtccggctccaggtcccaagtttcgatccttgtctgggtatgggtctgggattgggttcgagtctacgttcatatccagatccatgtctatgttcgagtctaggtttgggatcgggtcacaggtttaggtccaacgcaatcccggacccagaaccagaatcggaccgggactgggactagaaacctggcatggactgtaacaggacccaaacctaaaccaaaactcaaaccaaaacccataccaggacttggacccagactgagacctgtgacctgggacctaaaccaagactcggacctggacctagaccgggatccagaaccagacccagacccaaaaactagggcccaacccaggacccataaaccagactgggacctggaacccaaaacccgaacccaaactgggactgggaccagaactcgaactcgaacccaaaccgagacctggactcggaccggacccgaacccgaaccggaacacgaacttggacccagactgggacctaggacccgaacatatataggggacccagacctaggaaatgggaccccgaactaggatcagaacttgggcctcagaacatggatcgggattcgggacctaacttcaaacccaaacctggtcctaggacaaacctcgggaccttggacgggactcgatgcttggacctgactcgtagtttgtgtcaggatctaggacttagactagaacccaaaccaaaactcgatctcaaaccaggtctcgggaacatactaagacccagacccacacctgggaaccaaaaccgaaacttgaactggaaccagactaagatcttggaacaggaccgaaacctggaccgagattcgaacccagaaccggcccagcctcggaccctaaccgagatcgaaccccaaacttgaacctcgtcccagacccaaatcagaacccaaaccaagactcggacccaaactcgacccgaacccgtatgatgtgacatgaagctggaaccgaaactagaagccgattgggacccaggaacaggaccacgaccaggacttggaccaagacccaaaactttaaccggaccaggacccagactcggacacagacccaccctgttattggggtccaaaacctgaatccaaacccgaaccgagacacgggaccctaatcaagacccgaattcaaagctaaacattgaacatgactcgggacctagaaatgggatcgagacctagaactaaaccctagtttcagtcccggacctagacccagacccagaccgagacctgggacataagccgaaactagactaggacccgtgattgggatccaaatcttgtcccgagatctgaaaatcggggcttggacaagacccatagtcgatttctttatttgggactcgtacaaggacccaaagctggaccacgacctggacccagacccagacttgggacccgaaactgaaatttgaacaagaacgtgactaggaccttggaacaggaccgcgaccttgaccaagacctggacctagaccggggcccggaactagaccagaactcagcctctgaactcgggctcgaaccttgtcccagacccagactaggattgagactcgaacctgaacccgaaatcgaactcgagactcgatcccgaactaagacctagcccctgacgtaaactgggatttagacctggacatggacacgaagcaagacctggactcgaaaaccgacctagacccaaatcgggatcaaaacacgagacctagacccggacgcggatgcagacccatacccgagcttggtaccaggacctagacccgaaccacaacccagactcagaccggcatttgaaaaacccgtacccgaaattagaattggaactatgactaggaccaagacctaagaccagaactgaacccaaaccataactcactcaaacctgaacctgaactgtgactttgactaggattgggacctgagacctgggacccgatccttgattgggactcggactggcacctggacctggacctgacctagtcctaagccctcgccgagttgtgagacctacacccagaccaggatccagaccctgacaaggatcccaacctaaacccagaccaagacgtggacagagacctggacccgaacccaaaccgggacctgaactaaaacaaagacttaggacccaaacctgaacctggacctaggaaccggacttgggatgggggacctagaccagggacttaggccccaaaaccaaggcccaaatctaaatccagtactcgaaccccaaccaggacctgacctggacccaggaatccgaagtcggacctagacccgaacccaaaacatgccccggacaaaaaacaggttaggaatatggacacaaacccatacaatgattaaacccgaacctggacccgaaccaaaaatcaaactcgaacccgggacacgaactcagacccagacccagaataagacccaaacctagatctgcacccggacccgcactcgcacgaagagtgggatcgaaacccaagacttagacgcggaacaaaacccatcagatcaagatcaaaacttgggactcggacaaaaacttggacccagaccaaggaccctaacccacacccggagctcgatccgaacctagaacaagatttggacccgaacccaaactcggaccaagactcaaaccccaatccaaactcgaacaccaactcaaactcgaactcggaatcgcaattggaactggaactagactaggactaggaccaggacccaaaccccaacccaaaccaaaataaaaacataaaccgagacccaaacttgaaccgcgagtaggacccaaatccaaacctagagtgcgacccaaacccaaactagaacacggaactaggcccataatcgggatagggaccctggcaatggaggtaggacaaggacccaagacccgaccccagacctggacttaaacataggacacagcttgggacccaacacccgaaacagaacaagaacgcgacccgagattgggatccggatctagacccggggcttggatcgaacccgtagtcagtgtctagatcagggacccagccccggacccgaaaccaaaccagggcccgaaccaaaatccagacccggacccaaacccagtcccagactaaaacctggacccgaaccctgtgacacgaaattggaaccaaacaggaagtagaccgggacccgggaacgggaccagaaccaggacatggacctggacctagaaccgtaatcggacttggacctagacccaaaaacacaactagaccagggacccggactccaaccttgacctagacctgaactggcacctggacccgggtcccaacccaaaccaggactcggtgccgaacctggacccgaactcagaacaaaacatggaacaagacttgggacagaaaactggggcggggtcctagaaccgcaccctagacccgatcccaaacacaaactcggaccttggacccaagacctgaacaagaaccagaccgggacacgtgacagggatc

SEQ ID NO: 16835 - DNA, 4524 bp, Cannabis sativa
tttctcaatacatttaatatacaattcctactgttttgctactgttttattgagctcttgatccgaagatctcgggtcttatcaattggtatccgaagatctcgggtcttataaaaattaaggtgtagaatttgaggatgtgtaatcaatttcggtatcatggatcagtagttccctgaaataaatgtgcgtatctttgaagatgaaatgatgaaaaagagtgagtgtggagtgttgtaatcaacgaacctccatgatgttctaggaaaagttataaaaagagtaatatggtttggactgttgagaaatattttcttatggtgtgaagttgagtgttgaaatttggatgagaggatgaaattactttaggaaatataaacagaaatggagatttccaattaaccgtggcccaacacttgttgaaacattatgggaatttgtagataatttagttcatgatgctaagacctaagcaagtaacagttttcaaaactgttgccaagaagttaaaagtaaagcaacaaaatatgccattgttatgagtaaaggatataaatggtgcagaaagctttggttggaagaaaatggtgaatggatataagagagggagtaaatggaagaaaagactctttattgaggttcctaagttcttaacttttatagagtgataaaataaaaatcgatctatggtatgaaaactcatttgattcttgtttcttggctttattatagctatccaatacttgaagatcaatttgaaattttttaatttattagaatctgatacatgaacaacttttcataatttatgaagaaggatctcttttataacaaagatgttgcttatctattgtaaagcaatcatgattgtgattatgtatgtatttgtggtaataaattctaatgtagggatgtcattcacatcataactatcattttttttttggttttcaacaagactttcatcatggtgtttgaatcaaatcttgcttcttattggaataatgtttctcgcagagtcatttatgaaagaaattgggagtcagtatggtattgtctctggatctcgagacaattctctttacaatgcaatatgggtagcgcaggcactgttgcgcaaagggttagactgtgccttctatttttccctcctcccccttatagctctatgaccttctaatatttagaggaaaattgaaacaaaaagatcttgcttatacttcatagtcatgacttacaatgataaacactaccaatattttcaggtctgctaagacagctgacaagcggatacttttgtttaccaatgaagatgatccttttggaagtttaaagggagctgtgaagatggacatggtcaatacgacattgcagagagctaaagtgtgttttgcatgaaattacttgaatgattttgtgaatacagatttatttttcatataataagtattttatttattatttacaattacttttaatttgtaatatttttgacgtttacttctaaaaggatgcacaagatcttggcatctcaattgaagttctacccctgagtcggcctgaggaggaattcaacatttctctgttctatgctgtatgactatatcttactatcatattttccttgggtcacttacaggtggttagataaagatacttgacacttttagtctatatgtttcaggacttaattggactggaaggtgatgagctagctcagtttatgccttcggcaggagaaaggtatgccttaacttttggatgcgtgtttgattcattttcatgtggatggatagtatgaatgaattattttctttattttggtggttctgtagctctttttaaaagttgtgaatactttggtacataatgacattaacttagtaataagtctagtgttaatttacaattcaaatgggactgagatcctaaataacagtaatatagatttttgttaaaatcacttaaatgtagatctgttagagctgatatcattgtcaacaacaacccatatcatcccgtgtggatttctccttggtctatactgtgtgtgaccccaaaagtgactttacttaggtagctctgctcatgatgttggtcttgctagatggtgctgcctttaataccatttctgtaataacgtatgtaggacttactcacaaaagaatagcctatgaaaagagggtgctcaagtggttattgaccacctacttagctcatgcttagatgatgtggaatcttagaaaatagtcaatcttggtgctatttggtttattattaacttgcttggttcacatgtttatttttcttatattattatttatttatttattttttttaaattcaggttggaagatatgaaagatcagctgagaaagcgtttatttaaaaagcgcatagttagaaaaatcaatttcgcgattgccaatggtttgtccattgaactaaacacatatgctttagttcgtcacactactcctggtatgcatatattttgatcaaatttgttataaattaagaacttggttttgcatgttctatatttacagttgaataactactggtcattacctctaatctacaggagcaattacatggttggattctgtcaccaaccatcctttaaaggtgacaggaatactgcgttttgtttacttgatcaaattttgttatatgtttactaccctgcatttgttttcagcatcctgtagcttcgtgtgattagtttgctgtttagcacacatatcatcctcgttttgtgccattgttacattgtagattttagctctttctcatagaatatatatatttttcctgatgaaagacccttctacattttctctttgctctatctcgccgaatacgcaaaatgtttatagtttggtgtgcttcaaaatcctacgttgattccattttcgccaataaaacctttgctgccggtttctgtatattaattcactctaaaacaggttttcctgcttaggccttggtggaactggtgtgattaaaagtttaaaagctgtattactgtaccattgctataattttcagttgaataatcatgttttaagctctggcaagcgcttgagttgtctgagtggattctgtgcagactgaaaggtctttcatctgtgctgacactggggcattgcttcagaattctactaaactcttctactcttataaaaagtaagcatgctattttgcttctttatttgatctttaattttgtttttccttacgcttctataattgattgagttctattggcatgtagatgattcaattaattgattatcaaaggcagattacaacctgaatttattgatgctcaacaaacttctattcttttaactaacaaaataaaatatatcatgtaaagttgaattaaaataaaataattatctaagacatattcttagcaaatagattaaatatcttaactcaaaatctaggcctgtttgtagattttttttgggggggtttatttacacccaaaaaacacattttaataatttttagattatataaaatatataattttaatttatactattttttttttttaatttttttcttctttttcatattcttagaaaaatatacctgtcaattaaaaataaattatattttaaatatcatgacaaaatattaaataaaaaagtatatgaaaaaaaaattaaacatgatttaaatagaagtatgaaaataaatcaacacaaaataatgtgaaaaaagaaaattaaaaaaattttaagagtggtttttttttttttttttttttaaatttgtgaccatcatgccactatcttgttggttgtttgacttgttccactgtcctttttaacatattttttcttttttttttttgaaaagagacaacggtcacacatgtccatatgttcatttcattgcaaggatttcatggttgtctttttggcgactttttattttttgatattcttctgtaattccttttagtgaaaatatcaagctttctgtggaagagctatcggagataaaaagggtgtctgctagaaatcttcgtttgcttggattcaagccattaagttgcttgaaggattaccacaacttgaggccatcgacatttcttttcccaagtgaagaggttcctttattttaactttattctttttgtagcattcctaatgttaatttgtatattttgtatttattatttaaatgtagtctatgttaaatgcctttctacaagacttctcttgcctctcatttacatttactataggaattaaagcacaaataaattggtgtcaaaatatcttgcatgttcaacaaaggtttcatgaatgaagagatagaactttcaagttggtggatgatagcatttgtagccttttcaaacaatggaataaccccacaaaaaatgcactttatagctcttggatcaagttttcccttcttaagcacagacaatgggcccatccagtagatgttgtagttttagaagtattttgaaatcatttacaataaactattgaaatc

SEQ ID NO: 16836 - DNA, 4230 bp, Cannabis sativa
aaaaaaaaaaaaaatagctaaactccatttttttataaggagtcatttactcaaaaaactaaacccgagtcaaaaaacaaagtcaagctccccagaaaacaaaacaacttcaaactcgaatatagaaaaactcatacttagttcttctagttataaaaaaaataatttaatatcatttaaaaatttattatacaagaatagaattctaatttgtgtaaaaaaagtctaatttcggtaaaaaaaaataaagtttcatagtatatattataattaaatgacttaactgttaaaataattatagtaggaatttatataaaaaattatttataattattaattgttgaaagaggtattgttaaatattcaattaattattttaagaaaataatcaattgattctaaaaaaagaataggaaactaataatcaattaattataatcaattgattttaaaaaaggaaattttaccctaagctgttattataggtaaaaaaaatataaaatggttaccataaaaaatgtaatcatatatattaaaaattttgtaattcaaatagtaataggaaactaattttttactttatgatctataaatagagttagagtctaattcaaataataatcttgctgtagaggtttgagtgttcttttaacgcattacacatttacacttccgattcaattgatactgatctttgatagtaaaaaaggtaagaagcttgattttctctttaaaaagaaattgttttttaatttattcaattaattaaaatctataaattaagctgaaattgcttttttgaaaggtattaaatttagaaaaataattttgtcaaaaataaaaagtaattacattcatttttttttaaaagaaaatacttttttttgtttctctttcttgttgacgaatctatggacagtttcctcttcttcttcaagaattgatggaatgcacattttccactctccatgatttgttcatgtaatgatgtaaattaaagttatatcatctcattatctatgctatttgtttgattctctctctttcaatttcaattctagtttcctaatcattatatttgtgtatcaattgataagcctgacaacaaaacaaataatttggttattagggttcaaattgtttgtgtatgttttggtatttatgattctgaggccattaaaattgtttttgtttttacatatctctaattcttgaacacttttataaattcttggtatctctaatttttgtttatacataaatctttcatatacctgaaaccctaatacaatgtttctggttggattaccaaagagaaagacctaattagtgtattttgattgaattatatttttcaaaaccctcttttttgttcttgatgaattcatattctttgctggtatgtattatttggtggtttttaatttttcttgagaaaagaacaaatgggaattatcaatgacacactgtgtatatatatgcaattaaattgtgttaaactgtaaatgtcatttgttttagataataaattttgatttggttgtcaatgcagattatttacaagagtaattttgtgtcagtctgcagattgtaaccttagtgttaatctttctctattgcattgaatttctgaattttgaactcctttgtttgagatttcctttcattggactcgattttagccatctcttattctcagcatcaccacaagagatattctactagccgttaacaatgggaaagcgcaattctcatcggaaaaagggagcagctatgctggatatggaggaggacgacgacaatagtagtgtaagttcttcgatgactattcgttctgatcgtttttcagtgatggagatcgaagaagaagtggaatttgatgatgatagtttactcaacgaagctcttgatgctttgtatgagaagaggggttccactagagaaaatgctctgtcctcaattattgtagctttcaataacagtttgcatcatcagtttatggaaaagaatttcgttactttactgcatcaatgtttgaattcctttaaacgaggatctactaaggagacatgtttggcatcccatatgattgggttgttggctttgagtgttggttttggagataatgcaggtgaaatactggaagaatcaatgtctccattgacacaggctcttaacaagtctgcttccgaaactgtaaagatagcattactgaagtgtttggcgattatcacttttgttggtgggagcgagccagagcagacagagcgatcgatgcaacttatgtggcaagtggttcatccaaaattgaaggccaataatgtacaacttgacaccaaaacttcaggagctacactaagtgctatggtaggtgcatggtctttgcttgttacaactatggatgttggatggaataaggttaataattcgaaagattgggaagagtcactaatttatttatctagtctccttgacaaggaagataggattgttaggattgctgctggtgaagcactggctttaatttttgagattggaggaagttatggaacaagtcaacaaggattgaaggcgaaaatcatgaatcgagtaagaagcctttcagcagaggcagggggaaaaggttgtgctaataagaaagatcttactaatcagaggaatcggtttcatgaaatagtggagtattttgagaatggctcttgccctgaagtttctgtgaaaattggtggtgattctctattgcagacatctacatggtctgaactaatacaactgaattttgtgaagcattttcttggggaaggatttgtgaaacacatgcaggaaaatgaattccttcatgaagttttcgggtttactcctcctaagaaatatgaacatcgtttatcaagcagtgaaaagaggatgttcaagtcgccgaattcagctctcaacaaagcgaggactcgacaccttaacaaacaacggatgttatctgagggaaaaaagattggccatttttcagttagctgtggtgatgaggaggaagcatagtgttcttcttcatatactttttttttttaaaatggaacattgattagttaggagtttagacccccatttgggtctgatgttgaaacacaatacaacatgagttatttttaaagcaatgataacttcattgaaacaatggttcaatttaatcatttaccaattgatgaaataaaatgggcattgactctattgctgtttggttaattatatgatggaattttaatgttgtaactgatagagtaaaactatattgagtataatttctataagcattttaatgacaaaaacatataaagaaagcttcactggaaccattggaagacctcctcagcattctggtttggttgcaatcaagtttatgaatatatttttctatatgctgtattgcttatatatttatgcctaccaacaattgcatatatgaatatgtgtaagttttaaattatttgtttaattgctttcttaaaaatgctttagaagaaacattgaaaacattaatatttctatgtgaatggattttaccctaaaccactaaatactcaggattgggtgggacaaagggaaacaatcattggatctcaactatagttgtaaggagattaacaataaattttaatctcgattcaaatgctatttttcatttctatttttatatatttaaaattctcattccataaactttgtgttaataatatttttcaatcaatgaaacgaaaagttaaactttaattcccgtatgaaaaatcaaactttcaatctcaataatcaatagaaacaacatcaaatttcaagttttcaaaatctataaaaataaataataaaaaaaaaaaacagatctcataaatacaaactcaaacattagaaccccagtaattcgctaaaactcaaacattaaaaacacatacaataaattcgaacccaaacttaacacacatcagaataaaaattaaacaataaatgaagatttatgctactatttttcgaatttcgatatttattaacaaaaaatttaatattttaagtatttatgtcacaaattttttaatagtaaagttaaaattttatcatgtaattcttagtaattaaaatacacaatttattttaatatataatttaaaatattttatatattcgtgaagtgcgagatgtttactagttatatagacttctatttaagaatactctattaaaaaataa

SEQ ID NO: 16837 - DNA, 1599 bp, Cannabis sativa
gcaaatcacaaaattagacatattcccttacaaactattagaaaaagaaaaattgaaggtggaagtcctcaaaccattctattatttgttttttctttctattttatgttgccaagtggagaaaataaaagaaaaagtacgaaacttgtcattgctatttgctgtgttgttaacaacagagcacattttaaagacaaaataaatatatttgcgaaaataaataaataaaaccaacaactccaacgattttttctatatatatatgtaagtctatacactttccatcttcatctccgtcaacctctctcgtaataaactctctcatttcaaccccaaccccatttcactctacttctctgcccctcggtttcatcgccataagcctatacatacatacatacgtacatatacattacacctgttaaagcctaacctctcttgtataacccttttatttataagcctcattttgcttgctacctggggcattttcggtttctgggttgctctatctcttcatatttttttcaaggtaatttttcctttttgcctgaatatgatttctgtgtttgatcattcattaaattaataaaaataagtgatttcattttattgattcaatatggttttgatcacccccttcaaactaaaatgcaagacccctttagcctttaggggtttctgattatggagaagttctttctctgcagatctgcaaattatgtgttgcacaatcttaaaacttttcctttctttattatttttttcctcttttttttttttttttgttaattgacctgacacattcgtcgcgttgtatttttctgagagctaatgaacctatgatctagatgaaaataagcagtatttctaattagctatttggtttttttttattgtttttaactccatgtaatctaatatgggtattgatctaaggtgcattagaagccttaaaattgaagatattggcaaaacaaattcattttcttttcccttttttgttttattgtagctctttctatttattattattattataattattattattataaataaaataatttagacaatgatatagtagacccagtaacctaattatttcatactttaaatctcatatccattttatgatatggttaatggtaatcaataattgtgttatgtgttttttttttcttttctgacatgataattgttatgttaaattgaagcataacacaataactttggtgcaaaggaaagaaagtagtggaaacttattgtgcttaacttcatttgtgcagttctcagaatggctaccacagcatttcatcaaaccattgggaccttccaatctcatggacacattaataagcctgggattcgtaaagagattggtgatgttgctatgagattacccctaaagagtttcaagctcgaactaggactgtcgaaaagagcatgtttctcaagaaaccttggggtcattaaatcctctgcttctcaatcttctgtggctgatcaagttttgtctccctctaacaaaaacaccagtgaacctcggaagaaatctagtgagtttgcttaggctgcataagtttttgtacacatttt

SEQ ID NO: 16838 - DNA, 3019 bp, Cannabis sativa
  modified_base (1192)..(1210): a, c, t, g, unknown or other
  modified_base (1923)..(1929): a, c, t, g, unknown or other
gaaagaaaaaagcaagaaaaaaaagttatattttagtagtaacacttttgtttttaaattttttaatcacaaaaataaaactaaaatttttatttttcaaccatttttgttttttctttcaaaaaaaaaactatttttgttttttaattttaaaaataataaaaaaaaaactgtttaaaaaatttttgaaagtgttttattttttatttttaaaatttaaatttttaattaaaaaattaaaaaataaaaagagttttatagaacatgattttaaaaaattattttacttttttacttttaaaaataaaaaattaattaaaaaattattagcaaatgcaccctaagataaagaaattagattgaagaaagagtagagcactgtggaggaaaacaaaatcaatatgggacccaccaatttgtttcctagggaagaaaatagaaagaaaagtctctaccttcattaagtaagcagattgaaatattttataaaaaaaaaatgaggagttcctgatatcttccacattatgaaaagaatttttttaaaaaataaatcgtagttgagagaatataatagaaagttcacaataaatattctcttcaaaattatatattattttaataattttaataaataatataataatttatcctttctaccttttgtaactcttgtaatttctttctatttctattttttttcataaatgtgtacttaacttttatgaaaattaattttaaaaaattattactatgtaatttccctacagttcctctcctgtgattttctcctttcctaatgaataatgggccttttaatttattaaataaaatgtgccttctaaagcgaatccaaaaatggataagggaaaatctcaaaagcaaattcggaaaatcctgaattggtaaatatatatatataacaataataatcatattaattcatgcattaactccttaaataattttgttatccattattattggcgaccgaatcaaaaatttaaaacttacaagatataagaaacctatactagtttttttatatatattattacaaagaatttttttcattttcacactttcaaataattttttttacatttttataaagaaaaatctatagcaacccaaatcataaattttttttaaaaaaattaaaaatagtatataaggtttattattattattattnnnnnnnnnnnnnnnnnnnttattattattattattgttatgcatatatttaggctaattgagttagattgggctaaaaattacaaatcctaaccaacccaaaggaccaaatttagcatcgttgaatgggtctctccctatatttttatagttacttatataattaccacatattactaacacaaattattatttgtttggatgtcaataaaattattacattttttgaaagtgataaattactattttatgtttgataaaaaaaagttagtaactatatacatataaaaatagcatttttaatatttaattatttaaaaaagtgtaattggcacacattgattaccatctaaggacaccttttatgtaaagattcattcaacctcaaacaattacaaagtctaactcatctggagagatccaagcaactaaaggtaattaagggtacaaaaaaaaagttccagataattggcaaaacaattttcaagtaccagattatatgtatattatattatatatcaattaagtcaaaaactatcaccttttgaatatagcaacgggacaaaaataagttacagtttagattctatatatttatcgtaactaattgtgaggaaagaataaagatgaatagataataataataatatatattagcaaaaattgcatttggaaataaagagaactaattaataataaaacgattatgcacatgcatatatatatatatannnnnnnatatatatatatataaaagaagttatagtacgtatatatacttaccagacacaaaggtgaaatgagtatgtttgtgtgctttatacgtacgagttcgatcgatacttatgatgatatctttcttctcactttcgatcgaaagactatgatgatatatactagagcattaaaatcatgaaaaacacttttttgttgttgttgtttgtgtcttgagattctgtaggtaatggtaggtatatatttaataattgttgtagaaaggttgttgtaaatagcttattagtaggctaattatatttacacgaggcagtataatatgttgtgtaaataactaaactaagattaaatacagctttgaatactaaatccagtaccctttttgaatagcaatatgagaaaattaagtaaatatattagaggctagctagctagctaaatgtaactaattttgaggaattttctccatccatttgtttgatattattctgagagaccctttattattgccaacaaatgctctaagtaaaggcatgtagcaaggccagctttcggatatatatatatatatatatatatttatattgttttagtttcaatttttttaaaaaaaaatagacagaacgaaagaaaagatcaaaaacgaatttaacctaattacagcgtgaaatgccaagtgtacgagggagccacctcctcaaataaactcctatcttctcctatgacactatgtgctacatactaactaatatgtccgattcttatggttttttttaagaaaaaaaattattatcttggtttataattaattagttagttatagtactccaaatcaaataggaatgacaattgtactgcgggttcaggtacccatggtacccgcctttaatgggaaatgggtggggttaaattttggagactggggcaagtatatatgggcttaaatgtttatactagagtcaggattcgagtggaagtgcgagaaaatacatacccacctagaactcgctaatataaatatatatgggtgactgtttaatggttacatttttattgtaactatatggttacatttttctttaacctgtaatag

SEQ ID NO: 16839 - DNA, 6456 bp, Cannabis sativa
aaccttatcaatgctttaatgtgcatatgctgcacattcaaaaaccttcaaatgagacaagtctcgtggtttaccagactacctttcttctgggtttttaaattccacaacacttgatggacatatgttgttcaagtatgtcactgtaagcattgcctctccctagaaaccagtggttaatccagcctaaaatccatacatcttgctttttttaggattgttatgttcattctctttacaccattctattgtggagttagcctaatttttctatctttgaatgcctactcttctgcaatatgtgtcaaacatatcattgtaaaactctaggccattatttgtccttagagtcttgatcctcttgatactcaaatttccatcaaagttttccatcctgaaacttagaaaaggcatcatttttatattttaacaaaaaaaacccaaaccttcctagagtagtcatcaactatagatagaaaatatctacatccttcatgtgtaggaaccttttcaggatcccataagtcagaatgaatatattcaagtatatcttttgatttatgtgtcccaaccttaaatttaagtctatgatgcctacccataatattatgcttacaaaaattaacttcacttactttatctttacataaaatattttgttcactcattagttgcaaaactctttcactaatgtgtcctaaccttttgtgccatagggtttctttagagtcttcaggtgaatttactattgtgctgtggcaattaaaaactggttccccccttagatagtatagacctccttctttgtagcctttcattatggtatggaacccttgcttaatttcatagtatttgtttcaatcttactcacaacaccaatgttatctagaacactaataaaaattaagttactagttaaattaggtacaagtcttaccctagtcaaagaccgtaccactccatcaaacattttgaagctaacagtgcatgagccttcaatgtgacatgtttgattgttttctaggatgacctttcctcctttagattccttgaaatcagtaagtaaagatttatcattagtcatgtaaaaagtacaacctaaatcaagaatccattcattcttgaatttagtgctagtaatgtaaacttctccactttcataattatcacttaaattagcttcttgttgtttttctttctacttttagaagtaattttctccctgattagcatcattgtcttgacatcaggcttgctcttgttatttcttttctagtaataacattctctcctaaaatgcattggctttccacagtgaaaacatccattaggatccttgtgtcccctagattaagacctgccttttccttattttccacctctgttaaggcctctgctgtgacttcttttcctgttattccatggcttcttttgatgaggccttcctctgcacaggtttagctctccattagaacttccaaacttgtaattcctcaattccgaatccataaactttagggcaaaaataacgtcatccaaagttatggaagtccttccatacttaaattgttattttaacttctttgtaagaatctgacaaagaatttaagatcgtgattgcctggttttcatcacttaaagattcattctctccagaattagccaactcaatatgcatccttaaaaattcatctacgttctattcaagattcttggatctattcatcttaagcccaaagattctctacttgagaaaaatcttattagttagggacttctgctataattgctcttccagttttctccaaatctttgtttgtctcttctttatccattaatctaatgattgcatcacttagattgaagattatgattcaagttgtagcttctaggtattcttcctgttggccattcaataggttcttccagcactcttagcagcttctgctgtgctaacagagatctaatttttctccttcatattttgtaagtacttgaaccattaaatttatcaatgtcaattttaatactactcatattaaatttgtcagaattcaaatcagggataggtttagagatttctggttgatcactcagtggcacatccaccagatcctaagatcaaggccatcttcctaatccaatctttcttgtgcttgagggttaacctcctcttaatcttgaggatcaattgcttcttgttcttgaatattgatttcttctaatcttgcttgttaattgtattaatgcgtatcttgaattcttgtggaataactggctctgataccactattagaatttgtagcttctaactccaagatagaaaaattagtacacaaaaggattatatgatatttttcaaaaatgtgttatgcatccacaacacttggtataattaaaaaccaccagaaccctcacacgagacaaaccctagcaaaacagattgatctcttagcctgaagattcgagaaacacctcgagactttatctctctcaaatgagagaaaaactagggttccaagatttgagagattgtcttaaatctctcaaatcaaacacacacagaaatcacaaacacagtaccaagaacacaaaaacttatacacaatagaaattagggttagagtttgagaggaaaaacaaacagtgcacaagagaagaaaacctcataatttgatctcggaattcacctcagaaaaaatgggctacgtctccgtcaagctacctcaaagtgcttgatcttcattaatccaaacaagttttacaaaacttgcaccaaatttcaaatcacagataatctgtcttgatttctctctagctaactaactcttttcctttttctttctgtgtatgaatacaactcaagagcttttctctctacttctttctactatgatggatcacacaaggataaaacttggtccaaattctggttgagcaaaattttcttgttgcagtcattttttgaaatttattgtaactgcttttatggttttcagttgcaactgatttctagtaagagtcttggcagagaatctgtattgaaacatattagcccaaattcctgttttgttatacttgagcttataaggagatctattcaacataattatttttattgtcaaatgtcaattacaaaaatagcattcaaattacttattaatatggcaagttaataagatgacgtttagtacttaatgttatcaataaataaaaattatttatataatatactgacaccaaattaattataccaattttcaaagataacaagagactttagaacacaacttctaacaaaagaaaaaatgttccacaacagtattcacaataaggtatgtagtacaatagagcttcatcataagaatttggaactacaagtgcattggatacttacttagcctatttcttctttccttttggtttcttcttgtttctcttggacttgttacctccctgttttttgctttccacatttttactgctacttggtgttgcttcagtagctgctggtgccggtggtacttctacttttgttgcagcaatagtagcttgagaagccttggatgacagagcctcgtcctcagaagcctttgacaacgacagcacctcatcctcggaagacttggacttgttactttccttgttttcgctctcagaatcttgactgctacttggtgctgaagcaatactagcttgacaaggcttggacgacgacagcacctcatccttaccatcagatccaactccaaccgagctcattgaaacctcaactttatccggaaacaacattcttaatatttcattattggagggattggaactcatacttacatacatagcatctggacatgatttgaacgggcaatgtccttgtaaattcacgatcaccataggattgttgatgttcttaagagcttcagcgatcaaattcacattgaaagtaatttggctgtggtttctctttactcgcttgagggcagcacgaaatgagggtggtagatgttcagttatgaggtaattcttcaacaaattgacaagtaaatcaataccccagccaaagttgacacaaatcaaacatgtcagcacaacaagtctagtaacaagcacagagtagtgctccatcgctgctgtggtgaaatttcgtatccactgaagtgtatccatcttattgttgagcaatccttgcactacattgtataagaatgcaagtatgggttccggattgactttataagaagacgattgaatgaggctggcaaacttctcatagaacataagaaattcaacaaacatagatttagcggataaaaaatatccattggaggaagacaaccaaatcagaaggtactcaaggagatacaagaaacaattgggagatatgtagtcagctatcctccaattggtattgtaagtactttctaaagcttctttgaacctacaaacaagacacatctcccaaactcctatctcagatgcgttcgcagggcgatcttgtgttgatttttctccattgttgggagatacagggttgtctggaaaatctgatcccctaacattgcctagaacttcaaagaataccttccatggtttccacatttcatcgcggttcaatattgttaaaatcttcttacagagttctttattcaccttcccagatccaaaaataatcatggcaattcttccaacttgtccgtgggtgggtttattacttagactgtcagcttctctattcaacatactcttagtagtgtctgttcttctgagtaaaactatgtttttgctcgatggttttggccattcagggaaaatgtaacgaaccatgctttcagtagaaaatctaatgcacttcaacagattctcagactcgtgatgacccagcttcagaattttcgcatccagaagaaatgttccaacctcgtaaattagagtaagggtcctgcttttgcagaaagttacatcacaattctcaattgtaaagttacaaagagcttggagtctgtccaaaaccttgacaccaacagaaagaatctcagaacaccaatatctctgagcagcagaaacaaactggtgtaaatcaatggataccaactttccactgtttggtcttttagccacatttcttgcccaatcggcctcagggttaagaaaaaaatataccggtttcaaattatcaaactccctccaaacacctaagaaattcagaactctccataatttctgaactcattaacttcttgggtctcaagacatctaaggaattcgaaaatgccaacaatcttgtctttccaaaaattccaaaagtgaaccagtgattctattgataccttgtttttagaaatcaagtcttctgaatgctgcataacatcaggcaccaattcctcttcccagtagtacttggtgggtttaaaggaaaggtgcagagaatttttctagcagatagaatatcaccactaacactcttgtgcctctgagaagtaatcatctgatccatgactgttatcaattcactctgttcatttgcaatgatgtcagcctcagtgcaaacaatctcatagaagctttctgtatcattctttgcaaatgttttggcttttgttaagagatcaccctttcctttgaactgctttaagggccagcccttgttacctggtgaccagagggagttggcaagcacataaaaaagcataagattggccgactctttaaagtttccggcttttttcagcaaatccaccctgcgtaatgtatcacctattagcttagcgatatttgcagcttccatgaaattttccctttcttcttccaacaacaaaagttcaacaaagcagcacaatttacttgaagtcaagaagttccgaattgaatccatggaattaaactctttaacaaatttcatcatggacctcttatctttgatctcaaaataatgtaaagcacatctctctaaaaacatctgttcaattttgtttatttcatcacttctctctgaagtactgcactcatttgttgtatgttgtttccaaaatttaatgtactccaaacccatctcaaataatcttcctttggagcaagcagtaagacattctgagaaaaaattccctttagcaaaaacattagcagcacgctcatgacaccctgccagagaaaagcattctgcagctttccgaagctcgccacacttttccaaataaatacgacctggcaaaagagaaccaaatcatagaaaactattaaaattgcaaaattatgctgttgttttccaatttagttttattgagataacatgaacttgatcacatgaaaaaaaaattgttttcctatttttatttttaaaaaaaaaattgcaaactaatagtatgtttaaagtttatttatacctgctttttcatactctccaagatcagagaaacatctggccgcgaaatcagacttgccaatagcttcaaatatttc

SEQ ID NO: 16840 - DNA, 9452 bp, Cannabis sativa
  modified_base (7160)..(7162): a, c, t, g, unknown or other
  modified_base (7379)..(7382): a, c, t, g, unknown or other
ttttttttttttttacatttcaaagtagtttttttttttgtattttatagaaatttacatattaactaacggagtaacctaaatcataactaaaattcacataacaacctatataaaaactaccagagcaacctaaactgtaaatttaaaaaaaaaaagttaaaaaatagtatataaaataatatatataaatatatttcacacacatttttttttttaaattaaaaaattctcattaatcagcaacaaacatccacactaatatagtgagcaatatttataaacacatgaaacatacattaatgtggtcttattattagctctaataatatattttatattatatataatataagtgattattgtagctgatctgatcatgcatgtgatccatcgttcgataacttaggatggggttcttcataattccctacaaatatatataaaccaaacaattaatcactttcatatacatatatatatataataattataaccagaaacaaagtaataatatttcatcttaattaagtagtgctaatatatattcatcatattaagaatgtaaaattataatcgtgtatattgtagttattatttaggattatttgtaaatttttaaaaaatttcaaataatttatagtatcaaaaatataattgaaatattttgttacatacgtacaatcacgaaaaaaataaactaattaaataactacaaagtgtataatcacgaaaaaaataaactaattaaaaaaacttttttaaataccaacactccttaaagagggtgtactataaatttttccaataattaaaagaaatatagtataaaatttataaatataattaattatatttagagaaagaattaattaactggatgatgaaagactggtcctttggccactgttataattgtattcctcgtaaggtggcattggtcgatttggaccgggcggctcataatcattgatcactaacttataataagtttcatcatttcctacacatatataaatattataatatcagttccatgatataaaaattggtctaaattaatcaaattagacatatattgatctcccctaacaagctaatttttgtgagttaatcccaataatttttttaatatggtatcagaggggcctaactaattttgcgagtcatacacattggctagtgatataaatttaatctagttaataaagtgagaacaatctttctttaagaagtcaattttattaaagtgagttatactcaataacttttttttaataagagagaatatataaataaaaaataaactaaatacatatatagagatagaaaaattaattaactggatgggaaagtggtgtggtgtggaagtctggtcctttggccactgtaataattatactccccataaggtggcattggtcgattaggaccgggcggctcataatcattagtcaccaacttattataataaatttcatcgtttcctaccatgtacataagatgagttagctaggtctaataatttttttaataataaaagatatatacaaatatatgtataaatataaattattcataccaggtatatttcgagcaaagcatacaagggcgaaacttatcacaaaaaacaacaaccaaataatataatgtgatttgaaaccctccatctagggttaaaaaaatatctcttttgtgacacgtttattaaactgtaatagtaattaaaattaaaataattaaaataataataataatattaaaaaacctctttaaaagtaggagagagaggtaaaaaaaagttaaactaaggccaaagtaatctgtccctttctcttaactaccactatttatagaaaatataaataatattatatagaaaattggaagataagattaacacttgtaactatatatatatagaatgtgaaaatataaaatttaatgatataatatagaaagtaacaataataattttgattaataacatgacaaaaatatatactagaggtttcacaaacagtgtacttggctggaataactcttcctatacataaaaaaaatgttacatgtttttttttaattattattttttttccttttcaaaaattattattccttacaaataagaaaattaatattcctagacaatatataaggatagtacagactgtaacatttagaaaattaaatgataaagattggcactaagttgtaactgtatatatatatttaatgtaaaaagtataaaatatatatagaaaattagaatgtgataatatacaatgatatatacagaaagtaacaataatttgattctataataacaaacaaatatatatatatatacttagttagaattaattattcttcctatatatataagacatgatacaataatatttttgttttcctactcaaaaatattattagtaattaactcccaaaaatgccactaattttacataccatttaattcataattaattttaccctaattattaattttttgaaagtagtaaaagcctaggacttcacatattaatgttcaaaaaagaacctttttttatttttaatttttctcataacacatagtttaaaatatgtaagaaatcaaagaatattatatgtagtttatcaaaacatttggcattctctcttttttttctgagagaatatttggcatttggcattttacactttataaaaggctaacaagaattcattacatataattattttataccaaataaactattctttaaataaagaaaaaaaaaactctaaccatgatgcctcatcatctctgtcaaaagaccatttcattatttgttgtaattttcttttctttactatctcacaaatcatcgttatgcaagggtgataatcaaccagttaaaaatcaagttacggccaagattactaacgttttaatagaaacagacttaattcttcactgcaaatcaaaagacgatgatctcggagttcaacttcttcactacaacgactcctttcaattcacttttacacccaacatatggggaactacgctcttctattgtagctttcaatggaaagatgaacttcattggtttgatatcttcaagatgaaagggagattaattctccatcttaatgaatggattgttaattcaaatggaccatgtcaatttgacccagctactaacaagtatagtctttgttatccttggaaatagacacaccaacaaaaagtagtagagatttcaccaaatgttgtgttttttttagtgtgaagagagttatatttctctcaaatatcttaagaataaattaagttataataacagttttgccatgttataatacctatattttgttatttgattgtagtaagagaaaaaattcttttgtacatttatgagtacttgttctactaggctatataatataacaaatttcaaatctctgaataagaaatttaatataaatgtgttggggtatatcaatttaagtcccacatcgaaagaataaacaagagacgttgtcttgaatttatatatatgtgtgttcatcctactctattagtatgaagctttttgagaaagtaccaaaaataaaccataagcgcttagactcaaagcggacactattattattttaatgtaaaagttaaagtgaggtaacaggccaataagatcgaagaacagaacccaacgaaatgtgggttttcaccaaagtgactaagagaattccattattaaaacatttaacatgctatatgaaaggtggtaatgaagttacaattaacattggcagataacctctaaagaaaaaaagaaaaagaaaacattgaaagaactcttcccaaagttacacttgaagcaaaaaagaaagagaagaatgagaaaatgaaagtgaatttgtggaattaatactgatcaaccttcaaatggttggcttgacactttatttatattgaaatagctgatcaataagtcagaaaaaatatctttatgttatgattgcatgattagagatggaaataaacaaatattagtagattattttaaaaatatttgtattattacgaaaataagtcatattgttacaaatagctatttgtgatataaattttcaattataaagatttttttaaattctaattgtgctatatatgtaatatgtgaaatttgatattttcacgtttagtgttcggcaatagtgaaaactcgacggattggctaatagtgtcacaatagtataatttagtgttgactggatttttagccagccgacgcggagtcgtaataaatgagatttaatcaaaattgtaacaataaatgtgattaatgacattgaaatttgcaataaatgtaaagaaaagacaccataatttaaagaggttcagccccagatgtcggtaatagcctattccccttgtgttttattgatcaaggttgcaaaagtcaagaacaggcttttgattgcaaagaatgaaaaagtgtttgtttttattctaagtgttctaaatcgcggatccccatcccaagtcatggatgaccccttatataggggaaagggtcggtgcttctcgcttcaggagacgcgaccaacatggagctatctcaaccgtctccttgattttcggaggtagttgaagtctaatttttatgataatatcccgctattttcatgggtttataactgtctttgagcctttcatggaacttgaacatttgaaatagtcactaacgatgagggtctcctaagggtgtgacacggtcgttgaccaccttcggggatgaagcccatacttaagggcgacactcccgaaatccaactcgaggagggtgacattgtcatcacggggtgaccctccgagatccaacttgaggagggtgacaatcgtcatcccggggtgaccccctgagaccccttgtacgttgccagtagttataatattatatatgtagatgttctcatctacctttgagagtatcattatatctatggtgggatcagtgtcatctaccccttagactaacttggcatttggatgtgtggtgattgtttattccgcttacgaaggtgatcgtttttccttcttggagacgcccaccttgctcaagctaggggtaaaggtgaccgtctgacttccattctaacattcataatcacctttcatggttaacggtcatgaccactcttcatggttgacgatcatgaccacccttcatgattgacggtcattccaacattattacacttaattatttagtttttttatttaaatatttaagaaaataattaattataattaattgattttaaaaaaaaaagttttacttattggtaacctgctattataagtaaaaaaaatgtaactatgatagttataataaaaatgtaatcatttaacaatcactcatatatatatatatatatatatatatatttgggaaaaaaatggatataagttgttatatatgtctaaatgaatcaaatttagactttcattaagtgcaaacaactaggtctaagaatataaatatatactagctagttgtgctaattattattcttagataataaggacacttttatacaatttgcaaaatttagaagattattaagaaataaaattgtcacattaactaatatatagaatgtgaaaatataaaatataaatgatatatagaaagtgacaataacttttgattctctaataacatcaaaaattactagctggcctaataaattactattcttttataagaaatatttggtacacctgggtttttcttatctgttttcctttttaaaaattaataatttatctacccattaataaataattaattttaatcaaaatttggaaattgtaaaatcctataaataatgtctaaaaagggtttttttttttaattttttttcttctcataattaataaatatggaaagtcatatttaaataatttaaaatatttgaaaaagttaaaaataatactatatacaaactcaaattgagatagattccaataatttttaacactataaaagggtaacaagaattcattacatatcattacaatacatatcttcaataaaccctaatcatcatctttgctgaataatgaggagcatttcattatttcttgtagtcattttcttttctttactacttcacaaatcatcattatgcgagggtaaggatcaaattacagtacaaataactaacaatgtagtagacacagacatggttcttcactgcaaatcgaaagacgatgatcttggagcccaacttgttcactacaataacttctttcaattctcgtttgtacctaatatatggggaactacactcttccattgtagctttcaatggaaagacgagatccattcatttgctatttttaagtttgcgagagggagaaaagtcttcaatcttaatcgatggattgttgatcggtatggactatgcctatttgatccagctactggcagttttagtatttgttatccatggagttagaaagaccaacaaaagtagtaaagattttaccaacattatttgtatggtctttttttcagtattataaagagagtttattctctaagtatcttaaaaataaatgaaattgtaataaaagttttgccatgttatacaatacttattttattttatttttgttaagaatataggagtattctttataaatctatccaattctaatctaaagataattaaccgatctaaatacaatagattgccaaacattatatatatatatatctaattatggtcggatcataccaaatgttattagatcggatattgaatgaggtgttcgaaaattcaatacatccaatatctaatcaaactaattaatatttttcatttagtttggattagattttatattgttatacttaaaatatatatgtataaatgaaaacaaagacgattttttttggatggttgtccaatttaatacaataaatactagacttaaaatattggatgatcaaatctgatacaaaagaatatactaaatttaaaatattagataaatttgaaccatttcatgtaaatatagaagaataacattcaattaatagaatgagtggcataaatacttaagttgcaaataaatatctaagtttaatttttggcggtannnatacctaagttataattttagaacctttgtaggtacctgtctgttaagtgtaagtaaattgccatgtggcaattcctaattggtccaagtcattaaattttttatttttttaaaaaaattaatttaaatatgccaatgagaaaatgacacatggataataacaaaatatttaacaattaggtacctacagagttccaaaaatataacttaggtattnnnnccgccaaaaattaaacttaagtatttatttgcatctgagagttaaatttaggtatttatgctgcaaattactctaatagaattgatacaatccaacatccaatgaatgtggatcggttcagatgcttgaaattaattgggtcagatcaattgataaatctaacatccaatatataattaaatcgaatcttgggtaggcctcaagacattggatgtcgtccaatgaacatccctaattaaaaatatctatacctatatatatgcctatattttggatgtcatccaatgaacgactctttgagtcgagggtgtggagtttattcaggagtccagtgatcacaatggggttcctgatcctcctatcgctagtttaggtaggggtggtggtgataattctcatgatctagaaaagaaagactccaacatcatctagtggctcgggttagaattagaggtttagagggaactagaattgaagtagtcgtcaggatggtcctgaaggccattacacttatccagagtgttcagtctgtaagaagcaccatctggatgagtgttaaggcaatgcatgttttcagtgcgttgttatgggatatttcaagatagaatatcctcatttaaagaaagaggaatccaagaaagaaacaaaacctgctccagctcaggtttttgtcattactcaagctaatgctgagctagcccatcaatagtgataggtcaactctctatcaacaactcttattactcagttttatttgatccaggagctacaccttcttatgttgatactagattaattgatagttataaattagggtttgaaactctactgctaattaataaagaattagttatctccaaaaggatggacgatagagaattgagcgctgacttagttgagctagccatagaatattttgaaatcatattagaaatagatttcctttctaaagatgcggccactattacttttgagaaaagataatgacctttcagcctgagagtgaggtaccatttatttttataggatcagttcagggttcttgtgttccaattatattaatcttgaagcttgaatacctattgtaaggtggatgcataagattcttaggggtagtgatagatactagcagaccttacacatttgggcctaaagatattcgagtggtgaaagaatattttctgaagaatttcatggtttatcaccataacgaaagatagattttgttattgatttagctccaggagtggaaccagttttcaaagcaccttacagaatggatctgatagaacttaaaaaaattaaaggtacaacttcaggggatgcttgatctaggctttattagacccaacgtatctctctggggtgctccaatgttgtttgtaaagaagaaggatagatcgtgttgactaaggatttagccaaccgatatggagtctgactaggattgaatttttcttatgactgtcacatgagaatgataataaatgtaagaggcacatagatttatagaggttcgacccttttgtttaggtaatgacctactccccttttagttgtattctctctgagataataccaagcagattacatgatgaaaccttgtaatttatggctaggctctctttagtattacaatgatatgtattttgcaggtgagaagcatgagaaaagagagaggacttattgctatagtgcttttatgtgtgattgaaacttaagttctgagtgtgtatctttccctttatataataatagggcttacaaactgtacatagagatattcttagaaaatagggaagttacactgtatattcggagtaaataattaataatccctaaagaatagggtttttatttattgatggagagcccctatctttttggacagtttgaactgctccgaagttgtaggagtgctgaggatgagttggaaggctttgtggaaaaacacaagtgtgggcgtgtttctgtagacatggccggccaaccttcactacaagaaatgtcacttttaccagcacatttcgcaaactgcactggcaaagaggtcaaagttttaccagcgta

SEQ ID NO: 16841 - DNA, 6522 bp, Cannabis sativa
  modified_base (41)..(65): a, c, t, g, unknown or other
tttttatatatatatttatataaattattcaataataaatnnnnnnnnnnnnnnnnnnnnnnnnntatcaaaatgttcaactctttattaataatcataaaatttctttatatgcttttcaaggcataaaccctaacaagatttggggtccaggtctggattcgggtctggggtccgggtccaagtccggattcggatctttggatctaggtattggtcctagtccgggctggggtccgaggtctgggtctagagtctagatccgggtttggactggggtcggggtccaggtctgagaccagggttcgggtccggggtctaagtcgttgtcctggtctaggtctaggtcctagttcgcgatccaagtttagtatgtgagcaaaaaagtaaaaagaatatgttagattttttaaaaaaatagaaaataacactttaatgttttttattttcttattttataaaactcaattttttaaaaaagtattcttaaaaaattggatgaaacaccttctattagtttttaaaagttattttttttttgtttaaaaatagaaaacaattcttagattatgaagctaaacaacccacattatatatcggagaaagaaacatgtgaaaattattatacgagagttttcttaaaccttttttttaggaaagatttcttaaactcttagggtgcgtttggaaagccacaatgtaattagatttgtgtgtaattggaggtaattacacaatttatcatgtttgtctgaccatgtaattacactgtaactgtgtaatttgaagtaattgaggggttccaattacactcgccaattctcccctcataagaattgaatgtaattgtaattacaaaaaactttccatttaaacattagctaactactaaaaaatattattttcccatgtaattactaactattttgtcaaacaagatattaagaattcatatgtaattacactacctagtaattacacagatacttccaaacgcacccttaatcctcatgtaaaccaaaaacacaaacatatttttgtttaaccaaaggtacaatttaatttaacaacgaccatacacatttattcaatgagaatcttgacaatatatattttttattattttaaatatacctggaaaaaaaattaaatgccactttaattataagttttttttttttttttaatttttaaattgaatataaaaaaatggacaagatccttattcgtaaaggagttttttcttcttggtattaaaaactaagcactaaatatcatttaattgagatgtcatgccagtacgtactccacataatggaacaattaaattcctgttgtaactataattataccacactaattaatcagttgctaaaattgataaacatatatataaacaaggattgtgtattacacccacaccattactaaatatggttaaaattaacaaactagtttaatccatcaccaacctctccaattacaattacaattttttttaaaaaaaacgagaaagaatataaatatatacacgataaaatcatcaagtaatttgtagtaagaagaaaagtgtggaaataaaatatcaagtttaattttatttttgtacggaaatcaaatttaaaatttcaaaataagaaacatttaaatgattttagttcattataaatttaaaatcattaacatctttaacttctcgtgttttcaattaattgaattttaaaagtatattaaaaaaaataattttattaatttgttggaaatcaacttatatatgtatatatatttttttatatattattaactttaatttgttttctatttttcctttttatattattattattattattattactagttgatgttaattgtacaaaacatttaatagctactttattttatccagcctttttttttttgagaaaaatgcttaacttctagtattaaattttacattttttttaaaaaagtaactaaaaaaagtaaggttgcattaattaaataaatcaaccgttatagtggaacttaaaaatggagaataaacacgtggctaaatacattattttagagctagtttggtacaccgtattgtattagattgtgttgtattatttaaatacaatactatatttgatattgacttgtaattaatagattgtgtaaagttatattatacttttaatacactcgatcccaacatcaactatgggtctgggtctcgggtctagggttcaggtcgcgggtctgggtccaggttcgggtcacgagtccgagtttgggtcacgggtccgggtctagatttggatcctaggtctgggtttaagtcccgggtctgggtccgggtcccgggtcccgattccgggttcgggtcccgggtccaagtgtgagtacaagtcccgagtttgggtcccaggtcccgagtatgggtccaggtttgggtctcgagtccgagtttgggtccaggtctgagtctgggtctggggtattagtctggggtctgggtctgagtcccatgtccgggtctgtggtctgggtcctaggtcctgggtcctaggtcctgggtccaggtcctaggtttgggttccggttcgggtccaaatcttagatttaggttcgggttcaagtctcaggtccggatcgaatattggtgttgacaacgaattatttgtaaatattatacacaatttattataaattaaatatacacatatattgtattaaaaattttaatcataataattaatgcaatacattactttatctgttatttattatttaatataatactaccgtaccaaaccaatcctaaagaactagtaaattttatttgttgctttttaacaggcaatattttgtacgtgtcaataaatcgcagtgtcattaaattttataaatgtttatattaattttcataaagtgcactggcttataaatatttttctcgctctttaattatagcccagaaaaaatctcatccacatcaataatatttagaaaccttttataattgtttatttatttatatatgtttttttaattttaagaaaaaacgaggtcaacttcaaggtttctacgccgtttgatatgggaaaagatccacgtaatacccttcaccgtccgatgtggcataatcatcgtcatcctccgacgactttcgttttctcacaaaaagaaaataatagtaattattattattattttttttaaggaaaaataaataattaaaaagaaagtttttcatttttaatttccacgaaaaaacataaataaatattaataaaataataaaaaccttaacccaaggccaagggttgggagagagtggaggaccaaagtaaagtcatttaaaccaaacatacctatctaaccctttctctctctctctctctctctctctctctatgttttcaacagtttctgttttctctctcttaaatttcgacttcttctttctctctctaagtttttattcataccaaaaacaataacggcatattcctgcccatttcttcatctctctctctctttttctatacctgttccaagcttttctcgggataaatactagacaaacgcaaagagtacaattttcccatacaaaatcattcttgggatttatcattttcattttctcgagtagatttcatctgggcatttgaggtttttggcttccgaggttgtcgttgttatttaattttttttaatctggttctgggtttttagcgagaatggtggtgaagatgatgaagtggcgtccatggccaccgctgccggcgaagaaatacgaggtgaggcttgtggttcggcggttggagggttgcgatctggtgcgggagggctctggtggggaaccgggaaagttgaccttagagattcggtggaaaggacccaagatggccctcagctctctccggcgaccggccgttaaaagaaactttactagggaagttgatgcttcttccattgaaaacggcgtcgtcgactgggatgaagagtttcaaagcatctgctctttctcaccctataaggacaatgtgtttcatccttgggagatcgcctttactgttttcaatgttagtttctttttctctctacctttcttattctggggttttttttttttttttgaatttggtgggttttcattttctatggagaaaattcgagattttctttacgggttttttgattaggtgaattgaaatatgggttttatttttttttttattttaggttttgaaatcttgaaaattctcgactaacaattctagtatatttgtacagggtcctattagtgtcttttctgaaatcaaagagtcaattcaacttaaaatggactgatgttaggtttgaaaatggattattgtgatgagtagatccgattgctgttattttacttttctaacgacgatttcttcattgatttatggatggagaaggaaataaatttagtagtgtgggttatggagattttgttttctggggtgtttgacttttgactgttaggagtgactaaagggttttgaatgggaagtatttgtcttctatttttatgccaagttcaaattttatgtatctaaatcgtttctgattttaagaagatttatttggtatgatataaaaattactgacttgattttcatcatataaatcagggtttgaaccaaggatctaagaacaagattcctgtggttggaacagcattggtaaacattgctgagtttgtttcagctgctgaagagaaggagcttgaattaaacatcccccttacaccttgtgggggttcatctgagccttgtcccacactttgtgtatgttctttctctttgtagacttttagtccttatggttgcctcggttttattaccccatgaaatttgacattttctgatcttagaattccttaaatcttgcagttaacgctgagcttattggagctgagaacttcacatgaaactgcagagcccgtagaaagatcaattgttcctgctccatcaccaactcgatcggtggaagctgtttcaacagaaaaagacgaactctctgctcttaaagctggtcttagaaaagttaaactttttacgggctatgtttcttccaggaaagctaaaaaggcatgtcgtgaagaagatggtagtgagggcaggggctctgccaaaagcgatggggagtataactatccatttgactcagattcactcgatgattttgaggaaggagaatcggatgagggaaaagaggatgctacagttaggaagtcatttagctatggaactctggccaatgcaaattatgctggagtatcattttactcaagtgcaaggatgaatacggaagatgaggattgggtgtactatagcaaccgcaaatcagatgtgggatgctcaaaggttgaggattcatctacatcagtctctgaaacacccttaattttaggctcaaagcgtagcttgctgtcatggaggaagagaaagcttagcttcaggtcccctaaagccaagggagaacccttactaaaaaagggtaatggagaagaaggtggtgatgatattgattttgatcgtcgacaacttagctctgatgaatctctttctctgggggtgagaattcactaccatttgctttctttatttgatgcacttcttctagtgctcttaaagtgagttatgttagattctaaattcttgtgcttattttaagaaatagaatgttctaacatagcattggcattggcaactatttatacagcggcataaaattgaggaggattcattagcaaacagatcatcagtttctgactttggggatgacagttttgccattggcagttgggagtataaagaagtaacaagccgtgatggaaacatgaggcttcaaacccaggtcttctttgcttccattgatcagcgaagtgagcgggcagcaggtgagagtgcatgtactgcactagttgctgttattgctgattggttccaaaacaaccaaaaccacttgcccatcaagtctcagtttgacagtctaatccgagaaggttctttggaatggaggaatctctgtcaaaatgagacatacaaggagttatttcctgacaagcactttgatcttgatacagtcctacaagccaaaatacgccccctttctgtcgtttcacagaaatcgtttattgggtttttccatcctgaaggaataatagatgaggatcggtttgactttctacatggtgccatgtcctttgataacatttgggatgaaattagtcgcgtgggttctgaatgtgtaagcagtggtgaaccgcaagttttcattgtcagttggaatgaccatttcttcattctcaaggtggaaccagaggcatactacattgttgacaccttgggggagaggctatatgaaggctgcaaccaggcctacatcttgaaatttgactgtaacactgtaattcacaagatgtcaaatgtgacacaaggatcggaagataaaacaaccagcgaacagcagattgtggctacagcagcagaa

SEQ ID NO: 16842 - DNA, 4445 bp, Cannabis sativa
aacaatctcaatagttcatggagtatttttaacgaccttaaaaatttagagaacataatttggtacatggcaaaaatcctaattagcctaaaataaatttagaacattgtttggctccacatgtagaacaatactatgtattgtaaaaaattatgtaaaatagaatatctgttgtatattatatttttgataaagttgtattttcttcaaatttatagcatttattatggagtcctcctagagatattatctcaattattctataccaatgtgttaatacaaatgatatgacaagttatttgtcttttttcaattattatttaaaacacaaaatttatataaataataaattcaattgcacttactaataaaagaatgataactcacattcacaacaagacatattattttgaactttgtgttttacaaaaattactaattaaatttgttttattaaatgacaaaatagaccttgagttcaattttcaataattttattttttaatataactaacataaaaataatttctaatacaaacaaatataaaaaaaatataaccagttttataataatatctctaaataggattattattaaattttattttaacaaaaaaaatcaattcaaaatttatactattttaaaaaatacataatttattttattatttaacaaaaaagatagtccgattaataatttttacaaaatatgatataaaatagtatttaccctaaaaataaattcattaaaccaaaagttaaaataatttattaaaaaaaaaccactttttttaaggagaaaagatagaagaaaagaaatatatttaaaaagatgcaactttttatattggtgagcttgcttttgttgttgattgattctctatcaatgacatggccacccactctttcacaattcatttattaatttattattaattatttatttaataaaatcttggatatctatttgcatttattctttctaaaccatttcaatgtataaggtcaatgatcctcaattatattttaatcttggcctaaatttaaagcatagaattttattaatacaaaaagtattatttcaacattaattattataaacaaagtaatttaatatcaagatttgaagagtgtttattataataatatattattaaaataattattaataaaataatataatggaatgttgtgacagttggttctgtcttccaaaaatttagtttatctttctttctattatttatgttgtctttccagctaaggtctctctctcctctctctctcttcttctttttgttctttctcaattcttctctgaaaaagtttccaatggagatgaatttccagtctcagaaaagggtataattgtcatttcaagctccatagatataaagtttgatactttgttaacaaaggtgtcttttttattgaacactcttactcttaggctcattttagagtaacccttttcttttcaagttggttttcatagtttttagtcttcaaaatctaatctttctttctgggatttcatcttatttataccatagatctttgtgtatacatggtgtttgataaaagtccccttttgaatttttttttcttttaaattgaagtgattatgttaggtcattacttagataaatatttgatgagggttttgttttgtaagattccatgtccttctttcatttgcttttgtaaaccttcttctcatatttattcttctggacaattgaaattggagaatccaaaatgtaataataataatgttaatttagttcttgaaaattgtgatgatcaaatacttggtgaggagaataaggaggaaatcttagatgagaaagaaaaaacagaattagctaagatttgtatcaaaagtagtcttaagaagccaatttcagattcggattctttaaatgagaagcagcagaagaagaaagttcaatggaaggactttttaggaactgaacttgttgagatcagagaatttgaaaccaggtttgttatttattctctttacttttgctctttttagtcttatgttaataagtttctaataatgatattattgtgtgaaatttcctagatttgaaaaggattaagaattgagtagtttgaccattttgttgaatttgatttctactcataaattgacaatattgttttctatgatgtcttatgtttctaagtatatttcatggtactatttgtagaccaacttaggactgtatttcaaggatagtaactgtcatcatcatcatcatcatcattatcaatatattgatcatgtgattgaatattatatagtttcttaggttttgattccctttcgattttgtgtattgttaaaagttgtttacaaggattcattttcattgttagaactcttggaggaatgggaaaaccagtttaatatgttttgagagttttcggctcgaatttacattgttttagcacttattttgattgggttaatactattttggacttttgcaaaagttactgattagattttctgttttgtaaaatgacaaatttaacttgtatttttcaaaatggtataaaatagtaccctcagttcagttttcgataattttttttaatataaccaatttgaagacaatttctagcacgaacagatgcagggatattattaacttttattttaacaaaaaattagttcagggtactattttacactattttataaaatacagggtttaatgtgtcatttaacaaaatagatggtctaattggtaactttttcaaaacatagagtctaaaatgatatttatctattttgatttggtgtaagagtggatttcatttcactatacaatggaattgtttcatttggttgaatcaaattttgattttgtgtaaagttaggagagccctttgttccaaaatgaaaactttttagcataagaacacttgaattccatataatccatacaatgtggcatgtatttctctaaagtcactctcctaagactggttcaaagtcaactagcatatatgttagataaaaaatttcatgtttaggaaaagttgatagttgatttggtgaacaatatggactttttgctataaatgtacttgtttatggaacaattatacaactaaaagtactaagaagagcctaagcatttttcctcatttcatatatgccttcttcttaattaatcattatacattttaagctctttccttttgattgtagtcattgggcccgtttcgactaaacttctatttaaaagtttaagatgtttggatatcattaaaaaaagatcgtaaattatttaaaatttaaaaacagcttatgaaaagtcctttgggaagagacttttaaattttaaaaatgtttttttattttagtccaaacactcttaaaaggaatcttttaattctaaaaattaaagaagagcttatagaagctaaaccaaatgagtgattcgccatatagacttattcgaagattaagaatataacttagatccttgtactttaagttagtcttaccttactaaccatgttctaaacactaaccttgtattaattctttcaacaagcatgagtttagcgttgtcatatggtgaaaaatccgagctttgtttaagttcaccgatgaaaggactctcgaaaattatactaaattcgatgaatggttggagaatttgataagaactcaaaatcattactttaacaaatcttatttcaagtggtttgttgtgtatatttatatctcttgatcaataaagtttctctttttctgcatctttcaacagcgaaacagaagataccgataatgaagcagacgacaatagaagctgcatctgttctattttatgacattaaactctacaaactccgaaaccaaccacagaaaaagatgacacaaaaggatggttgtcttgacctcattttttcatgtgaatctaaaagacaaatttgatgattgagcttgtttcatatgaatcgagacgagtcaaaatcgacggccaccacctttcgtgtggctatgaaggatttgagggcaggtccacagagagactttgaagtttgtattgtttttgttcttagattggaaaaagaagatagaaaaaagaaccaaacattcttttatagaatgattatttttaagcaaattataataataatagtaatgtgcatactaccttttctaaagtccttgagaacttgtttatcataccatttctgtaagtacattgtgtttgtaattatttatatatttattttcgaaactaatctccttgcttaagcttacaatatttcgaggaactcgaatctcagaccttgtgagagcaaaacacagctattgtcatgtcaatgctgtgaagttcttcttctccttctttgtgtattgttcactttttttgggacaacataacccgaaaagtacaagattcctactgtta

SEQ ID NO: 16843 - DNA, 4476 bp, Cannabis sativa
aataattgtactatcatattatttcgtgttcctgtttgaatttgagttttcctcatatttaataagtatgtcatgtttgtatttacttaaattgtatcatgttataatcgtgtcgacgcgaacataacacgataccacgaatgattaatatgtctccactaaagagttgtgcattttgattcactcttctttatagatccacatgccctcaaaatttacttggctcaattttccacttaaaaattggaatgccagctcattagtcattaatagcttttactgctattatccaacttcatttcaccaaaaagaagaaataaaagaaaagcttttttagttcaccaaactgattccatgatgaattgttccccatatatactaagttctatatatgattctgtaatcgaaccattcaactatgcaaaatatctttctatttctttaatcggattatatcgcttgataactaagcaaactattatcagtcagactcggaccgaatctcaatttacatttttatggggaatggaaaattgctgtaaatggaatgaatcttgagtatgcttctcgtcgaagatgtactgaattgaacaagggataaatcatttacaatatcagatgctacaatatttttacactacaagttgctcaacagtaaaaaagaaaaaagaaaaaaaatatattattttcattgagtacgttggccatcttcaaccaattaattctccctctttatgagattgagttgaggactaccaatagtccctgcaagaacattgccctttactgaaacgatgtaaacactttgaatcactcacgtatatctcacacccataggccttggagacatactttgctgtctcatggcaaccttcacacattctcaggtgtttaactattctgatacattgggccttccttggaaactcaataagggcaaaagcaattgcaagcttttcactatgcacaccaccaacctcttccctatcttcttcctcaaagcaaaaaccatcacgtaaaccaaatttacccactttttctgttatatcatgtatccaaggatatagatgaagttgagattgatccccagcaacaaatgtgtagactctgttgttaatttcaatccagctccgtcccatattccttttagtagaactttctttctctagctttctcattttggaatcactctcagattttttcccaactaaagcatcagcctgagctcttaacctctgaatcaagtgattcccaggttccaactcaagcaaatgattaagagaatgtactgagattccaaagttcctatgaatcctactagcagtaagtaaagcatcccaaattgaggagtcaggttctacgggcatatcttcaatgaactccattgcctctttaatcctacctggacggccatataaatctaccatagcagaataatgttctagacatggaacgatactataatcttcactgatactagagaaagctagcgttcctttgtctgataacccagaaagactgtatgcatagataacactaacaaaagtacctctatttggtttcaatcccaatttgttcatttgatcaaatagatcaagtgcaactgttggtaacccatgcaaaacataaccggcaatgattgaattccaagtgataatatctttagatgacattctatcaaatatagcccttgaatatttcatattcccagtcttggtataagtatccaccagtgaatttgccactggagtttcggactctaagcttctgcgtaatacgcagccatgtatctctctgacctttttagcagcaagtatacttgcacatgcaggcagaacacttaacatggtaaccaaattaggactaacaccataggactgcatttgtcgaaataccccaagtgccctgccttgatccccacggtgcaggtaaccagcaatgagagagttccacgacgcggtgtttcgcttgattttgccatctttctccatcctctgaaagagatccatggcttggtcttcatcaccattctgtatatatcccgagatcatgatattccaggtgataacattaggtagtacatctgattcctgcattttcatgaagagttcacaagccttgccacagtaaccagattggcaatacccaccaatcattgagttccatgagtaaacatctttgtctttaatcatatcaaagacttcttgagcagcttccaattgcccacacttggaatacatgtcaacaagtgaatttccaactaaaacattatctacaagaccaatcttaattgcaaaagcatggacttccagccctttgttgagtgatcttagagatgcacaagctgaagctgcacttgctatagtaactgcattcgggttgacccctgccgaaagcatctctctgaacaaatctaaggcctgacctctcctgttattatgagcaaaccctgagatcatagaagtccaagtaaatacatctggagcaatcccaaaactttccatgtctttcatcaatcccattgcaacatcagttttccctaaatgattacaactagcaatcaatatgttccaagttaccaaacccggttcagtcccttcctccctcatttcatcaaaaagtcttgcagcttctttaacctgaccagtatggcaaagcccagatataattgcattccaagtgacaacgtccctcttctccatcttctcgaaaaaactcttagcccaatccattttcccgcattttgcgtacactgccaaaactgaattgttgactcgaatagaaccactgaaaccacatcgaatcaccatcgaatgtatcactttggcagtcttaagacacttgcaattcccacaagcctccaaaatcttaggcagaaggaactgatcgggaacaacaccatctttcatcatcaagaagaaaagctctaaaacttccttccacctcttcgctctagagcacgcaccaatcatagctgaccacgtgaacaagtttctctcacgcatttcatcgaaaacgctgcgtgcatcatccaagtaaccacatttcgcatacatgctgactaatttagtttcaacaaaagggtcagcgtactcaaccaaacccatccgagcatgaagctcccgacccaactcaatagaattcgcatcaatgcaagactggagtaagttgatataggttttgggttttaccttggacccacgctcggcaatggagtccagagctatgattgcctcgctgagccgtccgtttttgcagaggttatccaaatgagaatctgggaatttggggtgcgtttcagcaaacacaggaatggtaagtttggtgggttttggagaaaattcagagggatagccatggcctgatttggtgggacttatagttatgggaggctttaggttgcaggggataactacgttctccattgttggaactcgcgtggattttccagtttatgattaccgcccagaagaaggtcggcattttgggttcatggctgacttaattagcgggtggctcatcatcatcatacactatccaatggatattggataatcctttattatttattttatgagcagaataaatatttgttatttctttatttatatattataggacttcttttaggccagggatgtagtttttactggcaattgattggttgaatgaagtttttactggcaacttattggttgaatcagtagggtgtacgagcttatgctatggcgtgaagcatgatagtagtttatttattgttgttatatttaattttagggtaaatacgatcttttgcaaaagttattaattagattatctgttttattaaatgataaaatgaattctgtattttctaaaattatataaataggatcctgaattaatttttttgtcaaaataaaacttaataacaatttgatctagagatgttatgacaaaactaattacattttttgtatttgtttgtattagaaattatattaaagttagttatataaataaataaaattattaaaaattaagctcagagtcttatttttaccattttaaaaaatacatgatctattttatcatttaatattccttcagtaacttttgcaaaaaaaaaataataaaatctaaaataatatttacctttaattttatccataaaataacaagttggtttttttaaatctgaaaagtaattttttttctttaatattcattttttgaaggagaatttattttcagagtttgcaaataaatttcatttttcttctgttttaaacttttaatctattctatatgattcataaataaaatattttatcatctgtattctatatccgtcttcttaatttcttgtatttaatcaatgcaattaattatagaagagtaaattgcggcataaatacctaatgtttcaaattctatacacttaaatatttaatgtttatttttgaaggcaaaaatacctaatgttacaattctctt

SEQ ID NO: 16844 - DNA, 4874 bp, Cannabis sativa
atatgattatttattgaatctttctcaattaaattatagagcaactaacataaattaagtatacgtgccttgcacgtaactttcttctagttattttatgtgtacatatattagattaatattagatgtaattaacgtatacgtaattaataagctatcttagattagattccttcaaatcaaagattattttatattaactttaactaccaaattatcaataacatccgttgtcgtccagcggttaggatatctggctttcacccaggagacccgggttcgattcccggcaacggaacttttgtcccttttcaaaattataattattattgcgtaaatagtataccatacaatcaatcagagttcgacacgtgatggactcggaagaaagatacgctgcattgtcccatcaaattaaatagctgctctcgacctcgtatcaaatcaaaaaattaaaatgaaatcgacgccgtctgtgggaatcgaacccacgaccacgtggttaaaagccacgcgctctaccggctgagctaagacggcttggtgattgtatcacttaaaacatatgttatcaatcattgtaaatgtcatttatttttaatattttcatcaatatcatctcttctcttccacgctaaacacctttgaaagtccattaaatcataatttaggttaatatagcagatttgtttaaatggtaaacctttgtgtgtgaaataaaaccaaattcaactattgaagaatcaactcatcaagtagaagctaatgctgtagtgggtggtcttattaaattaaatttgtttcaaaaacatttccttttcctattggacgcatagagagtataaattgacttagcatatcttgtaatttacattttctatattcaattattcatacagtaataaagtctattctgattatataaaatattacgagaagaactatacattggtaatgaagacagcgtattgcataattattccttccagaatctcaagagtttcaatttaattacgttagaatttaagtagattgtatttgcagcaaaggggggttttccttaaatgacacgtggcaggatggtggatctactatacctaaaacttggtcgttactcgttagttaactttcatttcatggccagattcaaacttgggttatgttgacataacatccaaaatagacactaattattcttctggagtttagctgttgaattttgatgtaaaaatgtaatgaaagacacttgaattaagttaaattctatcgttttacagagttcctataagccaatgtttatggacagtgtagaaaatttataaacaattgagactaaattaaattaaactcgaaaccgaaaccaaaactacctcttcttctcttggattcgaacaaggtggggagggagtgattcgttagtcagttttcgttaaatgagcagctagtagttttgcaacggtaaagccgacaaaagagtcaacatcaaagagttctttcagcttttgatcacttataattctcctcttgtcagatggatccttcatgagcaagcaaaaatatagtttgaggtgacttttacaggtaaaattagaacgcgtaaagtaaaggtatggagtccaaaaatgcattaggtcttaatagaaacttccttacatgcaatcaaaaggggctagtagtttctagttatgagctttaatcatatgattaatttgatccatacctgaagattgttttgtttaatgtaaccccacattctctttattacttcagcacgtgataaaacactttctcctgtaccaagaaaatttaccagagcatctgaaagttgaagtggagcattaaaacctgaggttccacccttctgtcttttttccttaggttttgtttcatccgactctgaaaatgaagttaaagactggattaacaaaataatgtagacaaaaatataaaagagtagcttatgctaaatagaagtaaaaactagcatatgctaattgatcaacacttctatagtcctatttatgtcaagcagtgagtataataaacaagttaattgtaattattttctttctaaagagtgcacaaatttcggggttcaagtagacatgatgttaagaaagattgccaatgaaataactaatttaaccaaacaaaaagaaatcctatcaatggggtgaggtaagagattcatcccaaaaggatcaggatagatgtgtagaattaaaacatctcaggtttgttccaaaagtttaatttaaatcacttgaaagaaaagccttgtagtctaaccttctttctcttgctttcgtttcttttccgactctcctgattggtttggattcactacacaagagaaaaaagccaagaaaaaaaaagttaaaagatttaacacaacgtgtcttaacaatacaagggactgaaagaatgctaagtagaagttgctagtacttctatacaatgtatacagaaacagagcagttaatgcttcaatatcagaaaagcaagcaaagtgttgtggcataccattgtctgaatccaaagaccatatatgctttgacaatgctttattcatttggaacatattgatggaattaactccgaaaagatcagtcaggggttcatcacaaattatatttctcctatcatttgggtcttgcaaatttctctctctaatatatgtccacatttgcttcacaacctacagacaaaataatgaacatgtaaaatagtgacaccttaattactaaactaagaaatcaaactttgaatgtaacatctctataaattcatagatatacctcagtcctggccatttcagagacgcccataaatttctgaagttgtggagagagggcacatattttgctaaaaccaccaccccctcttttctttttatcatcgggaagcttctttgacctatgagttttaagacaaagcaagtagttaaagttgattaccatcaaagattctttacacctttacatagaactaaattttaagatcacttgaaactattttttctacttccccaaaagaaaaaggaaaatacatcataagaaagttggtaattttcaaaatagaagttcacataaatttaggaaaatccagtcaaatatattaataacatagatacataccactgatttttttctttcttccctaaatgaaatttaagattaaataactaaacaaaaccagaatttttttctttctcccctaaatgaaatttaagattaaataactaaacaaacccagaaagaagtataggcttcgttctgtataaaatgaaaaaaagttttaagggatgctgctactggcagaatttacaggttaacaaaaaaaaatgttcatattaagaaagaaattaggtaaaaatatcacctaagctaacaacttatactcaactagaatatatttttttttaagaaaaaaaaaaagagttcttttaagataagaataatctggtgtcgatggcgttccacagagcagtgatagacactggattatgaggacctgttcagattgaaacagatttcttctcagtgcatgttattggaatcttgatcaccatcctcacaactatatatactactcagtcatataaggcaaattaaaatgacattttggactaattcaaaaggtttccacaattggattaaacaacaaagcaaatacgttaaaattaacaaaatttatgttagaaaatagtacattgaagaagatcataaacaatatatttaattgaagaacaaagattagaaagccgaacgttctttaatcaaatatttactgtcttcttcaattatatacaattttctaccaatctaaacaaattaaacaggaaaattaactacaaactccataatgtctatccgaatccccaaattttaacgcgaaagttcataattagatcaactaagtaataagtaattacggaaactgaccgtcttttaacctttctgtgtttggattcttcaactggttcatcctcatcgtcttccggctcctccgtcgtcgattcaaatccgtcgccttcttccgacttgatctctgccgaatgatcatcgtccaggtgtccgacttcaatttcctctccttgttgcggtttcgcgagctcgttttgaaggaacaagtcgacctgctctctaatgaaagccttcttatcagataagtcaactccgaaatcctcctgtagcttccggcgaacgatagccgtggtcgtcgtgttgaggtcggaatttcggagaaagtcttggagccggtcgatgagctccgattccgaaaccatttctccggcgtggtcgaagagagagagaggttaggattaggagggaagttaaaaggaaaagagaacaaaaatggataaaatatataaaaggaaaaaagaattctctctcttcacccgtttctcgtttttagttagtcagaaagagaaaggtcacgttgccactttcacttattatttatgcttctctacctcaaaactttttcttataagctaactacaattttgttttgttttataaattaggggtatgaattaatggatccaatccaatattaagaattgatcaatctaataataatagacagtcaaatattagatatctatttacagtaattatattttatattgttgtacaaaaaatttaaatatatataaaaattaatattaaaattttactcgttttttcttagattggatagatcgagtccaattcaatacatactgaacttaaaatattatatggattcgatctgatccaaaaaatactagtgtagtgtaatgtattgggtaattctatataaagtgtgcctatataactaaaattcttggtttatgagaaatttatgggtgactttttatttttatt

SEQ ID NO: 16845 - DNA, 13483 bp, Cannabis sativa
acaataattagtgggctttgggtaggacattcacatattagacctaaataaatataaaaattggtattttataatgtgcagtgcggcgcggtttgaaccgcttattaacaattcaaaaccgtaaaccgtaccgcactgcgcggtttaaaaaaaattcaaaccgcgactgcaccgcaaagtatttcaaatcgcattttttttgtggtgcgggctgtttgagcggtttgatgaacactcctagcttatactacaattttaaatttcggtttttataattcctttttagggtgtgtatcaattgaagaaaatattgatagtttttaatttttataaatattttagaaaatatgaatcaaagtaattaagctaaaaataaaatgtaaatggtattagggactcaatttaatatggaataagttgaaaactactccttttaattatacattaaccaaatataactctctaaaataattttaattgataaatacttcttttataatcaaagtaccaaatataacctcacataacttatcaaaattagagtttttaatacacataatgtaaatatgacttataaaactgggtataaattaaagaataataaaataaaagtaaaaattaaaataagaaataaaaaatgagtataaagtgtaatttcctcatttaatattatcaaaaaaaatatatttacttgtaatttcttagaaaaaaatggtataattaaactaaggtatttaatataaataagcataataaaattatagggacacgattttgtcccgtgatgtactttcacaaaatgtattccgtgatgtacgacagccgttagatgggggagttatttgatctaagggctggggttgatctaggggtaattagggttaaaaaatagtaacgtaccctgagatccatctaatgtaccctgagactcatctaatgtaccacagaatacattccgtaaaagtacatcacgagacaaaatcgtgtccctaaaactataatacaaatataatattactattattattttattataattgtgggaccaacacttaatatatatagtatactctatatgtgttaaatacaaataccaactctttatatttccaattcaacaaggcactatatttttatttacttttatatactatgattattatatatatgtaagttctaaagtggccacgcccttgtgtgggtgtatgtggctccgtccctggctgtgttaacctttcagattcgtcggtctgactttacccataaccgaatcttgattgaatctgaacccccccgtttagctccgttctttggctaggttgttggtctttctgggcttcgtgaatgggtcgtaagttaatttagggcacacccctactataaatggttagcagttttctataacttttactaaagtaaaataattaggacctaatattgaattgcactcaagagcgaagctagaacaaaaattgaggtggggcattacataacttcatattatatggagacttcaattttttagaagaaaaaaaactattgagttagatataataaaatgtaaattaatacacttctttcttaacaacatatgtaacttttatacaatggtattttatattttcatctgggggttaaatcccaacaatgatattttagttttttaaaaaaaaacaaattaaaacgaagatgttgacagtaaaacttgtatcatccgtgaactttaaaaaggcttttacgactacatcaaataatcttgactagaaaagtatttgtataaaggtccaaaaacattatttaaatctgagcgtcaaatcacgactacaccaaactaggatcgactgcaccacttagtctatatgcaaccgcaccatttagtttacatgtggcgtcactcataattgtatttatagtgatattacacctcacgcaaacactgaataccctttagtatttcttttgtaatgtgacattaatttttacttggtgatctttccattaatttttatttggtaaggcagacaggaaaaacaagaaacccgctactcaaaccactttaacaatgtattaataaaaaaaaaaaaaaaaatacgaacctctttgaccattaatttaatgaaaataccaaaaaaaaaccttaaatctggccggtttccaatttttatataatggaatacagataaaaaaaaaaataaaaaaaaaatagacgctatttgtcaataaataaagtactaaaaatcaatagagggataacacacctcaaagagacttcatgattggcctatataaatatatataaaattaaaagaaaaaaaatcaagagaccaatatggttggaaataatttcaaagcgccaatccaatctggagaggagagcgaaactagtttcctaaagatcgacatagttaattaaaaaatataaatatttacactaactttacaaagcaggaacggtaggtgatctctataatcctcttgattttcttgtacaatgttacaaccagatctgggctggagatgagatgagctcctctttcgatccttcaaaaaaggataacattaacacgatgaaagaaacattgactttctaacacaaatgaaataacatgctcctcctccacccactcccactatacaattaatttctcatcatgaatatacaacaatgctgcaacaacgtcccagctaatactacaatctgatgacatctttccattttctgggatgctgcacttgcaaaagccccaacccgacagtcccctcgtgtttaatcagacaagcattgcagtttcaggagtctcccattcagcttgaggaaaaggtaggaaatacacatccatggggatttgaattctttcatcctccgtgcaaaaatcaaaagcaaaaccaacctcaatatgccccttatgctacccaccaggctctaatggttcaccagagcaagagtcctgattgatctgcttcttatttgaaaggcaatcagcaggaacatatgcataacctttaggtaaccgcatgtttttcacatttgcttgatctgatgtcattactagctctttctcaaaagtttcttgctgtgatttaagaatagattaagaaaaagtcagtaaaattgacagtaaatacaattttgtgatgataaatcataataccttttttaactttgacctccatcctccatcatcatctacaagattactggtagcagtaggtctatggggaatctgtttccctgaatattgtggcctctccacgtgcttccgggtaaaatggttatgagatgtggtgcagtcatcttctgtcctatggtcatccatggtgctggagactttacttcggcgtttgaaagaaattgtactgtccacagttatgtcatctgaacgttgaattgcatcgctgcatgatttgtaaccatctgtgtggcctttgagagatgttgtaacggattctgagctaacatcatgaagacaggagggactttgaacaagcaaagaatgagccacatgatctcgtttcatagcaagtatctcatgtgagctaaaaaccaaatcccgctgcacatatcaaagaaaagtacataaatatactcttgaacatatatcagaacacgcaccaattcagaaaatccttgtcagcacataaattagaacacatgtaccattcaggtaaaatctgtctgcacataaattagaacacatatatcaacccacatatttccggaatagatgtgatattctaattctatcctaagatactgatccaacagccaagagataaaaggtagatgccattagctagtcatgaagggacaatgctagcttctctttggcctctggtggctgttcaaagtacctttctattcaattgtttctatttttttttttttttttgaaagaaccaattgtttctatttgacagcttcatatctgtctccccttttttcaggtgttatggctccttggtaaatttcattgtttgatagaattcattatgcttttttttatattgatgccgtttgtggcaaactatatataacacctatcaaaaatatacaataaatactccatatattcttttgtttaaatcaagtaatacctttaatttttcacgtttgatgatcctgtcacaaagaagacgtaacctctctagctccacctgtaaatgcattaatgcatagacttaattaggtgattacaaatagcaaaattagggggaaattgtattttaaataatgcataccctaacttgcttgaaccgcttcaactcgtcgattccgtgtttttgtgtttcagcctgtacacattaagaagctagaaattaggaaaaataaatcataatccaccagggcatcattttaagagaagaagaaaataatacatgaaatcataaaccataagtggttgcactgtatgtgtactaaatattcaaccttagcccttcgctccaagctatgcttttcacagtaagccttgtgctgctgcttccccccggaagactttactatgttcatgtgaaaaccgacacttctggcacaggatggatgaaatgtcgcttgacaatggccataattgcactgcagaacaggaagtatatagcaatcagctatcttgatagaagaatactttagttcatgagagaaatacactgaagaagaaacaaaatctgaccttaatgcaaacaccatatttgcgatggcagataaggcacaagtcaactgcctttgacaccgtctcctgtttaaaaacaagcctacaataagtactggtttctagcaacaagatattttataaactatcttttctatgagagaaactattttatctacaacatgaagtctattaacaatgaaatgcagatgtaaacataccattcctgcaactgaatctacttgacctcttttgaatcttgactcaaagacccactagaaaaagacaaacgcataaataattgtcactacaaaatttaaaaatagagctgatatattcatgagaaatagaatttataatttaacctcagcacagaaggcatggacccattgactattagaagatttcctaaaagcaccagttgtgccaccgcacaacccacattcagcaacaaaataaggtttctcccagaagttgacagctggagctccggaacttcttgatgatgataattcttcacataactcacagtaccatggaccagtagattccctaacactccgatagcaatccaggtgaactgcgacctgttaaaagggaaaaatttaaactaaaatcgataaatgaatttacaaatgagcaataattagagaaaacaaaccttgcaactacaacagactaagataggatttaatattgtctcagaacgtctgcatatgtcacatgatctagggtgttctttagagaaatctactagtgactctgcaaaatcagtttgcttctctagcgaaatcctaggagccgccactctttgaagtgtttcttttgcccgtgggatcagctgagagccacctccaaacctcccactggtggtgttcaacttcatcatgttctgtaaagtaaactccgttaataaataatttatcggaagaataattatttagatatgaaaaagttagaaacctcttgatgagtagtttcctcaaatgcatctttcctaaatgaagaggtccttgaagaagctgcagcagcagcagttgcagctgctagcacagcttgtgcctccttgtgccttctctccttcctcccctgcttctttgcctccctaagctcataaagatactgtgtaacaatgacatcatcccatctgttcacactagccagatcaatctcctgtggcagactcttggcaacattaaattttaaattatctgcaaaatgtaaattacatagtaacgtatcaacataaaacaaaaacacaaatgttaaacagaagctgtgagaatagtgtactgaccagtaaatcgctctcttgcaactgcattactcagtaacctgttctgataataaatgatttccccttccacttcgtcattaggagaaaagtccagaattcctgttttcctagaagaaattaactcttctaaagtcactccatcagctttacaagtcatcccacaccttgaatctttagttgggtggatacaacagtcactggcattagtgcgcacctcaaaacgagacatacccccatctgtggaacctgtaaagtcttaagacctgttagagccatcaacaatatcaatcaacatagaaacggcaaaaggcacaataccatcattaaactcgaattccccagctgtctttacatcgaccttattctgcatctgcattagtttcttgcaaatatctggatggatatagaaactatgagcggtttctgcatcagcttttctgcatcatataaatatatatatataagaaaaaaaggtcacaaaataaaataagaacgaataataaagcaaaacaaaatataacaaaaatgtcctgcaactcagagcaatataagcagggttcctcgtactccaaacatttaatgaaacatactgttaataaattacgagaactaatatatgattaaaaggacccagaactaacaggagactgggaacagctaaatctgcaactgaacaaggtggattttcatctgcattcacagaagaatcctcaggaatagaaacctcctctttttgagcactttgttgagagttgcagtttgaacgttcaactggactacctggcgaacacacattaatttggtgaactaaggaaatagagaagtgtcatgaatataactataaatagcacaaacactctagcactcttgcctaactatgaaagatagataatgcccaaggttgcatttgttgcacgagattgaatatgattattatcgtgaattaaactagactatattagtataaatactacatagattttactttaaattagatttgattagttttaagactatattgattttgctgtagtattggactggattaagattattagaaaaaagaataataattgaaaaacttagcactttaggatatgatagggtaaagaaaagttaaaggtgaagtccagtagtattgaagtttaaaattgatgagaggtagttaggacgaggaaagaggttagtaatttcacactcattaatatgggtaactaaccccatacaaatgtgactaggattaaaaatcattctccaatcaatcacatgagtgatgccaatgcaccaaacagacactgaaatcaaaagacactacttattgtctggataggaaaaccatgatggcaacatggaaattgcacaaattcaatctaaccacttcaacacggaagccaaccatgtagagcctcaacaacatcagtacattgaacttccacttgttaaagcctacctcctacaaatcctatccaaacaccacaccccataactatttttccttctatgaacatcaaatacacagttacagtaacaaaggactatgaaacatgccaaaacttactaatcatattatcaagttcctttctgctccatcaataataacttacatctaaccaatgcaaagaatatcagaaagataaatcagaaaagcataccttcatttaacctcattgatgtagaaagttgaacccctccaggatcaatcaagttctgaacatataaaagggtaacataatgtactactggcattaatgcatgtagagaaaaactgtcaaatggagaaagtgccctaaaaaccaaattgtgctgactaaacatcagaaagaaaaaaaaaatcagaaaaatacacataatgacttcataaaccacccaaaacgtacacaggtgacataagcctgtgctacaatgaaaagaataccaaagcaatcactcttgatcacctatttttcaacttacactaccaagttagccaaaaaaagaattacaaattagaacatctttgaccagccagccccattctcacatcatggcttatttacaagataatcttgaccatacttataaaagcatgattcacctacacaaatccaaagaatagctgacaattcaacccacaagatgtgagataacaccagagtttgtccaatattaatagcaaacatatgtacaggaatatattcacacacatacataatctattcattataagctactgtagtaacccaaataataaatctcgagtaagatttcttcttacaccactgactacataaacaatggaaggataggcaacccaataattataatacaaagtgcaaaagactttttgctggttcacataaatatgcataatatcaggtataaaaacaggtatgcagaaagaaaatacatgatgtaaaatttctaaaatggacgcaacgtaaaatttcatggaaaagtttaacaaattcacatagaaagacaaaaaatttagaacttaaagtgcaacaaaaacactatcagcgaaagtgttcataacaatggtaccttttcaacagtaagaatggataattcacttgatttctgaggttcttttcccctcggtagatctaccttgacctcgttcactattgactctttgtcaataaacatctgctgagatgactgcaacattttgggatcgtttaaaatcctaatattgcctttggttctacgtcgtggaggtacggatttaacagctacaggaccagcaacatcagattctgaaattgatacagcattagaatcatcaaaagcttcacacacagccttgaatgaaactatcaatcatattctaccttccaaatttttatgtagactagataagtgcacattgtttttcaaccatttaagtattttacactccacatcagggactacggtattatcctgcagaaaaatttcaaaagataataaggtaaacttccaacaaaaactaaccttaggcaagataccgtaccccaacaaatatttgatgaaataacatgctattaataggaacataaacttttgacattacagcaagcgaggctgacagagaatctggtgagatgccaatttctgatgctacatcttccacatttattttcccacaatcaaccaactggataattggaaaatgtcaaaacactttgaacaagtgaagttcaaacaaaatgtaaacaaataatactggatgatgctattgaaaacataatgcaccttcttcaaaattaatttaaaatttgaggagttggatacattaacatcatcgtggctccattcaagggtccccagatcattaggtggatgtgactcattgcaccctgacatgagtctagcctttaatccagaatcaagcaatctcaactcttgagattcaccatcttgcctgtcagaaatgatatccgacacttctaattggactgcaatgttttctccatttctatggctaacacttcccgtcttagaaagatggtccgtggaataagaattacttccagaaactacagaagggtatgccaacttagaggtaatgcctttgtccagcacttccgagtgctttggacaaaatgcccttaactcaacctaaataagttcagaaaaggataaataatcctaataaatagcaggaaaaaaataataaaataaataaaaagcagcagcaacattaattataagaataacaggacttacattatcagaaccatattttccccaaacttccattctgtggctagcctccctcgcacataggggatgaaacgaagtcctgcaacttcctgaaccaaaaagaaaagaaactagtatgggaatttattcacaggaactgatatgtatatatatagagagagaggagagggagagagggagaaagaaaacttccctattaaaacttacgggtcatccatttcacaaggaaagaaaatagcctaaacatagattttttttctttatttaaaaaggaataaaaatatccatgccatctagtcacaaataactataaaacaagctttctaattatatcagaatatgggatcaacgtataacagctcatctaaaagtcgtaaatggaaataagtgaagcccagagaaaagcatggtaatacactcaatgctaatggtattgtaaggatattttagcgaaattctcaggtactcatagcatctccaactatgctctctaaagctaaaatagggtgtgagtcttaaaaaaaatagctccaaccataaaaaaaaaatgctctctataatagagaatggatagggagcttcctatttttttgctaaatttttttaatattattttaataaaagcactattacctttttcattatttcaaccaattaatttatatttaataaattcaaatcataaaatattattgaaataatcaaatgctaactaaattagggagcatggttggagcaagaattataaaaataactatctattctaactgtttagctattttagctaaaatttggataaaaaatagtgagcaccattagagatgctctcaaacgttttataacaaacttaagcaaatactccaatattaacttaatatctactgaaatacagaatggcttaagatactgaaacaatacaacagaacataccgtgactgcactgaacgcaagcgccccacttcaccttgcatatgttacacactagctttttgcgagtttcttttattgcttcaatattcataatcggttccatcctcactatgtcctcaatataaacctcgggcaaccactgagagcaaaacaaatgagcaaaatccacggagtcgtcattctcaacacttctatgagcaggtttcaaagcaccaccctgcttcgggcaaaggacacatggcttcgtcgaatccttactatcagtagtctgtttacaccgtgaacacagccacgatgagtctacatccccttgtacgccataacacttccgatgaacagaaacctgacaagaactacaggaaaccaaccggttaaattctttccccgaatcatcagtggagcaaaaatggcacaaggatgtattcccatcacaagaagaagctaccaaaaccttctccaacccagcatcaccacccagaagctttcgtttcttcgaaggacgctcagtagtcaaactaatcttattcctacaacctaaaagccactcaacactgccggacggtactgaaacgaaagaactcgtttcctcttggggcatgtcattatctaccacgctatcgatttccatagattgctcatcgtcttcctcctcctctaattttacctcctcattcacaatctcatgtttctttgcatcattagcgctctcgttttctatatcattttcatttgcatgtccagtattaacattctcatctctaacgaaatttttattttcattgatgaacttcaccttctcttcactacaaccatctgcatgttctcccctagcatttctcaaatccggaatcaagaaatacttacaagtagctgaagtacttagcaaagatacctctgacaacgcgtctatatccgccattgtcaagtccctgaaatattcttcagtttcaatccaaatgttagaggttttggatttttcactgggccgagaagacttcttcttctccgcacccgaatgagacttcttgtgccgtctccgactatccgactgcctcgacaaaaaccaagccaaaccacctggcagagtgggcacagtcgatgacaaagcctcatcggaattatcaaacggagaccgcaaacacaaagacttcttagcttgtgaaaagaaatcgacatgagctgacgataacgtcttctctgaaacctccagtagagtcgccgggattttcaccggaaccctagaaaccggaccagacctctcctcagtaccacaacctccgaccgcacccctacccatcatcttcttccgccggtgacatctccctccggtcatcaccgacaataaccacacaaacaatccatagtcgaaaaacaagtaatttctaattcccaattgaaatcgacctgagccgcaattcctcctcgcatgcagctttccgtgaacaagaaacccttagacctatgttccgagactcggtcttcaatcaatctcaactaggaagatgtagctagcccgcgaggtcagaaatcagaagtggataaaaccgcggctagggttagggttttcagttatattctggttcgtattcttccggatacgttttttttttttctcgcagcttcgggggagagagaaatttgggtttttgggaggggagtggatagtctcaactctaagagagatatttttatacgtggtcttatatagagtgtggtgacggaataccattggtattgtagaacccttacctatgctacacctgtcacgcacgcttagttaaattttatgtgtcacaaggaaattatttcattgtctgtttttttttttttttgaaaacactgtccgtgctttaacagtctgaaaaaattcccgctgtcctacacactctgttctaatggctgaattagctaattaatgaaattaccatttccttttttcaaaataaaaaagtctaaaaaaatttaaaatcattatgtttttcatattaattaaaaaatgaaccaatttaattaaaaaataataaaaatatccttcagacaggaaattttaaaaaataaaacatatttatatttatttaaataaatacaaaatggagtttacaataattattgctagtgcttttcaaatcacattattcaattcgatcgaattagttacttgttaaaaagaaattcgagttaattcttggaataaataactaaaaataatcaacccaatcgataaaattttgatataatgaaaaaattatacacatcatatcattaagaaaaatgattatccgatctttgttgaggtaaaagaaatttattgagaaattaactaatatgaaaggtttttataaatttttttctatcatttaaaaatgaggcattttactttatttagtgggagtgttttctattagttttaaggtgctactataatacactcttctaaaaagaatgcattgatgtactttttatctgtttcgatatctagaataattttttagtcaatttttttttataatcatatatgttatagttatttacgacatcttgtacaattttgagaattttagaataatttacgatatacaaataagtgtttaaactgtttgaaccttgtttttggtgtgttaaatttttttcaaatttctcaaaaaatttacaggatgtcttaaatactacaacatgcacgaccataaaaaaaacttggactgaaaaattctctcgaatgtcaaaataaataagggtgcatcggtgtatttttttaaggagtgcattttataattttcgttagttttattattattttggttgaaaataattttttatttttttgcaactctatgtataaaaattatctttttgaaaacaatataaaaaaaataatgttttaatgttaaaccttaaagactgcccttttcaaaaaaaaaaaaaa

SEQ ID NO: 16846 - DNA, 2499 bp, Cannabis sativa
  modified_base (2331)..(2331): a, c, t, g, unknown or other
ttaaaaaaatttagtataattaaagatattaattttaaataaaataaaaattattaaaatggggtgtctttaaacatttttggggtttaaataaaatttccctttttcaatagctataactattagtttagggaacaaatttaagtataaaaaatgcataaaaaaatcaaatttccttgatataaattacttaaaacttttctatattcatgcacataatttgcctgcaaagatatttcttgctatcttttaatttcgtaaaacaaattacaaacaaaaatctttcaaattccaaccattccaaaccaaattattttatataatgaatttggtataatgaattagtaaatttagaccgtttataattctttgatttagccacaattttaaaattctcactaacaattaaaaccaaaccaaattgtctattttttttatctgtactgataatttaaattttttattattatgaaatagtgatatttgagagaacaattttaagtataatattgatattgatttaatattattttgagaatatttttttattgttatttatgtattataaactttaaaaactaaaaaacaaaattaattttaaaaaaatgaaaattgtgtgtaaaaaaaaagaatagttacaaattatgattttgaccaaatcaatccatttataaatttgatcgatttagtttggtttgagtatttaattggtctgtaagttttgaatattaaaaatcgtaatactggtttggtttgaaaaataaaaatctggattaaatcaatacgttaaaatcctatgtgcacacatcaatcatatataaacttgacatatacacatatatggcaagtcacttttaataagtgagatccatcttaaataaaattgattagttgaataacacgtaagtgtgtgcatatatcattactcatttgaatagcactttagttaaaccttgttcatggtaaatgtagtgtcaaatttgtaaaataaaatacataaatgatatattttgtattgcgacacactcaatttgaacacactatttacatacactactaaaaaaattagctgactatttaaaacagtcggctatagtattagtgtcgtttcctaaaatcgacgcctataccaccaacgcaaatggaacagaataggcatcagttcttaatagtcagtattgaaattttacaaccctttataaatgtcgacaatagtaagaaaattccattttcactattgtggtcaattttaaaccaacacattcaatatatatgtatatctacatatatatatatatcagatcaaaccaacgaaaatttaggtctaacaataacaatctttgattcaacaataacaataacaatagtgttgactggatttttagccaactgatatgaagtcgtaataaatgagacttaaactaaatgcgcagcaataaaggcaattaatgacaccgaaattttcaataaatgtaaaaaaagacaccaaaatttaaagaggttcggccccagatatcggtaatagcctactcatcttgtgttttattaatctgagttacaaaattcaagaacaggctcttgattgcaaagaatgaaaaagtatttattttttctaagtgctcaaaaattgcggatccccttcccaggtcatggatgacccttatatagaggaaagggtcggtgcttctcgcttcaggagacgcgaccaatgtggagctacctcaactgtctccttgatttttggaggtagttgaagtttgatttttatgataatatctcgctatttttgtgggttgacaactgtctttgagcctttcatgggatttgaacatttgaaatagtcactgacgacgagggtctcctaaggctgtgacacagtcgttgaccacttttggggatgaagcccatacttgggggcgacacccctaaaacccaacttgaggagggagacaatcgtcatcgcggggtgacctccggaggcccaacttgaggagggtgacaatcttcatctcagggtgaccccccaagatcccttgtacgttgtcagtagttatagtgttatattgatgtctccatctacctttgagtggacccttatgtctatggtaggggtagtgtcatctaccccttagactaacttggcatgtgggtgcatggtgattattcatttttcttacgaaggtgttagtccattgtttttccttcttggatacgcctaccttactcaagctagggataaaggtgaccgtctgacttctattctaacggtcattgtaacaccctaactagcataggcgtgttaacgtaatttttaacgtactgtgcagctcnttgctaatcaacgagattattggaaaacgtgaataattaaaatttggttttgtaattaaaccatatcatattatattattaaaatattgggatcccgtttacaaaaattcagttataaaagtttgctattcatttacaaaataattgtcgccccgcgactaaacaaca

SEQ ID NO: 16847 - DNA, 5568 bp, Cannabis sativa
aaaaaaatgacacgtaaatattaatttgacaattaataacttaatacttagagaagttttaaaactataacttaaactccaaaaatatatattttttttgttgtatttatcatgagaatcacccttctccattctattggaggctagatcaaatggtttgatttgtgagtttgtgaaatgaagatagagatttaatttctttattatatatacaataaaaaaaatcaccagttaaaatttctccagttatttattattatttttttaaaaaaaaacttccctagttagtagaggtaaatatattatttaatttggttagacaaagtatctaactaagatacttccttattaaattatacaccctttacatgatatctccctttaatgctcaattattatacttttttatttcacattatttaaaactaaataaataaaatggactttgtgttttacccaaaaagatgggcaatttgggaatatcactcactcactcactcactctctttctctctctatccaccgccctttttatctaattttattttaattaaaaaataaaaataacaaaaatgtgttagccacgtaggattgctaacactgtttattacatttgtttttatttcggataacggatattccaaggcattttaatttagttaaattatccaaaattaatttaattatctatttaaatacttaaatagtcaacaaagcaaacgagagactgtgaccgccgttacaactcagcacagggacataatggtcatttcagttactttaaatccatcggccattttcatgcaatgttaaggacaaaatagtcattacacttaaatcatcggccattccccatgcaatgttaaggacaaaatagtcattcaacttaaatcaagatcagctcagccattccccatgcagttcttcattttaacggcgttccaattcaactaaccgaaatattccacatataatattagattcgaacaaacagaatattccattccgtgctatcccgtgttagcatcgcgtaccgtacagtcaaaacgtccgtgaaaagacactaaaaacgacgacgttttattggtactcgaatgcgtacgggttagtatataattatatattctggttaggtgagagaagagagagagtacccaaaagagcgggtaaaagataaagacacgtcaccactttgtctctctacgactcatctagtcagctctttctctctctataaaaaccacttcaaaaatcatcagaaagagccaacgcacattctctctctctacttctcttcttgcacacagtttctctctctagatttttctcgttctctgtgtcaattgtatggccgccaattccagtagccgagggatcaccagcttagggaagcgattcgtcgatcagatctggactcgcgatccttctccactctctgctcccattctcaggtagtttcatttttctttttgtatacttttcttgtacattttctcgggaaatctttctcgcttgattcattgaacttgtttttttgctatgtatgttaagttttatgtgtattataaggtttgattgtaataattagctttcttgttttattgatttaaaagtatatcatgatttggtaactaggcaaacatttcttgattgttttctggaatttgatttggttagatagatcaattaggggaaatcgtgcactcttgattcgttgagctcgttgttttgttatatatgttaagttttgactgtaataattagctttcttggtttattgattttaatatcttgatttggtaacaagacaaacatttcttgatttttctctggaatttgatctggttagatagatcaatcagtggaaaccgttcactcttgattcattgagctcgttgttgttgttgttatatatatctataactcaaattttgtttttattcatatgtagataaggtttgactttaataatttgctttcttgttgtattaatatatcatgatcctgttgcatttcttgattgttctttggaaatttgatttgtttagatcaattaggggaaatcgttcactctcgttcgattcacttagttcgttgtattgttatacataacttaattttacgtatatatttttatttttattttttttaatttaaaattatttatatcatatgatcctgttacacttctggattgttcttttgaatttgatttgtttagatctattagaggaaatcggtttgaggaaatttgatctgagaatgaagtcattaatttataatttagagataggtttatgagtagttgttttcttttaaggagactggtctgttttatgtaagattgtgaccaaggtttgttaatatacccattttcattttcaactaatattgtttggatgctacacatgttgatacgtacgaagattttttttttagacggttaatattgattcacagaaaggggaccgtggggtataggaaaaaggacttaaattgctgttattagacagttgtacagtattcatttataatcaatccctttcaccgaattttctttctgaaatcgttggcatattttgttgcaaggcggcattctatgaaacatgaaattttttcttttgtttcgtcactacccttttttggtttctagttctacttcctgtacaatttaaaatagtcactactgttactttttttaggaataaagtgtcagcatattaattgcaggtgattataaagcttattccccaaaaagggaaacaattttttttttttaatcatgcaagggatttttctttttgacaatctgtaatttgcttagtgcatgtttatattttgttttaagtttcaattgggattaacttggtttttgtgataatagtttacatttgataggatcattaggaaatgtgttgggtccactaattaaagttacgattaccaggtacaattatgtgtttaataaagtaacttggtagctgagtatagattttctttactttatacgacattgaaacatgttagtgaaacatttgtacccttatgtactaaaagtgaattctaagctaaacaaatctttagtaatatttttgacttgaaaaattcaaatgtttcatgctcttagagttctttgttaaaactcatgctgactcttgcttgtcaccaaagtctttcttgaatcttgacctgaaaacaaaattaaatataaatggcccatgtgattaaatttctgtcttctccaccttatttttttcccaagtgtatcattgtttatttatttatttggctagtgtgactagcacaaattgttaacttttcttatgagccgtcgcttttacaacactaataaaaaatattttttattgtctttgtcttgagtgaagacatattaccttaataatgttagtaaccttttatcctactatttaggcttaagctttaggataaggatgcttatgtgttgacaagaaagaaatcagtgccaaataactacattagccttatatgttgtttgatttggaagaaagttaggtggagagagtcagtcaccagtcattatagtatttatgtcacgtattacgcacgtgatcaagtaccatatctctcctttctggtagggactactaggcaggcactttccactttgtatgtattgtttgtggtgataggtaacacctaaccccaggtccacgtgttggcatctaaatcatcttttttcttttacgcttttggtgttgattttttttttagatgaacattattgtcctcattattcaacttgtgtgataagaaggtagcataattgaccaaagtggtgggttgggttgtctctgtatattgacataaaatgatgggctataaataacttaagccattatataacactgggcaatggcccacttctctttcattatcaagtggggtcttttatcttatcataaactaatggttttctgattatgtaatttaaagcaggagagctgctgctcatacatcagcatacgataaaaaccctgatgagcatgcacaatcgaccgtggttccggatgatctgatcgagccgaagtcagacaagtattgggctccagacccccaaactggggtgtttggaccagctgccccggggcaaactgctcggccaagtggtggcacgcaggcctccacgcctgccagtggcgaggggtctgtgcttgagcagactgcttggtttcgccctacaagcattgaggatttggagaagcctgctgctcagtaaagtcaaggattagaattgatatatagttgtggttgtgtggttggtattgtgtcctattatatagtgtattgttatatgtgtggggaataagatccaattacaaaaaacaggattattttggtttcgtagttattaatggacagatcttttacccctaaatctcaaatcaaatcttggttatgtccttaaatttttgtaaattctcattgctgatatctccattacaatcatttacttaattccaacaacttgtgcacttcctactcatattcatcggtcattggcctctcatcatctacaacggagtgaaaattcgtgtcatctacttatcaaattatgacatatttttgtaagtcctagctcattttaagtagatcatcaacatcgagttagttttttgcaagtatatttgtacccataattcaactaaacatagtgaagtgagaaccaagatgaggttgggagagtgggctcaaatgcaccgggattatttcacaaatacaaaaaaaattataaaaatacagttatacagaattttaaattattttataatttttatgattttatttaaaaaaacatacgatgttttgatgtatttttatattatacttttttttagtttttttattatttgaatattcttttttgttattgttttcctgttgtagttttcattgttttggtgttttttttataaaatactgtaaaaaatataaaaaaaattaaacgtaaaaatgtaaaataaattataaaaaagtgtattatatactttttttattgtattatataattatccctaatacaaatatacttttttagttgtaatgtaagtggacaagtttcctaatatgggcccatatattttctcttatgggtgcatttgagcccactcctaggcccatcttagagctcatttcctaatacgggcccaattatttcttttatggatgcatttgagcccactctcctaaacccttctagcataattacacaataataaattattaatcctaatctagaaaactaaaaggtgaccaaactatcaagagtaaatcttaacatgttacataatataaatctttcaaatcatatctcaatttcttttcatcagtttattttgaggttgttgtgtagtatagtaatgctaatgttactcttatgaagcattattacttgataattatagttatttaattaagaggtgactcactttacaaataattaatataaataattgcactaatactaatatatataatatagtgctagttgttataaaataatataatataatataaagtagatgagaa

SEQ ID NO: 16848 - DNA, 4586 bp, Cannabis sativa
atccaatgaacacccctaaatttaataaatgtttttttctagcatataatcttgtcaataaatatgtagggtagtcaatttcactaatcaaattaaatttctgtttatcttatcaataaatgaaaggataagaaacatagttttataataaatttatgctaaatcttcaattattaattgactttgaatttgaatatttttttcttccaaatcatatataatgacaaagaaaagtaaatcaaattcaaatttgtccatgctacggatgagttggcgttggcatgtgaagacaaagacaaaagtcacctacactctacagtttacattatatcatgtgacatgttttgtaacggttcatattttaacaaaacaacaagcaatattctatttttcagttcttgggtaagcaaagttcaattgtcggttccaatacttgtgctacaatttgattttattcaaatagaaatataaaagtcaataataagttatggaactgttcactcagaaaaataaataaaataaaactatcggacgctataataaaactagtagtaaatcacaacaccgtgatgatgaattcaaaggagtaatcaactgcagcgctcatttatataaatacacaaaaatatatataagctatgagggtatgacattgccacccattgcattcagatcaatacataatcaacctaaaatgtaagggaaacaaatattgggtgaaccaaggaccaaaaatggaaaataaccgaagtacagatttggcacctttaacaaatatatttgtatcatatgaaaagccctattaattaacaaaatcaacttattggagtctttaattaacaaatttgattctaaaagttgcatctctttgtggtgaagtagtagcttctcttcgcttctttcttctaaccatggaatagcgaggtagtagtagttgtactctgactaattatcaccatgaattgatatgattctcatatttgttaccgagaactcttattagaggaataccagagctttttctggcagatcaatatcttctccttttcgattccatactctgtgtcttccttccgacaaccccatttcatccccttcgcgattgcagccacagcatccacaaagtaactagattctcgaattattgcatagccatttggtcgcaggatccggtccatctctaagagcacatacttcatgtcacatctgaacaaagtacagggagccactcacaagtgttaagcatgtgattaaaacttggtgcctaagttttgacattaaatggtttctttcatagcgaaatgatttcctttggggttatgtttggttcatttgaaactcaagataggaacacaaacactataacatctcatatccagaagagcataaagtagtcctttttaccaaatcaaaacataaattatgcgcataaacaaaacaccacaaattaatccacatttcttacctgtgactttcggcagtaaagaggccatcaagatgaagaagatcataagtacgaggataagtagagaatgcttcacacctgccaaaagaaataccacaatcagctacaacataaagattgacaagaatctcaaaagcagaagattgatgaagcaaaagtaccaatcatggtaagttccaataaggccccgatcaaagaccacagctaatgtgttggtagcataagaagagacaacattcatgacccacaaaggatcgtcaatcacagctgcagcgaagcctccgtaaactgtattcatgtccattacatttctaatcttattggacccaattgatgaaagcaactttttgtagtgcttcgcacgcaccctccacttgtcatcatcatgcttgaatgtgctagcactccctccgtgaacatccgagacacgttctggagcagcatgcaaccgcgcaggccatttagagaccgactttaaatctgttctcttatatttttggtttggaacaacaatgcaagggcggagaggagtataccaagcagcatcaggttcaaggctgtcatcacattttggtggataggcgtcagcattattagaaagtttattgtagcaactattgtccgaagccttccgccagacagcaatgtcatccttcttgttgtacaatttgaagcacatggcagtaagcagtttctgcagattgttataatcgcttctttgatcctcaatggttgtgttccatccacgccaccggcgctcatagtttactggtggaccagacaacacccaaaaacctccaggacggagtatgcggtgaatttcctgaaggtaaactccacctggtagcagagatattagagttgattaaagctgcaagctaacagataatgccctactaatatagaaaactagttccttattcaaaggtcattgtaatgtgagggaaaaaaaacctttccatgtttgaaatgatgaaaggaataacaaaaataaggttccattctcatcaaatcccaccaattgataaagagaacttcactgtataggcagtctagactctagagtttagtgcttcagttgaatttaggtacaagaatttcaagaaatttcctcgaaaatgatgttacttataaaagactcaatatgctttatcacaaagattttaattgaagaatttcatgctaaaacagattaaatatcatttgtatccaagctagtgactaatatgcatgtggcacaatgtttagtgttttttgaatgtgaaattatgaattgcgatcatttagtatcttatttgcaactcttaaccattaagaaacttcagagttttaataaaaattcttaatttgtatacatcatagtttacaaagacttaccgaattctgtccacggaatgagacatctagaacaatgagccatatcaaatgagtttgacgggaaagggagcctctgagtagaaataatgccgaggatcgctggaattccacgttccaaggcaaactggacttgagcttcatgattatctcttggagcaagggatatagttagtattccccgatccaacaaatcacctccccaacttgcaacctaaacatcattttgataaaagatctttatatagccatcaacaatatgtgctccaagctttaacttactaccatataatgctaaaagatggctataatttgcagtagaaaagcttcatttcttttttaatttaactatgcaagcccaaaaatgatctgatctgctctgataggaaataaaatgtacagctctggaatattctaacgatgaatgaataaaaataccagaaatatataaggacatggaaattaaaatactcaccccacagccagtatcaatggcagtccgaacggtcccatctgtcatttcagggataagtttttgcattgaatcaacatagtcacttacacctctagggaacatagtgcccccaccaggaaagagaaacttttcgccttccttcctcaaccagttctggtttgatttctgcttgttaatccaatcataagggacattcctggacccagatccacatgtatagctcagcaaaacagaacaaaaactcaaactgaatatccagaccaacatgtcataaaagtacactgacttaccggtaccagcattcatccctgctcttcggccatctgattggtaccttatagccatctggaggtggaattaagcactctttcctctcaaaagcaggagggcaatgacgctccataaacgtaaggcgatgaacgccatacttcttccatttctgcagaaataaggggaaaacacattagtttacagcattagacaacacatatagtttttcccgaattctaaaattcacattatacaaggcaataactaatcaatatacctttggatcagtacaaggagtgtaatcttgatattcaccgctgcattgggggaaagagacagatttcacttggagagaggatgctgctgaattgaatgaagattggacaacttttacagcatccttggcttcgttggtgtaaaatctatgcttctcagagcagaagattccaccaagatagaatgaaaacccgcacagcacaacaaacatgattgacattggaacaactctggaacttttatcctgctggtacaccggtttcccatctttatgcttcatcttgtatagaattaggaaatatctgcaaacatatgaattatcaagtcatgaataagattttttaaatattttctcataacatactagacaagcatagcatccactttcccttcagtaatgaacttgtaataattcactaagttatctgcatcttaaattatacaataaatgataaagagatcacaagacaaacatgaaaactgagaatggtgtagaattgtttaaagaagatgaagctgatccattggagaccctactataagaatgtccagatcttcagaatgaacagcaaaagagcagaaatggtacaagctactactcctacgatccccaaagtttggaagagtacagctactgatttatgccaggtccattacaaagataactaacaaatgtactcttttatacaaaaagaaatgaaaaaggtaaacgacaaaaaaagttgt

SEQ ID NO: 16849 - DNA, 6170 bp, Cannabis sativa
aggcaatcctttatttgtgaagtcacggatagagggaccaaatcgtcaaaccatgatacaagtttcttaagaaaactacatgaaagtggcctcataatgagtcagtccctcaaagacgctactcatttcaatcaactcaaaaccgtcgaagttccttgtagttcatactcatcaacgcgtgaaccttgtgaatttaatatgtggcatagcattggatataatatgaccaaatcctatttcaactttgtccccctcttcagggatagaacccaaacacgctagtcatagtagctttttgacgctaactctaagcacaacagagcatctaacacttgtcattaaaccaaacgagaaggtacataaggttattttcatctttcatcgtcaaagatgaagctggcccctataataactccagcctctttaattaaatctactccattcactaactaaaattttgaatttggtaaattgttttagaatcttttggtaatttatttatttatttatttattgtgagggttttatttgtacatattgcaattgaaaaagaaaagaaagatgcaccaccaaacaaaatcactaccatgtttacttttgaaaaggagggaaaataaacgcctaccaagcaataatatcctaggaaacgtacatggttttctaataaatttttattcttcctacaagattaatgtctactaatattaaagcagataaagcagaaattgaagataattgttggatgatacaaggataattttataccaaacgtttatggttgtaaaccataaaatagaatagtcaagtcagttcaatcttaagaccctgctaagataacaaagcaatgatctaatcctgctgcttctataattcacagcgtttacagaccagttagacttagtattcctaaacttatgctatggcgcacatcaaataattgaaattaagtgcatataatgaaattatgcatttaaattatgtgtattttgtgtgctccagtattattcagtgcactctactcattgcataccgaccttcctctccatgccttaacataagatttcaacattttattataccacagggggtaaaaaaaaattaccgagctgtacagtctcaaatagcccgccgggtttattgtacccccatgcacttccaccacaagtttttgctggtgtttgttaggcaaccagctggtatcttcaagttattctctgataaatatggaaggccaactgatgtggcagcagagatgagtttctaaattcagcatttggaaaatttaatgttcacctttgcgggaagtcaacagaagtgtttggaacgttggtgattcctgatggcggggtttcgggtcttggggtacttacatcaggcattacaaagtctggatggaggatatctggcccatcccagtcgacaacagctgtagttgtagttaaggaatcaagtgcccatacagtgaaaaaggaaaaggaaagagataacattgaaaggaaaaaaatgcagcagcattgtaaaagaaggatacagtctgttttccacatatctgtaatgctaacttcagcatcagataaaagccagtagtccgcatcattctgaatttagcaacaatagtcagtctttcagtcaaaatctaaaaataagttacaactatttaagcataaaaattgtatatgcaaatatatatttatatatatgtatatatccagatatggtgttaattaaatttatcttcatacaactcgctccaaacttcaaatagtaagtctcacacgtcagattttaaaggtgttttcattgatggtctaactataaaaattgcttgtgctgagatccgtgaagatgttttagatacctggatatagtgttgtaagctttcaaaatgttttgttttcttcttcgcttaccacaaataaagataaatcagcatggttagacttacatccacatcagaaggaacaatcttcatcattcccccaggaaactcctgtaaaggattagtatcagggcacacttgatgatcgtgttgtgcctgaggttcaatttcctttacagtgctgctccctacagttatcacttctgttactgtaggttcgctagatcctgaactagaagcaataggaaagcttgcaggtggctcagcactattcatgtcctcaaacttctcttcaaattgactacaatttaagaaagtaaatgttcaaaggatggcatatgaaaaaaaaactaccttaaaaataaatgaaaatctgcaacaatttatcatggcgtttaacagataatacaacaatttatcatggcatttaacatataatacaatgaatatgggaagagaatgcatgatatgctgtaaagaaattatttgaacatttgaacaaaacagacgaggcaatattacctaacaaggtagacatcaatgggacccatagtgcttctgagaattattctgtatctcctctgtgcatagtcaacagcctggtataaagagaaagtaatcatcacgttgaggatcacaaatgagaaaacatagcacacaatgtgtaatagttacagaaattttactcttgtcaacttacttcatcaggatctggaacttccagggttgttccatgtggagctttaattgctataagggtttcattctgccaaaacaaataacatacaggaagtttagcagcatatccagaaaatcatgcaagtggaataaataataagtgcaatgcaaataataagcttacatgaaaacatggtaatcccttgatgtcttcttcagtcacaaaaagccacctaagtaaaaggaaggagtcaatgccatgaaagcaaatgtaaaagtattacgtattaaccaacaatcaaacaaacaaaaaaaaaagccttacttttggttgttctcatcttcgctcaggtccctcagtctctcctgcatctctctgcaccagtgttgaagtttatttgttacccaacagtttcaaattaaaaacattacctgtttaaaacagtcaatcaaccgcataaaccttattcgatcatctaatccgcgctcttccatgttaaggttttcaacttctgcctgcataataaagctatagtataagctgtgatacattgagtttaattgactaaaggaaatcaagtctaattacctgtaataaggaaatatcgccatcaacatcccctggtcttgatgcgtcaagtcccctaatgaatcaattaactccattactttcccaagtccagtatttacacgaaaaaagcaacatcataaactatgttatgaattctaaaatattacttccaacgaattctgttctttagcttcttttcaataagacctatgccttccaggacattggttatgtcatatatccgtctcttttggacctggtaataaaaaaaaataaataaataactttcaatcagtgcaaaagtgcacatatccagaatgagaaaccattacatccaaagtttctgctgctttatttaggtctagaatgccatcttctgcatgcttgatcaaattgataaacttttttgtcaaaaggcctgccaaaaatatattgtcatggcaatgtcttttgttaaaagctatatatatcaaaagaaaaaaaaaaaactatactatatcaacaacagtcaaatgaagtgttacacttcagaattacctagagaactgtcatagcggcagctaccagctggagttagaggagaaggggaacctgcattttaccaatcaattccagtgagatatttttcagaggctgaaatttccaagtttctactaaatggactacacttttgcaatagcacataccaccatggaatttacagcacgaacgaagaaattcaacataaaaaagagaccagatgagaaatgacaaatctcctcaccagtatttgacacaggtgtctgtggtgcagatctattggcctttgcaccctttgacctattgtatgttctgcctcctttagcagaaactggagtttgcatcggactgttgttaacaatattaatatatccaggactgctagcccaatccctatgatcaacttcgttattctgtaatgcattcttccgctttaatagctaaacaacaataagccatataacctcaattcagtaaaaaggcaatctaccaaacaagaaattacttgttaaatgcacaatcatgctggacgactcaccattataaagaacagtcaaggcataatacaaattgcaatcatgaggcttaagaatcaaattcaagaacacagcatgacagctacgtgagactagtactgggtaaaagataacacaccaagtgagcaagagttggtgtgaagaaatctaccatcttagtgaataacatggttaatcaaatttaaaggtatataagtacacacatttaatgataacatatagcagtacactgctatgaattaaaacactgcccacttttatagtactctataacaacaaccccagtttacgaaagagtcaagtaggacaccaccgcaccttgttgactaaaaatttaatgaattaattagaaatgcagtactaatctcttcgttcatgatgcaaaaactacatgaaaatgcacatgccatcaaacaatatgccttaaaatcataggacatactccattaccaggctcaacattgattcccaactcaatgaaaccctaaacacacaacgaaaaacatgagttgagatccaaacacctgagctcaactatttcaacatcaacattcagcacaattgccatccaaacaccgaataattgcactaaactccaccgagcattaagcttaatatcacaacaaaacacaacatagaataaacaataacaaagataaacgcatcaacaagtaaaatcactagactaacaggggatcggacaacaatggcctcaggctcttgatcagcagctctgcgaccatcgctggagaatcgatgataatcatcaggaggaacaaaaggcggtttcgtcgacgtaaaagctaagtgccttctcaacggcggcacgatctgagcaccacctgaggcaaggggcggcggatgagcaggacgattgtgagctcgaccgccgccggacatggagaattgttcaccgacgaagaaaatgagcaaagtcaccgattgagagagtgaggagaagacgatctggttccagagagagaaggtagggttgagaagtaggtaagaggaagaggtttagggtttgggaatgggatctgggggtttagagagagaaagtggagattttagagagagaaaggaggcgttagagagggaaagtggaggcctggtttggtttatttgaggtttgggtttgggtgagagcagaaaacgagggaaggagggaattttagttcggatagatgtggagggaagcacgccaaaattaattaatttgtttccatatttatactttcgcccctcttctagtctttttattctactatttacctcttttctcatattatttttcattttagtccttctttttgcaaaatctaatcgattaccttatagactttttttttttttcttctttttactttttagtccacgaatcgatagtggagaatccaatactcgtaaaagttaaatctagagaaaattagtgcaaaatggtaaatttaccacaaattatatcatttgaaaagaattcatggtaaaagtaaatttatccatttactgttgatgaatatttgaatttaatcaccaatcattagatttgttttttcgtacaattaaaattaagattatcaaaaatttcataactttaatttgtgaatttattttatataaacatacatatattagacttatttattattgtgtgtgatgattcttgacacaaatattccattacaaacgacaatgttataatcctttgccctctaatatggccttgtatactcacatgatcagataaggtaatttatctcgacaatatatatggaacagagccaaaaacaaaaaggtttaaataattttttttattggcattaattttttgaatggttgaataaatttaaaagaaaattttgataaatgtgtttacacgaaaatttggtaaagacagttgtgacctgtgaacatggagttaaattgagttaataccatcgtacattacgtattaacatatttgaaaacaaataatttataaatatgttat

SEQ ID NO: 16850 - DNA, 4983 bp, Cannabis sativa
  modified_base (268)..(273): a, c, t, g, unknown or other
aaaaaaaaaaaaaaaactgatttgaggtgcaacaattaaaaaattcatttttttaattcaaaaatcatataaaaatactaattattttttaaaaaaaatctttaaaaattaacaatttaagttttaattttaaattatttctaattttcaagtacaagttgttgtagcttatatcaaatacgtacaattatttattaaatatataacaaagatttagtaagatctgtaaaaattaaataaagatcgaaatataatatatatatatatnnnnnnatatatatatatatatgatatagttattttacaaaacaatcataacaaaacaaaatcaataattcaactttgatgttttttttaatttagtatttgaacttataattttacattgacaaatgagataaagtaattgatatgtataatttatttgatcaattgttccccataaaactcaatttaattattaaaatactagtacaatatgatccattcacccccaaaatatcacattgtatttcgacattcctctgtttttcctcttttttgggcagaaaagaacttatatcataatattagacaagatgtaacatgtcacagagaaaaagtaaataataaaaataaaagtaaaataaaatgtaacatgatcacacaacactttaaaaagctgctcaaaaaaatatctatgttcattgttaattattaagttgctacttttatgaagcacaccttataacattgaaaaattccatgatagcaaaagaagattagaaatttaaactttggaaaaagctattacgtgtcctgtcaaactattataatggcactaagtaaccagcccgataatttatggtgaaggtaaaatatagaaacactgttctatattccaatttcaattccatatttccaccaactttaaagttcaaactttacagagaataatttcttttgtgatttgtctcaaaaactaaagataatataccaactttaattaaggcaaatgtttaaatttgttaaatgattaactaacgagaaatactatttttttttttgaaagattttttaccctttctaatatcattatatttgagatatgaatatataccataccactataatatattaaagaaattataagaataatcatatgttgctacgtacgttagatattttcttgggtctggttttgcaatatatttttattattctttctagttttaatgaagctcataatattattgatctagatctgttaaataatctaagcttagttttgcaataatctaagcttgtttattaaatattttcttcgcgtgaatgatcaatatatataactaattattgtaacatatgtacataaaaggtttctggacaaggcagccatagttgtaagagatgaagataatagtgacgtaataataaagaaccgatggaagatggtgacagtaacacaagtagaagagatgaaatgctttgtgagaatacttcccatatggttagcaaccatagcactctcaatctcattcgcacaattctcaactttctttatcagccaggctacaatcatggaccgcaatcttggtccaaacttcaagattccagcaggctcagtcccagtcttcagtgccatcaatgccctaattctggttcctatgtacgagaaattcataatcccagttcttcggaaccgaaccggtcatcgtcgtggcataacatctctacagcgaatgggagtcggcctatcattctcagtcatcgccttggcctcagcagcaatcattgaacacaagcgccgaaccgaaaccaataatgtttttagtgtcttttggttgtttcctcagttcttcttaatgggaactgccgaggttttcacctacgtaggacaacttgagtttttctacgacgaagcaactgatggtacgaggagtattagcagtgcaattttcttgagtgagattgggttggggagttggcttagtacggcccttgttaagattattaaccgagccactggtggtgaagacaagggttggcttagaaataatcttaatatgagtaagcttgactatttttattgggttttgactgctattaacttagttaatttcttcgtctttgtttttgtggctcggcgttacaaagggagggatggatatagtgggttgaatagtaatgtgatgagaaatgaggatagtagttgtgaggctattggtagggttggagattcgactttgattgaattggctggacaacccagtaaaaaatagctactatattattattattattattatttttatttttggggggttgggggacatgaaaatctcatcatcattttattatatcttgtgttgcaatatttgtaatacaccttttctattatgcataatttctttaatgaatgtatgcgatttgcactttggcgtaaggaatgactcttaattttttgattttttatttgaatcaattaatttgaaaaagttaaacatttggtttattttaattgtttcgtggagcatatttagtttgtctgctgctactttggaaggcaaaaatggggccaaattaattaacaatttgaggtaaatgaagaagataatttcttttaattagaaaaagagtatttatgtaatcatgcatggtaccccaaattcgaataatcaaatctcttttacataattgatgtcatttttcattttaaggtatgatgattatttggatactggtcagtatttttgcaagtgctttatatctttagctagcttagctttctcaaaagtggttcgatacctaacaataattttttctgcacacgagtcttcttggcgaaaggttaattaattagctcattttaatcgaccatttattaaaacatgatgtacgtataagagagcatgtattatagatattatgactagggggacctaagtcgactatctcttgttacccttatggctagcataacagtcgagttttatctttcatgtttggtgtaacgcaagtgtcattatccacactataataaaatattccatcatgcaataatagttcaaaatcttttgattttatgcgtattgcattattcctatttggcaatgcatttggttgttaattagtttcattaatttgcaagagtctaaaggggtccctccatttgaatagtggagggtgtcacttcttgcctcctcattgcatgcacactatgatatcatccacagtgctcatattggactctagctagtggcttgttcatccattgctacccatcgtacgtgacaatttacctgcatatatatatatatactttcacggtacgacagccatcagatgagagggttatttgatctgacggttgcgattgatctaggggtaattagggttaaaaaatagaaacgtaccctgatactcatttaatatgtcctgagacccatctaatatactacggaatacattctttaaaagtacattacgggataaaatcatttcctatatatatacatatatgatttatactaataaatataatgtatatataattggaaatttatgcagtatatctctaaaggaggggtgttatatggtagaccctctcggcattcattatattttttaatctaattttctttcataattatttatgttgtaattttatagaattatttataaatttttagaaaaattcaaataatttatcgtagcaaaaataagattgaacagttacttacgacgtgtataaaaaaaaattgttactcgtacaacaaaatatgtaaatttcatttttggcattatataaattaatgagatttttataaaaaatttacatacgatattatataactataacatatacacgattatagtaaaaaaataaattaaaaaactctctacccaaacaatctctttatagaacccctatatatcgattgccatgattgaattgaactacattatgattcatgaggagcctagctaattattcattttgatttttttccctttaatccattatcgttttaccaactaaatagtgatcttcaatcattaatttggagatgaataattaatatagtttttttttttttcttttgcaatggcatttttttcgtcttttgattaacgtggtgaatagtgataaaaaggttagatataccattttcccatctcttataacatggagatacaaatgagtaatataaagataaaatatagttcatttgacaataatatgcttcaataatgtacctaaaattactgtataaatttggtacaatatgccaaattttggcacaaatattgctattgctattacaaatgagctattttttttatttacacttacatttataattattttattattatatttagtaatatattaaattataaattttttatatttatattttatattttattatttatattatattttacactaagttttataattatgtattggaatataatattaaaaattaatgtaaatatattataaaattatttttacgtgtaataatacaattttttaatcgtcgattaaaaatgatcttagtgctttgtttaaataataacttatactttcatggttttaataatgtactaaagtatgtatactttatttatttgaccaaatatttcctggaatatttatatttatagtacgttaaaagtaatttttaattagtcacttttagtataatatttttaaatatagttttagttaaataaatcttttaattttatttctcttatataattaatgaaaaataattaaaaagaataaaaaataaagatgtactattgtcttactaaaagagaaagagaaataataaaagagtactattgttgtctacatacaaaaatagagctttttgccgacgtcgcgacacatttttgcgttattttataaaaatagtcatttgccatgcacctatgtacttttactggtcattttgtaaagagtttaagtttaggttccataataac

SEQ ID NO: 16851 - DNA, 5077 bp, Cannabis sativa
  modified_base (3064)..(3067): a, c, t, g, unknown or other
aaggaacttcttagagcatgttcatcgcaccaatcacgaaacccaaccctttttacttgcaactcatttaactccctttccaaatctttaatctaattatcaaggttaccaaattgatttcgatttcaatgaataaaggcaaccctagccatatcaatccttcaaaatattcaggaaagaggccactcatgttgcactatagaccatgcttgattaacaataaatttactacgctcatcacgggtccagaactcttcaaatttgaatttccttttcacacgcccatccagaccattattgattttctctgtttacaattcatttttgtttttaaatatgtaatttattataagttcaaatacaagtcataagattcaaagacatagatcaaccacgtaagaacaaacaagtaaagaaaaaagaaaggaaatgttgtatattttgattcagtcacaaaacaaaagtggcatgttttttttcctttcttttttcactataattttatacagacaacaactttagtgaagttggcaattcacgcccacattaagaacagagctatacccaattacccatgacccgttttaatattcccacaaaaacaagtaacaacaataaaagcaggttgccaaagaagcaacaagaagcgtaaagagcttaataatcaaaagaaaaaagactcattttcactccataacaagttgtctatgacgattcaggtcatttaagtaagttgaacaagtgtaatcttccacatcacaagcatctaacatcactgatctcacggctcctgaagtagtttttggcttcaaatccacatgtccatcttcaccctttaatatcttaactacctatgttcatttggttaaaaaagacaacatcatgcacagtctattaatcttggcttgttttggatatggaaaaattagcctaacttgaaaatgaaaaattaggctaacctgattcatgtatggacgtttagaagattgatggtgaatgcacatggaagctgtcagcattatttgtttcatttcaattgagtcgaattcattgcctaatctagggtctgcaagatccctaacattgtttgtgtccagcataggctttgcctgaaattaacatgaggttacttgttgattaagttaagtaactaatttgttaaagcatattaggctcaaaatgacactttataactgccaagtcaaaaagtgattactggtgagaataatattagttgaattagatcataagagtcatagatttttacccagatcacaaggctttgttggcttgaatcaactgctcgacgaccagttatgagctcgagcagtaaaactccataagcaaacacatctgtcttctcatctacaattccatgcatgaagtattctggtgccaaatatctgaaaccatttgaaaaaagaacaaatccataaacaaacaatttattgcaaaacagaacaaattaattgaagaaagaaagtgtggtgatacaaagtgcttgacatacccgaatgtgccttcaattgggaaaacaatatggtgagtccatttttcaggaagccattttgcaagtccaaaatcagaaatctgcattaattattattatacaagcaacaaatcaatttcaaaaacaaatgaattaattgagagaggtgtgcattggattggatttgattgggtgagagtaatgaaattaaagtacctgagcctcataatcttgagtgagtagtatgttagaggccttaatgtctctatgaataattcgtctctggcaaccttgatgtagatattgcaatccttgtgctactccaactgccaccttaaatcttattttccattccaaacactccaaacctgaaaatgaaaattatgtaagtatttccttatgtgaaaaattatgaggtcaattgagtctagttatagttaaagagaaagatagaacaccaaagagaagggaagctaagctgccatgtggggaaaattgaaggactaagtgaaaaccgccatcaacaccaaaaccaagcagcttagctgcatttggatggtctatgtgggcaatgatcccaagctctgataagaaatcaccaattctttcctcgttttccttctcttttttggtcaaccttttcaccgccacgagttgaccatcaggaaggcaccctttgtaaacctctgcctgcccaccttttccgatcatgttctctgtcaatttttattattgataaataagtcattctttaaggagtgaaaattagaaaaaaaaaaaagaacttgatgtgacaaaataattaagttgtgacaaaatcatatgaaatatgtgcaactaccattacctatattctaattagacaaaactgagggttgagatttttatgttcaagtgttgaaaataatgacctcctcttataaaattctttaaaaggtttcaccaaactgttttgacttccaatctttttagacagagacatgaaataaaaaatattgactccaaaatcctcatcagttggcgggatgtctttcaaatatggttaatcagttaatttatgtcattatcattcttgcttatttatttatggtacatatttagactaaaatctctacaagtaatattgtgtagtgtgactaatttagttttgggtagaaagttgattttgtcaattagaaattaacccttttaaggaaggaaataataaagaaaaagtagtgaaatactaaatgaccaaattgaacaggtggttttctaaacaaattatagaactgagtactgagtcgaccaaaatggcaggcaaagcatggtgttcttctcaaggaagagtggccaagtagacagacaataatcactttcttgttttacttactacccattaaagttaaagaagactttctagtcaaaaaggtcgtctccataggaacagaagatggccacgctttgtctccaaattaattaattgctgctaaacatagtacctctttcatcttatctacaattgataatataaatactcgtacatatgcatttattttctcaaaagccccactaaaaaattaaaaaaaaaaaatnnnnaaaaaaaaaaaaaaactagacttagaaacagtcgtaattttcccaatttcccacgctcgctcaccataacaaaaaaaaaaataaaaataaaccaacaccgccccctccaaacaaataataataaatgtacatacatatatctattcaaagcaaaacgaagaattaaaaccattctcgataatgaaatgacaatgttattaataaaaagtaaatacatgtttgaacttcttagtcagagtactactggttttgtagttaaagaccataaatgatagaaaccaaaaccattgaccccgtaaacctaattaccaaagtcatgaacagtcactcactggcctatgtttggccataaatttctttttctctttcggaaatttaaaccctttttaatgacatttgataaatgcttttgtttatccaaaacttcagctttaaaaattaaaacaaaataaataaataaataaataaaaggagttaaaatgtgttgttaccaggactaaaattagcggtggcagccgccagctcagattggtcaaagttcctccacgagggcttggcaataggaatatcaaaggggtctgaaacggcgtcgtccgcgctgcgaatccgagccagcttccttcccttcttcgacatctcgtagctcgctaccaacaacggcatggtcgagaatcgtctcatggatttcttctttagtgtatagaaaacgcttctccactgagacgtcgtcgtcgaagaagaagaagacgacgacgacaacgacgacaaaggtgatgtcgttttgtcgctggagctactgctgtgatcgtcggaatcagctctgcccaaaatagggatttccaaaacacctctaggagaagcttcttcgtcttcttgttcatcctcttcaacttcttcttcttctttttttccaaaaagtcctaaccttttcccctctgattccaaaaccatttctggggtttctttgtcttcggctccggtctctgcgtagatgaatcaaacggaaatatcaaatctttcccttttgcgggtttaccgggaaacaggggatacgaatgagaaaatgaaagagaaagaaaaggaaacattttgaaaagctttcttcgaacatttatgtatgttgcttaggatgaaaaccattttggaagtttggaggctaaaaagaaaaaaaaaacattttgaataatattcctctgtattcctttcttaattttgctcaccggtaacttattttctcggcaatcaaacaaatatgtatcacgtttttctttgaaaagcatcaaaaacaaaaataggaatcattctaaacaaaacaaaaaagaaaaacttaccttccattatcatgatttgggctctctggggtttctagttatatataaataaatctaaagtatattttcaaaacccagaacctttgaaagccatagaagaaacaaaaaataatgattattttttcagttcatgaaaattggagatacaaaaaagtgtgcgttggaggaagaagaaggtctatatgtttgggagttggttattgtttggagggagagagatcgttaaggatgattggaataaatgtgctatatttatacatagatttacttacagatacaaataatttaatatataaattattaggtgtttttatgagttaccctccaaaatattaatatttgaatgaatataatatttcatttacatttattgatcgatgaaatctcagccgttgttttcctgggctcgtgagttttgccgtaactgccgctttggctgcaagatggctttaacgaaccaaaccaacaagctttgtttttttattatagaaaacaaagaaagagtaaagagtagagagaatttggactcttatgagttatgaggatacttttggtatttcaacttttggttttagggagagagagggagagaaaaagagatgatgttagggttttttttttgtaagagttctatttctacctcataaagtgctcgtttggaacgccgcattaggtcgta

SEQ ID NO: 16852 - DNA, 4606 bp, Cannabis sativa
ggtgctctaacatctacaccaaccatagtagcattgtggctagcaccctcctatgtgttaatattattattggtcaaattaaatattaagtctcatataatttaatataataactaggcacgactgtagtctaatactcttactaattctttatctattagcgagaatcaatatcttttgttaaaaattaatattttatactgtgttaaatctattaaaatttaacatattaacaaatttaaattttattaaatatgttaattaattttgttgaaagtttaatttttttataaataaaaaattaattgatgtattgtatgagataacactttttaacagtagatcgttcttgattaatattagcggtggcatttgggtacgtagaaaaatctttgaccttataagtcaacacgtgtacctaaaacccataaaaccctaccacgtcaataccacctaaaccttcactcctctcctcagataagtttgaaacctccgacaaaactatccattctccccaaaataccctcaccacctctatttatttcataaccaaaaccaatgttattgaagtaatttccacacaactcagacccattttagtacttacccatatttacccgcgttcagaaccaaaaatcaaacgctcaagatcagaactatccactatactctattactttctcgaattttctcacttcaaactataaatatatatatataaaagaaaatctcttaactatcatcttcataaaaaatctgtaattttgagcttttttatatatatttcttattactctgtaacaatggcgacaaagtctgataaagccataggaattgatcttggcactacatacagctgcgttggagtatggctcaacgatcgagttgaaataatcgccaacgatcaaggcaaccgtacgactccttcctacgtggccttcactgacacagagcgattaatcggcgatgcggcgaagaaccaggtggcgatgaatcctcagaatacggtcttcgatgctaagcgtctgatcggccgtcgattctctgatccgtcggttcagagcgatatgaagctctggccgtttaaggtgatcccgggacaaggcgataagcctatgataattgtgaactacaaaggagaagagaagcaattttcagcagaggagatttcatccatggtgttgattaagatgagagaagtctctgaagcttttctcggtcactccgtcaaaaacgccgtcgtaactgtaccagcgtatttcaacgattcgcaacggcaagcgacgaaggatgctggagcgatttcgggattgaacgtgttgaggatcatcaatgagccgaccgccgcggctattgcgtacggattggataagaaagcttcgagagtaggcgaacagaacgttctgattttcgatctcggcggtggaacttttgatgtctcaattttaacgatcgaagaaggaatcttcgaagttaaagctacagccggagatactcatctcggaggtgaagatttcgataacagaatggttaatcatttcgtttctgaatttaggagaaagaataagaaggatattagcggcaacgcgagatcactgaggcgattgagaaccgcttgcgagagagcgaagcgaacgttgtcgtctacaactcaaacgacaattgaaatcgattctctatacgaaggaatcgatttctacgccactataaccagagcgagattcgaagaattgaatatggatttgtttaagagatgtatggagccagtggagaaatgtttacgcgatgctaaaattgacaagagtcagatccacgaggtggttttagtcggtggatctacaagaatcccgaaagttcaacaacttttacaagacttgttcaacggaaaagagctctgtaaaagtataaacccagacgaagcggtggcttacggggcagcggttcaggcggcgattttaagcggagaaggaaacgaaaaagttcaagatcttctcctactggatgtgactcctctaagtctcggattagaaactgccggcggtgttatgaccgtactaattccgagaaacacaacgattccgacgaagaaggagcagattttctcaacttattcggataatcagcctggtgttttgatccaagtttacgaaggagaacgagcaagaaccagagacaacaacctgctcggaaaattcgaactgaccggaatccctccggcgccgagaggtgtgcctcaagttaacgttgttttcgatatagacgctaacggaatccttaacgtttcggctgaagataagacggcgggagtgaagaacaagataacgatcactaacgataaggggagattgagcaaagaagatattgaaaagatggttaaagatgcagagaggtataaggctgaggatgaagaggtgaagaggaaggttgaagctaagaatgggttggagaattacgcttataatatgaggaacactgttagggatgagaagtttggtgagaaattggataagagtgataaggagaagattgagaaagctgtggaggaagctattcggtggttggaagggaatcagttggcggaggttgatgagcttgaggataagcttaaggaattggaaggtgtttgtaatcctattatatctaagatgtatcagagtggtgccggcgccggagccggaggtggtgatgttccgatgggtgatgagtttggtggtggaagcaatggtggtggtggtggttctggttcgggtggtgggactggtcctaagatcgaagaggttgactaaggttggtttgttgtcgttttggggttggaggtgataagttgtttgtcgttttggatagttttttagttttagtatatgtaacgcatgtttacagtttatgaaaataaataaataaaatgagtctcttaagtaagtttctttaattaattcatctttaatatatctgatctatatataatattagtttaacatttttacacgtgaaaatcgataattatttacacgtgacatttttatgtttaacttggttaagtatctcaaaagtgtcaacaaatgaatagaaaaagtaccatgagatgagatgagacaatatgataatttgacttaatggagtcagtgatataataatgagaaactattgataatcctaacaggtgttcgtaatttcgttggggagaattctgatgcgacttaaaagattacactagtttgcatattcaagcatttataaatgcctgttctactcactgtaaactgtacctcatcaaaagggattgtttgaaatttgtagatgatctagcctctaatgctagataggacatgtaactctactaacagcaatggaatcgcagggtgactacatcgagttcggttttacaaggcgaaacttaattataaattttgatgaccatagaagaagaactagatttagagctcaacatgaaagttgtagatctcgttcttagctttccggaatatcttgaatcgtctaatttcgagttgtattgaagaagttatggccaaactacgaatcacgtgacataaattttttggtaggaagtcatggccacggcgtggaagtcgtggacgcggcgaggctgctcgtggccatagcgaggaggtgatttctgggcaatttcgaatttaagaacccttaagctacaaaattgagaaagaaacttagagagagagcaaggaaaatacaaagattgcgacttctagtgttcttcattatagttcttttcttctccttaaactcttactatttattatgattttgattataatgtttagtttcgatagttttcttttagttaagggttatttcaaaactcgagacatgaatttttaatttcattattacatgttaatttctagcttccattatatcaaattgtttctactcttctatgttcaatgtcatgattattgttttaattttgtttagatgatcactaaattaggttttactttaatctactgtcatcttaggattactattcacttaatagtctaggattcttagtgtttgtgataaattgcaatttctaatattgtcaaaggtattttaattgtgatgaagaatatagtctatattaaatgaattatatgcttcattaatttatatcctagattaatctatctccataaatcttaaagttttatctaagttaaataaattgcatgcttcgtggatttactgcttaggtaaaagagttaattattgagcaatttgccttaattacatgtaatgggagatggagataatttaagtgcttcacctttatctgtgggattaataatttgattaaaaaattgaaattacattcattaatagaagttaagaatgattgttgagggtggagaataacctttaactatttatctcatatcgtagtatcacatttaatttgtttttatttttatttatgttattttattttcatcatcgaaatctcattttctaattcttgaataataaattgataatagtctttgtgggatcgacctgcgtttaccgttatactgaagtaattggtaatatatgttagataaattaacaattaactcaagatctatttgtatataacatagaacac

SEQ ID NO: 16853 - DNA, 3834 bp, Cannabis sativa
aattaggtagttaccacttaattttgatatttaattaaattttatttggaaagttttaagttgcttattttagattctttctataaatatgagtgtgagtttaaaaaagcctcgcgctattatctctctgtaagaacgtatggaagtgtgtttagcttgacacttgcttaccattctagacaaagtttctgctggtgtgttagttttcgttattcttttggtgagtttcgctatgagttctggagtgatggatttgatggatacgactctaaatgagttattcgaagatgcagttcaggtgagtgtgaatgatatcacctgcgacctaaacccaggagaagtagaccctcccgatgaaccttgtaaggttattctgggaaagctctactgccacacaagctggggaaaaaggcaatccttggatcgctgaagaatgcctgggcatccattacgggatggaattggaaggaacgtgatgatggtttttttcagttctctttcaagtcaagattcgatgcagagaatgttctccttaggcatccttggctggtatgcggatatctgttggttctcatgccttggccttcccagcttaccctggaggaagttaagtttgatcatacacccatttgggtgcgtctgaggagtatccctccattctactggaacaaaagtaatttacaagaaattgccggaaaagtgtaagctgtgtatgagttgcccaagcatattgagaagaactttgagaggggatcctttggaaagggcgagctgagattcagagcaacagtggatttatcaaaacccctgttttcgggtttcttcctcaggcgaacaggtataaaagatctctggctgcaataccaatattaaaggctaccaaaaatttgtttcaaatgtggaatgatgacccatgaacacaaatactgctttaaaacaccaatggtgataaaagatgcaactggtggtttttttcccatgtttggaaactggatggctgaggatgccttagagaaatcgccctttcaatccccactaccaaaatggtttactgagtggattattttcaaacgagctgctaaggatgaaaaggttaaaaatctactcaaaaatcaaaatatcagtcgtcaagctgaggctgcggaatgtagagaattatagagacaatatccagggaaaaggaggcaggtggaaaccattgttgaaaccaggagagacaccgaagaagttgttctaaatcggtatcctattgttcttttgccggggataggcgaagtttccccttttgagaatacagaagacctggttgtggaaaagatcatccctgagttaacacttggaaagaaagggacatgtcaaaagcagaaggaggtacaaagtagcaacaacacaaacaatgggcctgagacaactgatgagggagatgaaacgctagctgtccatattttcccaaattgtgctaacaacatttagaatggggtggctgtacagaaaaatgataccacttttggaggaaaaaggaaaatcgtcgttgaaggagaatataggaagtggaccatctatggaagactcatctaaaaatgtggaccatatcctagaaggcccaattgctcacggcccagaaagtaaaaaggccccattagataaaagccaagtctaccaaggcctctttggctcacaagcccatccacttaagtggccctcaaaagagtgttggaacctagcttttgatcaacttttgggggcaacaacaatcgacaagtaccaccgtgaccaaactctattcaatccaattctcgacatcgaagactttagatgttatgaagctgaacatggccctaggaaacgcaaagcaatggacggtttctataagttacccgctgaaggtagttgcaattcatttgctacccctctgaagcttaacgaagcaagaagttcttttcagccagtggatgcgaatttaaacaactctcccctagctactgaaagtggattttccctggctcgactgagaagaaggttcaaggccgaaatagaggtagaccgagaaagataggggacactgatccaatcaaagtcaaatctcgaaggagaagaggaagacctctaaaagaggaagcgcccttgtctgtgaaaccggtttgtctaaagaaagaaagaaaaaggagaatttcgaagaaggataggaagcactatagtgatccttggaatgcttcggctgtggagctggcaattgatttagaaaatcattttgtaataattgacaaaaaaacaaatacttctagtagttgtgtgatttcggagatactggagaatgaagacccacaacaaccttccacaactgacgttacaattgccactgagaaaaccacagagcaggttttttgctttggggctatggagacttgccctcaaaagtctccaaatgctcaatgaagattattgcttggaactgccgtgggctcgggaacaaagcggcagttcgtcagttgacggcgttgatccgtcagtccaatcccgaggtgattattatctctgaaactcgactgagcatagagaaatttcacagtttatgtggtaagctacattttattgatggtgttcatgtgcctctgattgggagagcgggtggatttgggctatacttgagaagtggggtgctttgcgaaaatgcttatggtgataagaatttaatcagcattgtcattgagtctgaccctcctggaaacccgtggaacttgctaggggtgtatggtcctccagttttaacctgaaaagaagcttttcggaacaaggttagtgatttaattctcaacaattcaattccaactatgctcattggtgatctcaatggcacgttggtagatcatgagaatcttcattattcaaacagaggaaatggcacgaagtactcttttgaccttcggagaatggtctcaagaacaggtgtaattgatttaggggcacatggagggaagttcacttggttccaaaaaacttcaggaacaggaggtggatgtagtcaaaaaagagctagattggatagagcccttgcttctatgaactggaggatgcttcaccccaatgctattgttagagttcttagtgccgctacctcggaccatcggcctatttttctagacacggagggtggggcaaatgttggaagaccgtagtttaaatatgaacttatgtggggtagagacccgaaatatttttgggtagtcaaatatgcttggaaagatcaacttcaccataatcctatggtgaacttttatcgaaagctgaagaaaacgaaggatcatctgacaaaatggactccattttaaacgaattgggaaacaagtaaaggaggctagaacaaagctcgaagtagtggagaatgcaaataatgtcacctcggaagagcttggtcagaccaaagataatttaaatgaagcacttgctagagaggagattttttggagacaaaaatcaagagtttcgtggtttaagcagggagataggtgtactaaattcttcatggcttccactgtagttagaagaagaaggaatttcattcaagaaatcaagattgctgaggggtcatgggagagagatcaccaaacaattgccaaattatttattgaaaaattccaaagtacctttgtcgacaatagaaagtcatgcttacctgcggcgtttggtcaggaaggtggagtcatttccatggaggagaatgctaaattgaataccatcccttcttttgatgaaattgaggcttgcatgaagttgttggaaattattttacacggatcttagatctactcacaactatgttgattaacaccctaa

SEQ ID NO: 16854 - DNA, 6179 bp, Cannabis sativa
gctatgttgtttttaacaaaaaaaaaaaaaagactatacatttattttttaaatgtgtagatatatttttaagttggtgtacaagtgttatgcagttgtttttacatttatttgatagattatttgtgtatttttttcttggatttgatgtaatttatgaagttattttcatgcctatttaacttgcatatacatgaatatatatatacatgtttattttttttttatactgtgttttttacttttttagaattattttcatgcctatgtaatttgcatattgtagtggagtttatgcagttatttttttgttgttatttagttgtttaactaagagaaataaatatatatattttttatttgtgcgttgtttttattttattttttaagttgacgtaagtgttgatgctcaattaatttttatattaaaataaaattgttatcgtgttgtttattcgttgctattgagttatttcagtattgtattttttgaagtttttcttataaatttatttttatttgcataatatatgataaactttaattgatttatatgttacaattaagttgttttctagttgtttttgtgttgttgtttagttgttttgcgctgagaaaagaagccctatacgttaaaattcactttgtccgaattcgccacgtggcaaccactgctacgttctgatgctacagattgtgagcgtcaggcaagtctgaatgctttgtcccgcactcgcgtgtgagtctcaatcttgcccacatagccacatgtgtgccacacatttccttgcgcatctaggagagtttttctactgcatttttgtaaataaaaaactttgaaaatagtatatttgaaattaataaacaatataaatgtttatttttagttatgatagtataaatatttatttatggtaattttaacccaaaatgaaaaaaatctcaaaaaaaataaaaataaactatacctttaatttttatatttatgaaaatttcccgtataaaaagggaagatttttttttttttttaaattagtaggtaagtaataggatgtatatgtattaggaggtctacctagtacctaccctttcttacctatatctcgtcgtcgtcctattacctagtatttttttttcctttgagaagaatggcattcaaatcactggactctgttacctcctctgatatcgcagctttaggaatcgacccccaacttgctcactcactccatggaagactcgccgagatcgtctctaatcacggctctgccactccccacacgtggcgctgtatctccagccatcttctctcccctgatctccctttctctctccaccagatgctctactatggctgctataaggactttggacccgacccgcctgcttggatacccgacgcgtactctctctctctctctctctctctctcttggttgccttgtgaattttgataggaaagtggttactcactaatcaatcatgcatataatatagctgtaaaaacgattcttatgaatacaatatttcgaaagtcattaaaattattttgttattttccagtcttcaaaatcatattaaggatgtttgatggggtttcttaagtagaaaggtcaatttgataaactttaattggcatgcatgtttatatattttatgcagagaattatacaacataaaataaaatattacacagaaaagtaatatgtagtattttgtaagtcgaaattacaacaaataatgacaccaaattcgagtaagaagaattggagattgtgatccacacttctaaattctaaatacttgactaaatgttttgaattacacctcataacatttacagcttttcaaacgcactatgctaaatgtcttgcttttgtaagaaactgaagaattccacattccaatctagtaaaagctataatggcacgggcactatatgtgttttttgttttttgatttcaaattcatatgtttctcattcattatagtttactacaaaaccaagtttagcaaaaaaaaaaaagctttgttttcgtctttattttttaattcaggtacatatccaagaaggtgaattactgcatgaattcaattcattacactgaaaatcatcgcgattcctatctttctgtatgatccaaaatatatgtaaacaatttaagaccaaatgcatgtttttatgattagggagaatgcaatttcaaccaatgttggcaaactattggagaagcgggggaaggagtttttgggagtaaagtataaggatcccatttcaaacttctctgatttccaagaattttcagtcacaaaccctgaggtagaagataatataatatgttatattgttttgtcatgaaatttgtgtaatggatttgttgacagttttcattttcacttttggtgcttcatcttcattcattgttaggtttattggagaacagtactcgatgagatgaacatttctttttcaaagcctccagaatgtattttgcgtgagaatttttctagagacgggcaaatatcaaacccaggaggtgaatggcttcctggagcgttcattaatcctgcaaaaaattgcttagatttaaactgcaagagtttggatgatacaatgatattatggcgtgatgaaggaaaagatgatttgcctgtgaacaaaatgacacttaaagaattacgttcggaagtctggtgtgctactttctttctcataagctttatcttgtttgatagcatacacagatgtttatggattatacagttagttggcgtttatgttttctaagaattggaattctctagtagatgtattagttggtcattctttttttctacctttccctagatgaattattataattttataacccttgcataatgtttgccgatggctctagtttgtcatttgttacctcgaatttaagcacatatttttgtttagatgatcccaacttttaatgattgggaaaaggtttgatagataccaattataatttttctaatataactttattcttttctctcttaaagcagctttatttgctttctggatttttacaggatcagcatgttagtagacttcataggttactaaaatgaataatattctcataccgaagtactacatatacttagccagtgaattttttcccctaaacactggttttctaatgaatttttgacgaaagtaatgttatcaaaggtagcatggatatggtagaaagtagaaaacggaagggaaaattttagtttaggaaaggaatctgtcatctagtgagaactgggtgacaaagggatgaaaaagtgaagaatgagatgaaaagtatcttacctttgtttctcctattctagtctagctcctttcatctctcatggtgaatttgtgaatcatatgaaggttataaaatttttagtaaggtgaattgtttttcttcagagcataaaagataaaggctttgaagaaaaacattggtatgtgcacatgcactattgacataaaaataaagtctgtaagtgcttcaccatggattttcttcttgtgaagttagtaatgttagactattagtaagaaatttgagttgttttaaatatctattctcaaaagaaatttattactagatttccactttctgcatttataatgtgaaattgtttggtgatttactttaaggttagttgcttatgcgctcaaagaactggaattggagggagggtctgcaattgccattgatatgccaatgaatgtccattctgtggttatctatctagctattgttctggcaggctatgtggttgtatcaattgctgatagttttgctgctcccgaaatatcaacaagacttaaaatatcaaaagcaaaagccatatttacacaggttgttactttgcaagtcataaacattgtatcttgttgtcttgtattatttgttattataatttggactttatcaaaaaatttccatgttggaaacttgatctggttggaatcattttgtcagtttcagctccttcctactttctttcgcaattagttaagctttggcttgtagttgaaaccgaaggataggttcaatgagaaaaccattgcttagaagttgaattatgatttatgaaaatgagtttaacgtttcagtgcgcttgtccttctatttgattttttctatttagttattttccttcagtagctgtcctttatatttagtcctttttattcctttgtgtccaggatctaattgtccgcggagaaaaaactatacccttgtataggtaaagttctgattattcgttggccacattataaattttttcctatactttttgcttttcttttcctttttccctttgaatatttatctcacaggataggttcaatcatgcagtagaattgtggaagctcagtctccattggcaattgttattcctagtaagggctccagtgttagtgcacaattgcgtcatggtgatgtttcttggcatgactttctaaacagagcaaacaaatttaagtatgttcactgatatatctggctgatgcataattttaattttaattttaattttgcatggcaatggcatagtattctttcccctttatttcagaaagttgaataaaatttggaagcaaaaaaaaaaaaaaaaattattatttcatggtctgcctcaatttctcaaattttattccatttatttaattaatccacctctaaacttagtaggtttgagtgagagttcatgtgtttctcatccatgtgcaaactgttgaataatttaggggtggaagtaattattcatttgaatctacaagagtttgaagtatatattttagatagtgtgagatattttcaacataaaatttaatgctgtggattgttattcttcattaatgttatcaaattaaacggtggttatagtatgcacttatatttataaattgaatattcagcgtgtctattctgttgtcttttctgcctactttagcaggcatattgtcctgtgtgttaaataaaaggagcttttcatttctaataacttcattcgtaaattctattgaaaccttgctactataaattttcttcatattttatacaagtttagatgcagcatgggcagctatgtcctgtctcaatcccaaacttcccccattcgtgttttatgttcatttttagttttagtattaaaatatgaaaactacttattgtatttgatttaatcattttcaactcggcaaatacctggctctcttggaaaatttaaattatcattaaatgtctaactagattttttattttaaactgtcaaacgcacagaaattatgaatttgctgctgtagagcaaccaattgacgcatatactaatatcctcttctcatctggaactacaggtaaatttaaacttgaacctctaccaagttcctccgttcaccaccatagccaacataggttatatctttttctgcagaaaatataatgtcatattgttcatttacctggatattaccaattatttgataatgcattttctttagtagttttgcaatttaagtatagtggcagtgcggaaaagctaatcatcttcggcataaaaatgatgagagggagttttaattaaaaaactttattgtcaggaatctgttgtacatttattcacagtaattagtttacaatattttgatttggttaatcgattgtttaggggaaccaaaggcaattccatggactcaggccactccttttaaagcagctgctgatgcatggtgccacatggacattcagaaaggtgatgttgttgcttggcccactaatctaggttggatgatgggtccttggctggtgtatgcttcgctgttaaatggagcttctattgccctgtataatggatctccgcttggatctggctttgccaagtttgtacaggtaaatgatttatttgtattaaggtagtcaattttctcaattgtttgttgtggttctttctactttctgctgaatatatctcgtatgcacatccaaaatgacaatgttattgtttaatgatgtatgaaacacatgctttataacataatacatatcaggtatattagatatgaaaaaaatgatttttagtgaaatcctttagattgttttgtaaaatagcctttactcagagacaaccaaattttctttgcaaggagcctacat

SEQ ID NO: 16855 - DNA, 1747 bp, Cannabis sativa
ttatatgatcataaaaagtgcagttttaatgtatcagtcaacgaaattatacattacctcagtaaaatttttcattaaactaatgagcatggaactgtactgctcaacagtgtaggtttttttgaggtaagaattagtgtagtagttctgtataaagtcggtagtgccagtggtcagtacataaagagcgtccttcataatggatttagctttactctggccagctacttcagccagctttgattggtattccttgtaatacttcaattgctgggacaaagggattgcgtgctgtagaaaagggtttcggtattgaccaattaagttagataaacagaactagttagttaatgcataaaaatatagcataagaagtgttacattttgagttgcagttttgtcatagtaaccagaaccagctgaagcaaagttggctccaataagaagtgttttccctgatgcttctgggctaagatatgcaggtgcgtaagacttgaaacctaaagtcccagctgcacaatatccaatttaagtttgctcatcaatataacaaaaaaaacacaacgtaccatgcatgcatgcatacaagtctacaacataatctagtatttgttgttgttgggttttaagttaagtaattaatacttaccaacgaagtcagtggctaatttgccattgcaaaatcttccggtaggttggtgatttacgaagtcccttccataaggaggtttgtcagccctgaaaagagtggagagatagttgttgttgcccacatcgactatggagtcaccaaaagtaatgatcgctggaacaatagtgtcctgtgcattcccaatatataaaaataataatccacatacacacattaccaaattcaaaaccatgttagctccttcttcttctttttgtaacactccctgtatgattaagacactattgttatgcaagtttcgtaaaagtgaatttttcacaatacatgcagtaacagctaatactgattgttaaatataagttacaattctgttaaactggtccatatatatatgtatattattcaagtaaaaagtgaacttagagaagcggctaattaaggagggtcggcgggagttgtgtttgatcattgaatgactcttttaatggctttctctagctaccactagctaaaaaagtgtaactaactctcaaacaaattgtatatgatattgtgttaattttttcgtgccttttcgggtgaccattctctctctctttttttttttttttccctcattcatttattactattttgcctaacgataagagttcataaataattcacaatgaataaagattccgacacacccaaattacatacttaatacacacaatctcaacagcataattaagtgatagagttcttatctaaaaatataaatagttaatatttaatagacattattgtttgaaataagtgtgtgcaaatgtgcaatttgaatatgcattatttagcattacacattgacaattaggccacaattacccagtaattatatatattaaatctcaaacacacactaattaattacaatgtgcaattatatctaattctcataaagtatttagaattgaaaagtgaaattaaagcatattaataatttttaattatcccatattaagttaactttttaaacatacctaagggcggcctggagttgaaataagtcataagcaattttttttttgcctcttactataaagataaatagta

SEQ ID NO: 16856 - DNA, 2669 bp, Cannabis sativa
taataagccaataaataaattattaataatataagacttttgtctgaggagagtttgaagtactaaagctgcctctttcttttcaattttcctaatttgctgaaaacaaaattggaagaacatttcaacaaaaaaaagatgaataaaatagttagcttagctcatcaaaaacctaagagtgaatgaaaaagaatcagtgcctactgcctatccaatttagtcccaagtcttttactcttgcgaggaatcatcattctatatgcataaacatgtttaaaggtatgtatttctccaaattagagagcaaaaatacattatttattactttataaatctctttggactgagggtgtgaatcatccccagccaaaaattcatggaattctccctctatttctatcaagctacgacctggactcttcttgacacccacctctctcatcatgctcctaaccatcctcacatcaacccattttttgttattagctaaagtattagccagcaatacatagataccactgtcttggggatccatttctaaaagcttctgagctgaaagcttagccagctcaacatttccatgcatcctacaagcattaagaagagcaccccaagctgattcacttggtaacattggcatatttctgatcaaatgataagcttggtccaacagtccaattcgaccaagtaaatctatcaggcaagcataatgctcttctctgggctctaatttataatcccttaacatgcttttgaagtgctctctaccttcagagactaatccaccatggctacaggctgacaagacagctacgaaagtgattgagtcgggttcgaatcctgcatttttcatttgctcaaagaggataagagcttgcttggcataaccatgtgaagcatatcctgcaatcatagtattccaagaaaccaaatttctaagtggcatttcattaaagagacttgcagctgtataaatactcccacttttggcatacatgtctataagtgcattacttaatatgacactttgctgaacccctttagggttgatgcaacaacggtgaatccactggcccaaatccaggcaacccaattggccacaagcagagagaacacacactaaagtattctctattggaaacaaacctgctttcatcatgtcttgaaacaatatcagagcttcctttggttgattattttgagaataacctgcaatcattgctgtccaggatatcacattcttttccggcatgcagttgaagaagcttcttgcagaatctaaatctccccatttagcatacccattaaccatgctagtccacgaaaacacatccttggttttcatattatcaaaaatcttctttgcttctatcaagagaccaaatttcacaaacatatccaacgttgcattgagcaaattaaggctgcaatttacgttctgcatcgtaatataatcatagatatgctttcccataagaatatcccctttactaatgcaaacagagagcattgcaatcatagtaacctcattcggtttaacattacttaacagcattgactcaaatacctgcttagcctcatccaggcaatcatgggctgcgtacccatcaatcatcgtagtccaagtaacgacatccctcacagagctttcatcaaacactttgcgagcatctattaaacaaccacgatcggcataataatgtataagtccatttcgtaccagcaaatccatatcaaaacccatcttccaaatcttacagtggaccaagtttccctctgaaattcccggaaaattcccacacgccttaagcacccaaacaaagctaagcccgtccatctcgatgccttccctgaccatctgcccgaagaacgaaaaccccatttcaggaaattgagctttcaaatagcctctaatcattgtattccacatataagtattgggtttctcaatctgggtaaagaaagcgtgcgcgtagcgaatgtcgcctgaatcagcgagagcacagaaagccaatacccggctagccggaaaagtgtcggtaatgagaccagtgagagtcatttgagcttgaatttgcttcatctggagcatggtggagcaagactccatgagtaataaagttgggttggtaatgatgagagtggtctttggtttccatttacgttgatatgtggaggttgaggaagtgagagagcgggaaagaggttgatatcctatgggtaatgacagtggtagtagagttggatgacatttcataaggcgtttcatgagaagaaggtgaagacgggtacattacatacatactcaaagaaggcctgttgagcttgaagctcgctcgttcgttggtttagctcaccaaagctcaaacagacagttcagagagagagagagagagtactcctttcctttggtccaaacatggatctcaaaatctcttcctgtgcttttttcataatataaacaatctttcaaaaaaaaaaaaaaaaaaactatgtctcactagtttgtgtgatttatattgcacctaatagctatcaaaccatagttatactataaaattttgataattagataaatatgttactttgattaaattttttaaaaatttaactttgtggttatcccatattacttatatattactcgtgtgagtgatttataatattta

SEQ ID NO: 16857 - DNA, 4532 bp, Cannabis sativa
tatacagatgtgttttttccactcctttagttactgttgttttgttttggttttggttatatactcttaaagtttattatattgtgtaattaaagtaaaagtaactaaactaacctttttttgttcttctaactcttcatagttttatgcttgaaacttcatatgaattggacactttgggttaatttgaatttcagatttctaccatttgaatatgttgtaaactgtgtagttctttatacccttgtgctgtggatgcctattcattggaaatggatgcacctgttaaaattgtgtttagtaatgtagacaacttttttttaactttttcattgggtatattctgttaaaatacaagaatttgttaaaaacacaagaaggttaggttagatagacatttatttaataggttaaatactatttgatttatttcttcttgttatttaagcttttgagtgtttattttgcttctgttgtatatctaatcttctttctctttcatcaattaaagtttgtgagaaccattttccaccttttctcttacagcatttgggcatgtgtttctgttttcagggatggaaagtggtttccccacaaatggcactatgtctatattgtgtggtcaagggacatgcttgctttccaagacattaacgagacagatgtcttttaaactaaaatcagaagctatgaagtttgacctttgccatggtcttgtttcgcatcagccttttcaggtatgtaaggaaagaagatcagaattttatctttgaggaatcttgtacattattgtgtttgtgtttgtaaccacggttttcctccgccataagtgagggttctcctctcaatatacttgggaggaggtcactcatggacatgtggcctctgtctctttttcaaaagtatgctttctctctaatcttttgtccaaaaaaacaaagaaaactttaggaagccccaagtgaacaaggataatgtctcagcataaatatatttatgaactgaaatgggatttaatgaatatgattttcctgctttgaactgaaaaaaaccttccattctgtaaagcctatgatacctttataccataacaaacaaccaaaagagataaaggttttgtttgtctgtgatcacattttaccagtgttgtcatactgtcacccttaccaatgtcaggaattataatgtttttagttatttaagtatgatttttgctttttgattactaggaaaatgtagaaagcctggctgggagagtgaaagctctaatatggtattatgaagtgtaaactcacaaaagcttgctgattcagacttgaatggtcaacttatctaaaagcatatttggggtgcaagtcataccctcacaaaccaaccaacccagtttttgtcttagtcctggctcagactttttctttaaaaaaacaactctcaagtggaacttgtgagtagtgtttcatttttacccaactagttctgtaaatattttctcattgatggaattgaccacttccaatttcatgcaggttttgacttgtaaggaactctatgttgggggctcttcacataaaaggtgcactttaagctattcaaaatgctgtaagtgaaggcatccttattatgcaatttaagcattgtttttttttttcagctccatgtgctactgctctgttctgttgatatttttgcttttgtcacttcagaacacaatttattataaaattttaagttgcttgtctactataaaccaaaacattaacatacagcatattaaagattgtgtgaaattataatttcatttgccgaaaacaatgacccttggttgtttgtttcttttgatagtagcatgtttaatgtgccaacctgtttcatttctcatcatagctgtgatgattgctctggctgcaaatcagttgaattaccaatgattaatactatttgagttgcagacacaactaaaaaaagttacattttatgctactcgtcagcaaatcccccattttgttcttttggtggcttccttaggaggctataaaaagtaattctaatgtgttctttactaatagcttgaaaccatattgttacttctgtactgcataatcataccaaagtgtcattgtgattttttatttccctttagtagtaaattatactatattgctgtgtggttagggatgtagtttgctctcacaaggtctggtgttcaagttcttgttacatttttactacttctcaaatattgtagggatatgaggaagcttagtttaagaaaatactgtaatgtagttaaatagtttgatttaatacaattatctgtgttgctcctcttaacaattttgtacttatcaatactattattattctccatttcttatacagccgctcacaatagatatcattccattccaaggaagcatgacattgtatcatggtgttattctgataaacaggagaaacctaacataccactttttgatgtgacaatgaaaaaacaagataagatccccaggcatgtaattatgagatctgaacttaccggcacgggcattcctgaggctgcttccccattaacaggtttttttctgataactttgttttggcgcaatttcctgataagaacctgctgccaatttctcaagcagtagcaaaataataacaagaaccaataaaacagtagcaaaattaggaattgtatattgaatgtatgagatagttacaattgatgggagcacttaggctcctttgatgcaaagagtgactactcataccttgcatatcattctattctccactcaataacattcataatacgatgacagttatacccttccctactaactacggtgtctatcatttcctttttacaatctgtagttccaattctcatatgttttcttactaatattttcgtaaaatgcagatataagtttgcgctccaaagttcgagggatttgcttctatgctgttacttctgtagtcgcaattttcctatttgtggtgatgctggtggagcatccttttgtactcttgctggatcgataccgaagaaaagctcattattttattgctaaaatgtgggcaagttcaacagtcagtccattttttaagattgaagttgagggattggagaatttgccttcgccggatactccagctgtttacgtctcaaaccatcagagctttctagacatatatactcttctcactcttggtagaacctttaagtttatcagcaagactagcatatttctctttccaattattggatgggccatgtttttgttgggtgtgattcctctaaagcgcatggacagcaaaagtcagttggtatttctttcccttttaatcctaattgatgatgtagtaaaagtgtgaaaatcatttgttctttaaaccgatatttagagtttcttcgaactgagtgcttttcttttttacatgtaggactgtttcaagcgctgcattgatcttgtaaagaagggggcctctgtatttttcttccccgagggaacacggagtaaggatggaaagttaggtgcttttaaggttagattatctctgctggttgtggttgttcgaaatttagaaacattcaagatatacttcttttgatgatctgtgaaatacatttagctgttatgagtcactgattattttcagagcaagatatacttctttgcacataactttatagaagaggataaaatggtttagagattcttgccattttttctgaatttattttcttccatttatgttgaaaatgcagaaaggcgcattcagcattgcagcgaaaaccaaagtgccagtagtgcctattacccttatcggaactggtaaactcatgcctccgggaatggagggtattttgaatactggatcagttaaagtcattattcataagtccatagaaggaagtgatccacaagtactgtgcaatgaaagtagaaacatgattgcaaatggccttctcagtcatcttgcctgacatagtcactcactcacactttttgtttggtctgcatgacttgatgctaacctcaaggtgagaatctgaagttagttcctaatggaatattttcgtcttggtgtctgtggccggtatggtcaattttggttttgtaagattagtacagttcgttttgtttttgtatggttaatttagtttgaattgtattagttttgatagtgtaacaatattgtgattatgttcataatgagaaaatttgcggctgaacatcgtatgtttcaattgttatacacttgacttattttttttttgtggctaaaccccttcgatgtatttcacattgacaaatgaactttgttgaatcttcaagaatatgaacttttttcgatctgcttgaagtgtgtttgcttcatcccgaaataatacttgaactattttctcccctaggcttgcactttgttcttctcctttgtagaattgtttgaagattaaagacaattacaaaatgattaaaacatcagaggtatagctgaacattctaacctaaaaaaaaaaaaaaaaa

SEQ ID NO: 16858 - DNA, 6334 bp, Cannabis sativa
taatgcatgttccatagatacttgagaatgttttggtgatatcctagattcctaaggcaaacggaaaaggaacggaatggataggaactcgtttcattccttttctatgtttttgcaagaaactaaaatatttgaataacattctaatgaaagtttttccactattttggtggaacaactatttcaatcaaaattaaatggaaaaattattcctatgcataattaacaaaaatggaaaagattcctagggccccatttgattggggaaaaggaatgaaatgggttgaaaatccgtttcattccttttctacatttagctagaaattaaaatatttgaataacgctccaataaaatggttttcccaccattttggtggaacggaaatttcacaaaaaaataagtggaagtcattccaacgcatgattaagaataatggaaaagattcttatggcgccattttgttgggaagaaggaacggtttcattccttttctatgtttggcaagaaactaaaatatttgaataacattctaataaattttttccgctgttttggtagaaccactattttgctaaaaaataaatggaaaaagtcatttcaatgcataattgacaaaatggaaaagattcctagtgagctgcttgatggggaaaaaggaaaggaatgcatagaaaaccccgtttcattccttttctatgtttggctagaaactaaaatatttgaataacgttccaataaaatgattttcccatcattttagtggaatggcgattccactaaaaaaataagtggaagtcatttgaatgcataattaaaaaaaatggaaaagattcttttggcaccatttggttgggaagaagtaatggaatggataggaaaccggtttcattccttttctatgtttggttagaaactaaaatatttgaataatgttccaataaaatggtttttaatagtgaaacggctaagtcattcctacgcataattaagaaaatggaaaagattcctatgatgccgttttgttggagaagaggaatggaatggataggaaatctgtttcattacttttctatgtttgcttagaaattgaactatttgaataacatttcgctaaaatggtatttctacgatttttgtggaacggctatttcactcaaaaataaatggaagtcattcatcgcattagtaacaaaacttattaattttttttactcatgtcaactttttattttagtcccaaccgaacaagcgcactgaattgattcatgaaattgtaggtgactaaaaagactaaagaagctgcaggtgaattttctgagaaggcccaagatactgcagataaagcaaagaggacaacagaacaagtatgggattcaaccaaggatgcagcccaaaaagccaaagagacagttatgaacagaactgaggtgtctaaggaatatgtcaaagaaaatgcagagaaagtgaagaagagcatgaacactaaggaatgattttcgtaatatttatattaatttaagtttctttcagattattcagcattggcttttttcatttttgcccattgtatttgttcaagtgaatactgttatcttttcatctgtcagattttgtggaagcaaatcatttttgagtgtcaataaaaaaaatccttttgatttcactatccaaagtaccactttagcagaaaacttttaatgtatgtagttgactaaggcttgtctttcttaagtgaatcattgaccaatataaaagtactctcaaccattggcctatgtttttttaaggatattcttgaaaagaaaatgtaggcaaaaccaggtactaacagcaaaaaccagatttagtctctactttgttttttattaaaggaaaggaaaaaaaaatagttgttaagaggtgtttttggcaaggtggggtttcttagcttcacagaaaatgtgtaactcagaaaagcataaagtttctgatttttgaaaccttcacatatagaaatgtttctggtattacctaatttatcagaaactcatgtatgcaagttcatttcacacccttgaaaccttttaaaaaacttttcccattatgtcaaatgaccaaatcacatatttgatatttttggtctacaataggaaaaaaaaaaatccaagcagaatccatcttttaagttgttaaggaaggtcaatttgtcctttttgaaaatccatagacaagtggtttcaagaaatggagtagatagttatatatatatagccacacctgagttcttaacacacttgtaaccataagttttcttttctgtttcttttggtggaaagtaagtacacattactgttacttgattctgcaagattacccttttttttatattgatttctaagtactaaaattcttaaatctatttccatgttaaactaaatttcggcgtagttagttgcggcgacattcttggatagtcaatgtacttgagatctttgtcaatccctccgggtttcgttgacaatacttatacgtagaatgatattaaaagagaattagtagtaaactctcttctgttattcctttggtttttcttgtaccttgacagaggttaaactagtactaatcattcttttctttattttatacatgcccttatgatatttatcattttctggcttatttgtcttcaatctttgactagcttttgtttttagaatcagagttgcttttgcttggttttgtcaactgctaatgaaaactgcatatgatttcttgcttttacaaatctttcaataacatattgtgaaatgctaacttcttagattattttcagatgtaaccttcatatggcagcatatattatctttttttttttttttttgcattcgttgaataattgtcattttctttttattcgatatgaaaaacaatctgcactttgttgcataattgtcatctattcaggaatcttgaatcttgaaacaatgtcttccgtgtcaatgtcatccgaagaaactgaccattctcaagagaggaatcttgatgagagctcaacacaggtaaattttacactttctcatcatgtgtgttaataccaattgcttaaacaaatggaaatacaagcatatgtaatttgcaggaaccaagtggagggatgtctttttcttcctcggatgaaattaatgaatatcagcaaaatacagtgacttttgatcaggttgtgactggagctcaatcattttatcctcaagggtatgttgttaatttctgcagctgattcttagagtaagagacaaaatattgagggaaaaaaactgtctactttcatattgatttgcaagcatttttttggtatttcaagattcttgatttgaaaattagtacaattgattttatttaatcttcttaatcttgtgatttttatagacaccaaggtgaatttggaaattatgctgcaaacacaccaatgttaagccctccacaagcagatatttcactcctttctgcatctgctacatcagtacagttccctttatctgcatcatgttttttatctttgaatttcttagatttttctattcttatttgaaaatatagaacaaagattaatccctttgaaacattaataattaggtggagtcatctcagcaagatctgcaattttcctcactcaatcctgttcaagacatgggtttcaaccagagaaatcgttcaagtgctcctccagcaaataacatgaacactcaaaaccaactgattgatccttcagacatccctgaacacttgaatctgtatgtattatgtctttctctataaatgacttgactaccatggccccatttctgttgcattgtttttccatatgctcattagtcagtaatgaacacttgcagatatacagcagattttcttttccattttcctttatgattcttgtcattgtagattagtttcagtacacatactaataagtcgattatgttgaaatcttccaactcatgacacataataaggtctcaaacaatggagttgatgaatcaaggtggtgtgccctccatgaatcaaccaatgagaagtttggggagctcatcttcttttgggatcatgaacaattatcatcttcccatatcgaacttgccagcagaatttcgcttggaatcatcctcaaggcttcaactcccccagggccagcaacaagacttgcaagtatgtcaactgtggaagtcttaactgaaaacttgggaacgttaatgtttaccttgatctttcaatagcatttttttcacattttattgatatagggttgttttactcctttccttttgctcccacagaccacaccagaaatcggggatgatggaattcctttcatgagcaagaaatggactaattggcatgtccagaaccagaataccatgcatgagtctccaactggaaccaggtacattttgttcgttattcgacacgtttggaaagtggaactggattagatagaatagtatttagattggattcagaaaaattattaatatatatatttttaaattggtaattatattaaaatgattcaacatatcacatatcaaaactaaggataaagagtaatataaatgtgttatcatttgcctgacaataaattgcatataagttttaaaatccttttctcatttttcagttaataattattaccaaatttataattttggaatttgacataaatgtagtccttaaataattaagaagtaaagatttatttttagcacaactcatatactacatttacctatacataagcatagcctagtggtactttcctcacaaataagaggtcccaagttaaacttctccagggtagtggattaatgtttttggtatactgtttttacatgaccaaatcacatggtaaaaattatccaatacgaacaatccaatcctatcttactttccaaactgtgtagttttcaattatactggtttacaaatattgaaattttggcaggacacaagaaattcaagtccagggaatgatggaccaggttgatggacaaggaacattttatcagggcataaacacttcaaatcatcatgtccaagttcccaacatgccaattcaacaggtataaaatacacatttttcattagtgatattttccaagtttcttctgttgttatggtttctctgatcagttcttttacagggaatgaatccctttggaacaggaccaactcttcctattcatcctgaaggcttttcagctagtaatcagaatagggtatgcactatgtgtaaaagttttttttttttcaactaagcacaagccttatttttatctgtactataagaatttgtcattttttttttctgattatatagcagattaattatcacttaacaacaactaaccaaaataaaactcttgttttccattgaaaaagatgcagggaaattttgtgaattccggccagtatgaagcaggagagtcatcacggaggtcttccaaggtggtttttccatacctatattcttaactactactaatcttttagagtaatttatgaaaatagatctttctaatgtcactttacaaaatgacctcttcataattcgttgcaaagtagtctttcattaagaatctcgtgtcgagcgtgtaaagaatgttactttccatagaattattagaaaaaagtttttatgcaaaactattttgccaatcactttaatctttcatagctgcatataatagacatttctacctcttcatcgtactagaaaatacaactagatttcactggtgaggtttgattgaatgtacagatgaaaatgacttggcaagaaaacagcaacttctcacaatcttccagtcatcaacagcctacttgggtttctccatctcaaggttctctaagccagaacaatatctcagctgctcagaacccaaggtacacacgtcatttaacttctctctaaggattcccattattcaaaagagtttattttatcatgagaatttgacatcaaaatcttccatcagggccaacactctcaggagtacagtttatgatccaatatatgaacaaatgggtttaccaattgatcctcatttgcgcatgtttatgttaaggcatggaactggtaatactttcttctctgctcaaacatttttcaagttaactgtaaaatccagccaataatgcattggaagagtacctaatatttcttcatggtggcaggtaataatagtggaggtcatccccggagtttctaatcgttggagctgtctttcttctcacaataatgttagatgcagctttgcagatctaaccctttacaaattttacaaaaaatcctttatt

SEQ ID NO: 16859 - DNA, 9437 bp, Cannabis sativa
  modified_base (620)..(623): a, c, t, g, unknown or other
catggtttctcgtcgatacataagctagtagttcgtacgtttctgtctcgcagaagactgttcagccaaccgagttataaacatactctacaaattgtgtttctaacgagttattctacgccaagtatacttacgattgcgtgtattagttctttgttcttcccagctcgacacgtgtcttcctttgatgtgctcaccgaattttgggtataacaagaaaaatggcaaaaatttaactagtgatggacccacatagagttggccactaccaccgatttttgctattattttatcattttttattccaaataattcaatcctaaccctaagtgaattactataataagaaaagaatggtctcataatccaacaaatcactcttgagctagttttcttcttgtcaaagaactatagagttttagacttcttcttcttcttttctctcttctaattcaaattctatagtcttcttcacaaaacaaattcaagctttagtgattgagtgcatgccgacccaaagcaagttagtcctcaatcatagtgtgtaagcctgtgaagaatccaaacaactgaaggagtgtcgggctcagatcttggtgatactttgctacagaaaggannnnagggttagagatctgagcgaaaggagtcatttaattccgctggaaccaatgtaaggtttctcatatttaggacgttaaaacatacttgttagtaaatctaggtcctggtaaaataaatccaacaccgatttcactaagctcactgctatgtgggatgagattaaccggttgaggtcttgcataccttgtacatgtgctgctgctgcccaaaacaatgatcatcaaaatcatgaccaggttcttcaattactcaaaggcttaaatgattcctatcatgctattcgtgaccaaatctttcttttcaatccatgtcctccagtcagcaaagttttctttatggtcatcaactaagaacgacaaagaaccttgggaaatcaaaccattcccccaattgctgtagcaaccaatactcctttcgtgcctcaagattcaactcatgcagctaatgcaatctcaagaaacaaaatgcctcatccccattataccaattgtcaaaaatcaagccattacagagacaaacgcaatcttcaaattggttttcccctggttatggtactctaaagtctaatgaaactcatactgtcaatactcgcataccagagtctggttcacagaacacaaatctcccacatgcatcacaaatttccagcaccatgcttgatccaaccaattcacaactcactccagctcagtgacaacaactaatttccatgttgacacaataattgcagccttctctagatgcatccacatctaatgacaatgttgttgtgaacaatctttcaggtattactaaccctatttcatggattgtagatagtgatgcaactcatcatgtctattgccatcttcatagtttttcttcaattaattccaatgccaaagctaactctatcacatcacctaatggtactaaagtcaaaattgaaaaaaattggtattatcatccttaattcccacattattgtcaccaatgttttgtctgtaccaaattttaaattcaatcttttatttgttaatgcacttctcaaacacaataaaaatttcatatgttttactgttaacaattattacatccaggacctttctcacacattgtggattaggatagctaaacccttaggaaatctttactatctggaacaacaaatccttcccaaagttggttgcactatacatacttgtaatgttcaattagataaactctaatggcataatcgtcctggaaatccatttgtaacagttactaataaaatcaataaataattataagtttctaaaatatctactccttttaattgtcctacttgtcagattgaaaaaaaaaagaatacttttcattcaaataataatatctcacttgcaatatttgatcttgcacacatggatatttggggatcatattctattccttctgttgaaggctatatgtaattttttaactatactggatgaccattcatgacacacttggttgtaccttctaagagttaaatcagatactccttagcaatatagaattttttacactttcatatataatcaatataatataaacataaaatcagtccaaacatatagtactaaagaattgaatctcactactttttatgcaacaaaaggggatctacattacaattcttgtgttggtagaccacagctgaatgttgtggttgaaaggaaacatcaacatatccataatgtggcttgggctcttgcatttcaatacaatttaccattatcttactggagctacatggtaacaactgcattgaatcttttaaacatgactccttctgtcctatcgcaagctaaaatttcttatgagttcctacatcaaaagtcaccctcttacactcatctttgcaactttggttgtcttgcatatgcttcttttgtgacgaccacaaccaaattctctcctcatgccaaaccatgtgtcttcattggctatccatacaatatgaaagcttacacccttctggatatccaaaccaacgacatctttcattcacaagatgttgtcttttatgaagacacatacctttttgcacacatatctcaccatcaaacattgataagtttttcacccctgttccactcattctccgactgtaattcttgagacacatcactctcagaacaccatccctgagaacaaataatctcatcacaatattcctgagataaatccatctcaaaacagtaatcccaagtctaaaataagaagaaaatatagcactaccagatcaggtcgtgcacaccaaaacccctttatctcaatgattacaattgtgatttgattctcaaaaactctagtacagatgatccacttgcaagtgttctatcctatcatatgttctcaccacaattcaaagctgctattcttgctctaaatattatttctgaactaacatccttcaaacaagcctccaaacacaatgtttggaacaatgctatgtgtaagcacaatgttttctatatggaaaattatgtggttgtttaactatttagggttttgtttttccttgtggctgtcttggtcctttgaattgaccatctaaattagtcttagttgcatctgcttagtctttattatattattgtttgctatgatagctttttagcttttatatcttttattccaagtgtaagtcggtgctagctggcttgagctgttgaagttagttagctgagttggttgtcctacaacttggtatataatgtgctcatgccgctttttctaactaactctcatcttcggtagaattattttatgattcttgttctgctagggcaaaatatttcttctatgtgtatttgttttttagagatggcgattcagtgaatcttcaagaggctgaagaaggaattcaaatctgcaatgtctggagagagtttaaactaaattgttgaaggaatttcagcttggtggaagcaaggagagcttgtcttcttggatctaagtgtgcttatgttgtcttgattgtgttcaagaattaggtaacatcgtgtaaattcatttcagattacatagtttgagttgtaaaatcagaactgatgtatgtaattgaattgattttatagtgaatgttactttaccccattcttggggacccaagcactactcagttggaatgtgtttccaatgaacatgaagcttgtaaatctggtgttcattgatttagctttctagtctaaattcttcaagatatccatttaagttaaattacatagctttcagaaatattagaacattcactacagatatgtaaataaatgcccttaaaaaaattacagatggattgttgtacccctgcaacaaaatcaacatgtcattggcaacaaatgggtctacaagataaaatacaatcctgatggctttgtagcatattttaaagcatgtttggtagccaaaggatacacttaacaaccctccattgactactttgacacatatgctcctgtagcaaaatttagtactataaaacttttctttgctcttgctgccatcaacaattgaaatttacaccacatggacatcaacaatacattcatacatggggatttacacacagatatttacattaaacttctccaaggttacacttcgtaagaggatgtaccataaaatgctgtctggaagttgcaaaaaaaacttgtatggtctcaaacaacttcaagacaatagtatgtcaaatgaatctccacactattacaacaacactttatacaatctaaaaatgatcatccattattcatttcacaccaatcaggtgttttcctcgcccttctcatttatgtcgatgacacaatagtagccactactaatgtctctacattacaaagtttaatttcaacacttgatgcacgtttaaaactaaaagaccttggcacccttcaatttttccttggtctccaaatagttcgatgtcctaaaggcatctcagtatcacaaagactcttcacttttcaacttttccaagactctgattacctttgttccaaaccattatccactcctatggaaccaaatattaaactcaacaattattcaagagaatttctttaaaatcaaactcaatatagtagtatcattggcaaacttctctacctcacaataacacgatctgacataagttttactgtgaataaattaagccagttccttcaatctctgccaaccacatctggctcctgcaaccaaaattctccaaaactggaaaaattcaccaagacaaggtctcttcttccatgcttcttcaccaataactcttcaacttcaagcttttacagatactgattggggagcttatcttgacaccagacgatcaatctcaggttactgtgttttcataggccgctcacttatctcgtagaaattaaagaaacaataaattgtcttaaggacatcagtcgaaacggaatatcgggctatagcacatgctacctaactcacttggctcacttctatccttagagacttcaccatcaacatcaagctacatttgatactattctgcgaaaacaatacaaccattcacatcttagaaaatgtggtttatcgtgaaaggacaaagcacgtcaagatcgattgtcatattgtttgagagaaaataatcaatcgtactctcaagatgaaccacgttccttcaaaagtcaacgtccttgtagacatcctaataaagccattattccctgatcctttcaaagaaatattgttcaagatgggtgtcacagatttctatactccatcttgaggagacctattaagattagctaagtgtcatttaatttttctattttttcaattttagttttagttggctttattattcaatctcttagtgtatacatttagaggacccttcattgtaccattttacaattaattcagtatattttttttactctctgagtttctaataaaaggcagtgcccatgcacttgcaaattgatattttttcaagaatgtaatgggtttgttaattcctaggaggtgaattcaccactatctttttaaattaatgaaagtttttggaggtttttcaagcaaaaaaaaaaaaaaaaagaaaaaacttgagaaagaaaaaacttgagaaggtttgtacatcataaaagagaaatgctgaaaggtatcagtagtgcttaatactctcttatgtatcgctattcgtacaattaagtatcgggtcccatataatttagtgtaatagtttttagagactattgttaaccaattgtaaggtgacacatctagaaggtactaaacagcatcggtgccgaataacaatgctcatcttatctatttcgtaaaaagatttctacattaataaaattgtttctttcccttgaaaaaaatacaacgttttctttgtcaacataacgaagacactcataagataagtagtagagctatggaacatatttctttttcttctttttctaaaagagctttggacttcaagtaagtgtaattttctttttctcctttcttttccataatgtttttttttttggttaatagtaaactttattgaattgccaaaatgcccttattgtcttgttctactcaaagcaggttggctctatagaaaggccaacctgtcatgacatggttggcgcaaaaaaatagcacattacatattatatatatttaatattttcttaaatatctccttataattaacagtactactgatctaaataatttaaaaataataagaaataatcatttcaaccatgtaaaataaaaaattgtaaaagaaatgaagaaagaaagaaaatttagtttgaaattgaccattcccttgtctaatcaccccctgaaatgtcaaccacatcattctggtgacttctttcttttcttttcctttcctactcccccaaacagtttaacattcacttcagccatatatatacatataaatacccaaccgagatgcagcgaaccgctttcatcattttatgaaagcccaccccccaaaaaaaaagagaaaaaaaagacaaacgacatagctaacaagtccagcagagtttgaagaaagaccctaattcaaacatattctatagttattatacaaagaagtgcagttttgtgaaacctttatacataaagtaattgcagtaaggagagctagccatggcagatgaattccagacgagtgggaactggtgggattcatcaagaacagctacgtcttcttcagctatgaatagcttaggaagctttggtaattggtcctcaacaacctcatcaacggacatggttgatataaagtcaagatcttctttggattctggtacagcttcttccatgattttccatgacaccctcaagctccaacaagcccaagattcttcttcccccgccggagcttccgctggaggaacgggagaccacaacttacagatgatgatgggtttaggtctttcctcccaagctatggattggaaccaagctgccttattgtgagtaattctgtgcgatttcgattgttatatcgatatataactgttatttatttatttatttacttttatagcagaggggaaaataaagctgcttcggaaggtagtagctttcgttcaatattattagaagaaaacggcggcagtggaaataactttcaacaagagataactagtagtagtagtggaggagggcaacttcaatggagtagacaagatccaaaactattgttatttcccggtgattcaacatcaaacgacacgacatttaaacaaatgaaccgtgctattactacacctggtttctctctagatcaccaccaccatcctcatcatcatgagttcagccctcagtatagctccggggacggcagcactgtcacgtgccaaggtggtggcggtggtttggctaataacaataacaatcataattcaagttatcaggtggattcggctgccttgtacggaagcccctcggccatactactgcaaggactctttggccctgataataatctaacaagttcctctaacatgccttttaatagtaataattcacctcccaactacggggtgatggtgagtaatacagcgactacagctacagcttccaataatgaagtattggctcctatgaactctagtaattggtcaagcaatagtacaaataacaaacttcctcagtttcttcgagcttcatcaccgaagcagcagcactcacccacggcggccgccaattacagccatttacagttctcaaacaacgggccgttttggagtgctcctccggaggctgcccccgccaccattaaggacgttaggtctaatttcttctccacattggccacccaaccacagtttccgaccacaactttcgatgaaaaacctaaggttgttgttgttgttgttattattattgtttaatcatgatgccgtgttaaatttgcttagtaattaatttaattttaaatgaaacaaaggtttttttttttttttttgttataattggtttgtagtagcatatataaatataaatatatatttattatttatatgatatttttgagcagaatatatccgatgttagggatcatcatcagtcgggtggagtggtggcaaagaaaagtgggaatgaagccgcatcgaataaaagggcacgaaacgatcaaactcaatcgccattgccagcttttaaggtacactactattgattcaaaaagcaatgacataatgcacttgaatttgaattcgaatactaaatttagacaaactgtatgttttgtattttcgtataaattaatcttttcagtgaaaggtgaacctgcaccttgttttagttattaattaagtatatatgcatagaagagattattaattaggttatgtgttaattaattttttgtattacatatgtacatctatacatgtatatatataggtgaggaaagagaaaatgggggacagaatcactgcactccaacaattggtttcacctttcggaaaggtaaattaagctttaaaatattacacgatattgttctctcttgatttcatgaattaaatcattaataaaaggaaaactgaagataataattactttctgcactgcacatgtaagtattttttatagatcgattttcttattatgttctattgtttgtatttcagactgatactgcttcagtgctctctgaggccatagagtacatcaaatttctccatgaacaagttagtgtaagttccatatagattaatttaaataaactaataaatacttaatatgtttacttaaatattctaataatgtgtttcttccctcataaaatataataggttttaagcaacccatacatgaaaagtggagctgccatacagcaacagcaggtacattaataatcttataattgtaaaataattaaataattatttatagaatcaataggatttatttcctcaactagactcttgtagagttttgttctctgaatttttctcggttacgaaaatttttctgaactataaaaattgttgcaaaaatttctcatttatttaaataatttttttatatagtactaacatattaatctaacttagttcaagaattcagacagaaaataaatacataaatagttgtttaatgataaattatgaaagtctgtatatgcatttttagaatgtttaatgtgaataaactaaatttgaagcagcttaaaattattaattattaattgtaactgaaaaggaatatttgcgacgatctacttagtttgagctgattttttcaacagagaaaaattgagaagacaaaccttcacaaaagtcttagttcaggagaaaagatcc

SEQ ID NO: 16860 - DNA, 4574 bp, Cannabis sativa
caaaacttttcatatgaaagaaagacagaaaaagtgacaattagagattgtgtataagtttttgaattgaggatatgtctgccacctgaacccttctagcttaaaaaaaatgaaagaaagaataggcaagttaaggtcacataaataatagatgttaattttgctgaccaaaaatatcacgctaggattttattttatttttttgatgaaaaatataggattgtgttccactattctgcaacgtcaaatttcggctactgagctgatgataaggctagtaaagataatgcatgtgatcaatacaattatatatggaaaattatagtggggcctgtgggggccacaataattgatgacaacttgtttatgcagaggtatggtgtttctttataaagagagcaagactgagaagaagtttgtagtagcaccctccaatattcttctccatttcaattctctgttagtaaagattaccaataccaagtctcttcctttcactccaaaaaatgcaggcttcatctccccagacttacaatgaaaaaatgctggcaaactacgtgccaatctatgttatgctcccggtaagtaacaaaatcccagttcactactcactactacacatatattatgaaatttgattttaaaacagcatggataatgtcatttaacttctgggctttttttttttttttggttttttacgttttgaatgtttgcagttggatgctgttacggctgacaatgttgttggagacagagacaatcttgagaagcaactgaaggagctgagagcagctgatgttgatggtgtcatgacagatgtctggtggggaattgtggaatctaaaggcccaaagcagtatgattggagtggctataggagcttgtttaagctagttcaagattgtggcttgaaaatgcaagctattatgtcattccaccaatgtggtgggaatgttggagatgttgtttacatcccaattcctcaatgggttcgtgatataggagaatcagaccctgatatcttctacaccaaccgcaaaggtaacagaaacccagaatacctcactctgggtgtggataacaagcctctctttcatggcagaactgctgttgaggtaagcttcaaaaacagttttgaagtggtcatggttaggtcaggaggccatcttgtatgaaattctcttagtactttgctttatatgaagacaaataaatatgttatttgagtcaagttgctgggaaagcttgttttattgaatgatcaagcaacagaccaaccacacagatataaatccctgtggaaactgtagaagaggacaattttttcagtcacctaaataaaattaaacagttaagagttcacttgagggagttacatgtagtctaagagatacataccttgaaaagggcatgaaatctattagtaggattggcctactttgtcttaagaaaactatacctgatattttgtttaaaactctaaattggcgttttactttcattgtgatcattatcttcttctctgtagatctacagtgactacatgaagagtttcagagagaatatgtctgactttttggaatctgggtttatactggacattgaagttggccttggggcagcaggagaacttcggtacccctcttacccagaaactcaaggatgggtttttcctggtattggagaatttcaggtgaaactgatttcatttactctggtgatccatgtctaattcaaggaattttaagactaaaacaagttgatgtaacatgctgcagtgctatgataagtatctcaaagaagattttaaagaggctgcaagtaatgcaggtcatcccgaatgggaattgccggacgatgcaggagaatacaacgacacaccagatgcaacagaattctttaaatcaaatgggacatacactactgaaaaagggaagtttttcttgacttggtactcaaacaaactcctgaatcatggggatcagatattggaggaagccaataaagctttcctgggctgtaaattagtgttggcaatcaaagtaagtcttacaatgccaataactataacattattgacacttaatcataatgttctttaactatataaaacttatctttttaataaaattgatttaatggctcctaccttatcaacaaaacaggtttctggaatccactggtggtacaaaactgagaaccatgctgctgagcttactgctggatactacaacctcaacgatagagatggctatcggcctatagcaaggttgcttacaaggcatcatgctgttttgaatttcacatgtttagaaatgaaggattctgaacagagcgcagatgccaagagtggacctcaggaacttgtgcagcaggtatagctagaaagtagtcaagtactactcacacacattaaacagagttttctagctcattaggttttctattaaactagagtattatcagttatgaaaaatgtgaaattaggacccaattaaaccaaaagcctttctaatgatagcaatttttgattttgtgtaggttttgagtgatgcttggcatgagaagattgaagttgcaggggagaatggactttcaaggtatgacagtgcagcttatgaccaaatccttctgaatgccagaccaaatggaattaacaaagcagggccaccaaaactgaggatgtatggggtaacatatcttcgtttatcgagcgatctcctacaacagacaaacttcgatttattcaagatttttgtgaagaagatgcatgctgatcaggtaagcaaccttaatttatttgctaagaaagaatatgccatttcaaagctaacttgaattatatttcaattgtccccttacatgtcttcttgcggttatgcagcaatacactgcagacacagataaatacaaccaccatttagttcctctgccgccctcaaaaccaaagattccgacggaagaacttttggaatcaacgaaaccaattaagccattcccatggaataaagaaacagatatgagtgtcagtggcggcgggggtgaaggtggtggtggactttttggtttcattagcaggctctttccttggaatagatgaaatcacaaccacattgataaggagtaatggaaagtaatcaaataatggaaatggagttaaaaggccaatgatttccgtgcaatggaaatctagttttaataaacgccattaacatggctatctagtactatttcaataaaaagaatataaacatcttgtccctgtataacaacaaattattagttaattacataatgtacatctaatctagtttccataaacaccattaccatcacgctatctagtacttattctagtataaaaagattctagtattcatttgcaaagtgctagtattctttattcaaaactaatcactaaaacaatatctgcatcagtgaaactatgaatacttaaaacattattttttatctttctaaacacaagctaagaaattatatcctcaaggtgtagcaaacagcacatgcaaaaagattatactttggtttggaagattatactttggtttggtgggtgactcaaatcctggtccctgctaagacttttggaaaatagtggtcccttatttggagtaatataatgtgcttataattattacttgtgaaaacctctgcctcccctccaatgtatttcatatctataaccacagcactctacatatatacagttacataaatatatatatatatatatatatatgtctatatataaatatctctttccttaacatgtcatcaaagagtctaacgtggataaggtaacatagacaatcttaacatccaatgcaagtgcaaaaaagttattgtttcctctgtaataacattataacaacctcaaaagtttgtttgaagaactcaaatctctgtggagcattctatcaaacagtatccagactcatgttagtaactatcaatctcagtaagtatattataattgtagtaagagagttgatgggcctatattctaaaaataaaatggttaaaatacactatcagtaacaagtgacaacttaaatagaataaatagaggacataatcaaatgaaagagcatttatggatacaaaagagaacaaagaatgaataccagccattatgaagataagccatagagacaagtatgcattaatattatctgttaaaaaaaccaattacaaaaaagtggtcactggtgtgacactgacactgtaagcaaccgcatcagggcatataataagtccaaaatgcatataatggtggagatgcggggtatcgatccccgtacctctcgcatgctaagcgagcgctctaccatctgagctacatccccttatgaaaattctcttacacaacgccgataataccataactaagaggggtacgcattttcaaaaaatcttattgtttcttataggcatttttcttttgtggggccaaaatttctatctaaccctattatattgtataagaataaggacacgatgaaaggaagaacttataacaacctccgttagaacatagaagctcatcatta

SEQ ID NO: 16861 - DNA, 5534 bp, Cannabis sativa
gtaaaatatttccaacagttatccagtcccttgacataagttttgggatccatggctcttgctttacaggtcctatcccccatttgactcgtgggcgcctcattgtggagatcttctcccattcttttgcgaattctgttacccgtttgctccatcttcatgttcataatctttgcctcattcatctcattcagaacaacagaagggagattataaatggcggttagattggtctcattaagattcaatatatcatgctgataattattaattttagggattatattaagggtacctttagatggattgttgattaggtttgattcccctctctctttgattctctgttctgccacttgcagaggacgaaggttgtggttttcatgaatttttacatgatgatgttgacttggctcgttgctgcttttagtatcaatccttctcgtcgtatctactttaagccaagaaccataagttggccccaattccccatcttcttgagtcctagtggctcgaggttcattacattggcgcatttcatggccaatccttccacaattaaagcacatatacggtagtcgatcatatttaaattggagccaaatacgctgtccttcatggggaaagaggtaacctggcaagagcttggattgaatggagttccgaactttcaatttgaagaatccattaacaacaattctattaacatctgtttcttgaatgtcagtaacttcccctgccattcctgccaaacgggccatatttaatttagtaattgctttaattggaaggttaagaattcgacctaagatggtgaatgagtacagagccgcttcccaatccgtcagaatgcccttcatcctctccaagataaggaagccagcgttcagcacccatggagattttcttagtatcctttccaacgaattgttcgtagtgaacgaaagaaccaagaacaatgccgtaactgttactttcttgatttttaaattccattcggttttccccgaattccaaagtttgcagagaatgttcttgagtaaagaacggctaaaaggcttcatggtgcatagccttccaataaggcacgacttgccaatgtcttctgccccttcctcgtttattttccatccttcttcgtctgtaaccgttaacttgctggtgcgagcgagcaactcctccatttgatccatgctttccgagcacatcctctgattaggctcttctgaagagagcatgggaaaattgccagtcgtagagagaaaatcgccttcgcagagagagaaagtgaatcttttttatgtcttttttgttttatcacagctttttcaaaaagtaacttttagctttttcaagctgtaccaaacggcccctagtctttgtctttgaaatttctgtttctctaacgtagttacgtagagcttggtatggtgttgtaatagagttccaaacgtgtaaaacaaacaagttgaccacgacttataaattcattgcaaatagcacaacgcaacaccctatgacgcgttaaaaataataataaataggctctctatattatatttcaatggaataaattgcttaatataataactataccatacaacaaccaatgattgtacaaaccaactcataaaccttatttttcctcatcgaaaatccgtaaacaaaaatggcggaaaatgtggtgtgctttctgcttgacaacctctcggctcaactcgtagacgtgtttcggctcttgagcggcgttcgagccgaagtacaatacatcgttgacgagctggaacgaatcaaaggcttcttaagagttgccgacgccatggaagataacgatatccaactcaaggtctgggtcaaacaagtcagagacgtagcctacgacattgaagattcccttgatgagttcaacttttgtttttctcattattacgatggctgtggatttcacccgttgcttccgaagcttatctacttcgtcaagaacttgggagcccgctgtcgaattggtttggagatacaagtattcaagtccagagtggagattatctcgaacggttatcggagataccacattggaaggtcagggtcgagctcgggtggtttattccggggacgattggcgagtcagggggacgcgcttttgcttgaggaagcggatttggtcagaatcagtgagcccaaacgacagctaattgagtggctcacgaggaatgattccggacgacaagtcgtttcggtggtgggaatgggtgggctggggaaaacgacattggtgaagcaagtttatgaggatccgagagtgaagaaacgctacaaggttcacacttggatcactgtttctcggtcgttcaagaccaaaaatctcatgaaagatgtgattaaccaaatcttcagggttatcagaaaaccagttccacctgaagtgtccaccatgaacaatgatcttctaaaggagagtataaaaaatttgcttaaacagaggagatatttgattgttcttgatgatgtttggcagttgaaagcttgagattcgatcaaactagctttgcccagaaacgacaagtatggtagcagagttgtgatcaccactcgcaatgctgagattacttctgcaagctgtgttgaaatcaatgattgggtttacaattttgagcctttaggagagaatgagtcttgggacttgttttgtatgaaggccttttattttcacggtggcttgtgtcctcctcatttggaagaaacttgtcgtttgatattgaaaaagtgtggaggattgcctcttgcaattgtagcaattggagctgttttgggtgccaaagacatggcaagtaagaatgaatggtctattctttatcatagtattggtcctgagatagaagagaattataatcttgatagcatgaagagagtcctttctcttagtttcaatgatttgccatactacttgaaatctcgtttcttgtacttgagtatctttcctgctttgcaaaacatagaaactatgaggctgattcggttatggatagcagaaggttttgtggttgagaaagaaggaaaaactcttgaagaagttgctgagggttattttaaggagcttttggatagagggctagtccaagtggctgagacaaccaatgatggaaggatcaaatcatgtcatgtgcatgatcttctaagggagattgccattttgaagtctaaggatcaagattttgctgaaatagccaaagagcaagattccatttggtcagacaaagctaggcgcttatcgatctttaacataccacacaatgtagagcacaaaaaagtctccaaacttggttcattgcttatattcctagaagaagatttggctgctgaattttcattatcagcattgtttccttgaagttttaggctgctcaaagtattagacttgcgaggtgcatcattggagagttttccaaaagaaatagttaagctaattcatttgaggtatttaagcctgaggaataccaaggtaaatcatattcctagctctattaagaagcttcaaaacttagagacattagaccttaaacaaacttatgtcattgagcttcctgttgagattttgagtctcaagcaactcaggcatctcctggcatatcgatatgaaattgagtcttgtgcacattttgactccaagtatggtgtaaaggtccctttaggaataggaagtcttcaatcacttcaaaagctctgtttcatagaggcaaaccaagggaatggtactttaatgatagatttgggaaagatgaagcagctaaggagattaggaatcgtaaaattcagagaaagagatggaattgctttgtgttcttccatcgaaaagctcacgaaacttcgctctttgtctatcacttctgaacaaaaggagaatgtgattgatcttcaacaaatttcttcagcacccgagtctctacaaaggctgtacttggccgggcgtttagaaaagttacctcactggataaactctcttcaaaatctagcattactactcttaaaatggagtaggctaaaggaagatcctctagtacatcttcagaatttacctaatctggttcatcttgagtttcttcaggtttatgatggtgatagcctgcattttaaagagggaggcttcccaaagctaaagctattaggtcttgacaaattggatagactccaatctgtgaccatggataatggggtcatgccaaaacttgagaagttggttatacaacgctgtaaactcttgaagaatgtgccaactggaatcgaacacttgagtaacttaaaggcgattgagtttttcgacatgcctgatcaattagtcatgaaactacgtccagatgttggaatagattacgagaagattactcatgtaccagcggtatactcttcttattggatagatggtggttgggatgtatattctattgagaggttcagtgaaagagagagctctcagccaggtactgctgctgctgcagcagagaggatgagagaccagaggagtactgtatggaaggtgtaaatttatgtacaatttggatttgtttttttgtttgtttctaatacatacatatactttatttaagtttaattaatacggattgtatgtatacattattttaagtgcaaaaaaacttattaatattttcttctacatttttaatttttaaatacaattagaattttttttattttttttaataatatatatggtaataattaaacataaatgtacctagtacttaccataattataataataaaattatttatgaagttatatatatatataatttttatttcataatttattattataataatttatattgaaatggataataaataactattttttaacacaaaatttagtatgtttgtttttaaattttaatttagcttgtaaaattatttgtttagtgtttattaatgaatatgtgatattataaataatgtataaaataaactatattactacataatataattataaacattgattagaataacataataaacatgcatctaaattttattggttttttgatgcttttaaaactataaataaacacacttctataatttaaataaaataatgtttatagttttgatattatatttctataaaaaattaattaaatcatatttattctaaataaaatgaataataaatatttttttcttattaaaaatttattttctttataaatgttagaactgtttaatatttatttatttaattttacaaatttgtttattttatgtttttataaacatttttaattattaaaaacttcaaaatcattgttaaaataaacatgaagtattattattatgaatggcacacatgaatcacaataatatataatacacattttattgtttttttaaattatatataaagacacttttaaaatttatatacatgtttataattttaatattatatttcaacataaaattaattaaaatataattattcaaaataaaatgaataataaacatttatttcttaataa

SEQ ID NO: 16862 - DNA, 12883 bp, Cannabis sativa
  modified_base (82)..(98): a, c, t, g, unknown or other
  modified_base (4146)..(4154): a, c, t, g, unknown or other
ttaaaaaattaaaaagtaaaaaaagttttatagaacatgtttttgaaagatatttttacttttttcaattttaaaaacagannnnnnnnnnnnnnnnngttaccaaacgacaccatagtataatgaatcaatgatgatggtagtatggtgataacttgatagttggttgtgtagtttgacttagaagaagattctataagaaagaagtaagctttattgatagttttgatgttggttacactagtttctcaatccaaattaacttggtatttatagggagcttgtcgatactacaattttttaattttttttttattttaaattacaattcaactttttaagagattctaaaatttgataagtttcttagtttacaaattaatatagttttcagataatcctaattttttctaattatcttatccttgtataattttactaaaaatttttaaataagaaaagttgagaaatatgtagcacttttcatcattgttgtttttttatacaatactgatatacagattacctagcagccgcattgaaacccactgcaatcataaacacccacccagatattgtcatgctgcacaagaaaagaaaaacacgttattaattctataatttaggacaatgctaaaagatcttaaaaatattttaagatattcaacaccataaaaaaaatattatattgtgattagtatattttaacatctaaactttacatattttaatttaacaactaaaaaagtgacatattttttttaataaaaactgaattttatttataacgattcttgcgcaattacatcaataatattactcggaagagaattaaccgaataactacgttcagcatataatcatgaaactcgaacaagaccatgagcaatacaattagcagaacgtttaacaaaacgtaaatatataaacattgattaattctgaaaacactctcttgcattcctcgatgcaacagccaaaaaaaaaaagtgacactttttatttatagtaatgttgggtaacttagtaaagctgcctataatactactctgtaactaattagtgaattatatttttgtgtcattatagatatctgttagggttctcttgggggtggccatatgttatatgttggggtcaaatcaaatgcatggatatttcataattttatttgtataatattatttattaaattaaaatattaattaatttctcaatttttcatttttgttgcatgattaatttttgcttagaaatgagacacgtggcttaccaaacagagagagagtccaaggcaatctcagcgtttttaagcaagccagcaatcaaaaccaaaatctgataataccaactctcaaggcagagcatgaccgcagacgcaatggatagtttaaaaaactcccaaagcccactaaaggcctccaaactgaacccattccacgtaagcttacacttgtcactcatcaaaatgtaaacaaactgggccacaactactatccaccacgaaaaactaagcataagagaagccccaattagaccccacccaagcttgtaaatcaacacccaactcagcaccaagtgaaccaccagcgtcccagcgctgatgtacgcgctcggaaacacgatgctctgagcttgaaggaacttttgtatcgggaaattcgctgcgtaagcgaatatttgtgggatcaatccgtacacgaacaacgctgcagccgacgctatttcctccgattctcccaacccaagcaagatgggctttgagaacgcgtagatgattgtgagtggaatcccagtcgccatgagtaggattgtcgagcgttgtagatatatcccaagcattccgtacttatgggctccgtaagcttgtccgcaaagcgtttcaactgcacttcccattccaagctatatatataggagaaatttattagctcatttcacattccatcgatgtgggacaattaatacataaatgaaaacgaagtgatcaataaatattttgtgtaccatgagaccgtaggcgaagacttggataccagtgttgccgagggaagcagcggcgagttggagattgccgagatggccacagaagatctgggtggacatggaagtgacgttgttgagtaagtagacgacgacggtgggaccggctaagcggaagagggtgttgagttcgatagatgtggctgatttgagtctttggaagaagggaatatcagggtttgataaggtgtcttctagttctgaacttattggggatgatttcatagttaacatgggttcgtgtaattgtaatagtagctgctcgctactaattcttctcgaattctccatcttaattttattcccttctcacaaaaaactatgcacacacaaaaaatattcgaaagaatcgcagcacacactacacacacatctgtgtgtgtatatatatagactggggtcgagatgtcgtataactgagtgatgacttgttttctattattgattggaccactgtgataacgcacagtagctaacatcctactacctacctctccatggtgtaaaaaatgagtaactataatatctgcatcctgtaattatatatatatatatatatatatttagtatcatcatatttatttaaacgggtacttctaattataaaatagtgtcacttctgtctgtgtgtgttaatattttcatacacatatttagtactgtacaaaatttatgaccattcaatactctgtttgggcaaataaataatttgacataatttttaagatgttgttcatttagcatacaatatctttggagctacattttatattaagatttattaaaatagaagaatcttctatatttataatactctattagagaggtacaccaacaataaagtgttgaatttataccctccttttgaaaaaaaagagttgaataatccaacattatggttagtcaagtaattaaatttgattagagcactcataaatttaaatatcatcattaatatttatttttaggaacaagttatcaccaataactttttacagacgataaattgttattgataatcatcaatgataaaaaagacactatttactaacacctttcacttacaaaatctgtcgtcattgaaacttattttttgcaaactcgaataaaattttctctaaatatagcttaataaatagtagagtggtaaatatatcttgtatctttctcttttttatttttttaattaatttattacttttttttactcatttcttgtatttttatttgtttttatcaattaaatatatgtaaatacacaatatttagaaaaaataaagataatctcctatagtataatgtaaatgtgaggtaaattaaattaagaacgtagatttttttgaaattattttagaaaatagaataaaataactgatgagagtgcttttacaaatatatgaggaaaaaaattaaaagaaaaacccttctatattcgagctctaactataaatgaattgcatagagaacttgttggttatactaattaatgatcattactataatattagtactgtgagtattattacattattacatgtaataggttcaatacttcaatgttaaaatgttttttattcaacacaacactaaatttctgttttgttattaaaatgacgcccaacactacaatacccacgtgtaactatactcaaattaactgatttaataaacacatagtgataatatatattttagtaacacacacatggtttatataattattgactgagaagtggcatgtacggctagcttcgtggtgagggagggatgggaaaaagggagaggtcatgagttcgaacccaagacctttaagctattaagtttatatacgattgtaaaataccattacgctacactcaaaaaaaagagaagtgacatgtacggttatttgtgtaattttatattcagcatcgatctcgcagatttagttataatataaaaaattattaaccactcacaatattatgctacattaatatagtatagtaatgcttctaaatatttgaacacaataaataatccattttagtgcagattttacagctattaatcaatagtagcaaaatggtaaaggtttcttgcttttttttttttaaaaaaaannnnnnnnnaataataataataattatattattatttttaattagccactcatgaaagttttctacaaaatagctacaaaaatttcagcatcaaataaaactttgtatataaaaatgaaaaacaaatgaaaattgaaaaaaagtatatctatctaaaaatcaatttcctatgctccatcggtttttcatcttcttttaactctctttttgctatttaataattcatgaatcaaaaatataattgttttgcgttattagttaatatatatacttattattataataataatttattgggtatatttggtttagcttctacaaaaaaaaaaaaaaatagcttttttaatttaaaagtccttttagtagaagctagaatttgtagcttctcctaaaaaaaatttgaagaagttacttttaaaattaaaacatataatttacataaaaaaaaaaaataaaaaaaaaccttctttcaatgatatccaactactttaaaaaatatttttcattaaaaaaatatcttcatataataattatccaaacaataaaaattagtcaaatatactaattatcttatacttctaactataataactaaaagtgaaaaattagccaaacatactcattgagaaattgtattaaaaaatgacaccataataccaattaggctgctaatatgagttggtgaaaatagaaaaatagctagacagcatatatgaaatccgcaagattggctaattctgtagttttgtataaaaataatgctagaattactcacacttgatgattagtattaatttgtactatccactcttgtttatgattgatgaagatgaaaatgatgccatttcattgtatttgtttgtataattcaaattaattactttacattgtaactttccagaaaccatataaatgaatgttacaatatatagtgcatagaagactggtaggtatatcttctacattttaattatatataatatatggtccatatgaaatgaacaactatgcctttaataattttttagtatcattattacttttcttcaaatacatatgcagttatatacactttcttttcagctatgactttatcggaatgatattttttttatttcttttcaatatatacattagcagatattttcattttgttgaatttgtacgaaattaatatgtacagaaattaaagggagagatcttaatgagcagaatgaaggtgaagaaagtggagcacatacagaaaaagatgtgtgtagtgtagcataaaaatattggaatattttgggatgataaaaggagcatatattcttcaattttggcattattgatttaccaaagaataaagaaagttgcaatttgctaagaactggaattttaatccattcatcaatccactatacgaaattaataattatattatacaattaccaagtttcaacttacctttttctttcaataattctttccctgtgaatgatcaaagccagataaacattaacaaaaatgtcaatatggtatatcactcatgcaaaacagacactaatttgtgataaattcttaatataaatatatttggggtatcaattagattggaaactttttacatgctgaatatatatgtataatcttcgtggtagttacaaatttatagcatttctgatcattcctaatattcctttacaagaaacttattattataataattatacaaaaagaaagaaaacaaagcaaagcaataagcaagaatcattaatcgaaatattagtaaaacacgacacatttaggcatcggtttttctcttcatggtacaaaaaaaggttgttcccttcactagcaggctgggctgagatgacttctgtaaacggacgagacttgtttgacgactcaaaatccgattttaattcttgtgtttcatctaacattgttttcctgttaggcaatcttacaacagcttcttccataggagcattgaggatgcaaccaatgaaaatggaaccatttggtcaacgcgaagacctgccatgtcaatattcaagctatgatcaatcttccttcttggtaagttatatagaaaaacaaagtaaaacacacatagaattgcatcactacaaagtacacctttctcgctacaatcccatcttacttaaacctcagtggttatagtaccatattcgatactacattgtataatttcaacacaacagtgtttggtgtggtggaaacaagaaaaatttataatattacacaattcattcttccaacaatacatgcaaaagaaatgaaaaagtcatatattatagtatatcacgaggaagaaattaagccattagcataaggttagatttactggatgatcttaccaatttgtgcagatgtggctgcaggaagtgcaggaatcttcacatctaaattacggaaagagtaaaaaaacatatgaggtttaattcactaatgacataacatagaagccaaaacatataattccttattattgtgtaaacataatcggttggacatacttttcttgcacgaagaagctgaaaattgagatgaattgggccagggtgcgggaatattatcgttgagatcacaaagaaagctgattccggaagacacatcaaatgtagcatcggatggcttgcttggcaaaagacatccaacctctgctccaaaaagtgattacaggaatattaatagggacatttgaacatacataaatctattttcgacacctatcaaactagagtagctgttttgttgctcccaccagccataatccacattttcattagtctagattacattttctcctataagatgacaaaatttcatgagcctatttctccatccacttggattggatctaatatttctagtacagcctcagtaaactatcacggactgcacctataagtggcaactatgaaatccagacattagcagtggatacaaaacattttttttgacaaagtagaacaaatatgcaaaatacaatcaaagcaattatttatatgggaagaactacattatgtaaattgagatataatttaccttgatttcccactgaagcacatcaaatgttggacgtcatatcataatagaagcaaaatgacataaagaacatgaattagtacttgcttttagttgctattgtgaactaacacacacaaaaagaaaataaataaggccaaagcaaaccttgaagggaaaaatccttgaggcttatatgacaaagcccatatacatcacttgtaatatttgaccttcttaacttcattcccaatgatgttgcacagtctaaagcttgcaagttggttatgaaactctgtttttgcaagtgggacacatagctttccatggcggtgcagcatgcagtctggttactcatctcattcccgcatccctttgtgacatgtttcatgtcggggaacaccagaggacaaactggatcacataacacgtgaaatctgagataactaactctagatacaaacttacaactaaagagaaaaggcaaaacaaaaactcacaaaggaactaaagtttgaagcatggctaaaagttgacttcaaaacttacctttgttaactttgcaattagacaggcccctaagaacttccttcgcatgtgtagaagagagtttacttgccagccaccgcagcacaatacttttacaatcactgacctttgctgagtgtgcaggtaacacattagagccatccatgctcaaaagatcagaagctttcaatgaaatttttgtagcagcttcagatatcgcattctgacaaacttgatcacagcattctctaacaggatcaattttctcacaagcagcaagcaactgagatgtatccacagtactctcaaactcatcgacatctttgactgggcaggacgcttcagttagatttgatgaatgaattgagcatatctgcttaagactgtcatttgcaccctgaccaactaagatctgctcaatatctgacaagcaatgtttagcaacggttccattcaaagcaagtgaattggtatccttgctcgactgaccaatgagaattgcaagagtggcttccatctgtgggcagcaaatcacattagccagcaatggtgcaaacacagaccagcaatctattgatgttgtactcatcaaattttcagcagcagtaaagttcaacaaacatagccctgcacagagagagatatagaaaatttaactcctcaaccaatcattgtcagaaaagatctaatacaacttaagagctttcgaggaaggaaaaacctgataatttcggggaagatgtatttgtgaacggtgccaaaggtgatggcgcaagaaggggaagaaaaggctgaggagctccactgggggagatctgtggtaacatatcatcttttcgatgatttgccaatgctggatagttactattatggctggaacataactcaaggttaactacaaaagaaaaaaaaatgtatgttacgattagaattataaccacattttaaactgaaacgtcaagaagttagaactgcaatgtagaggaagagtatacagacaaaacaactctcctaccaacgttaacatgtaatatgcattaataatatatacacttacctggagaccctctttcaaagcagagcgtaggaatatcttctgaatgtagattgggaatgcattcacagggatgaataaaaatattaaatcttttaaaattgaaacctaatacgatataaaccaacaataatgctatactcaagagcccaaagggagcattgtgtacacactcacaaattactaggacaaataacacgaaaagaaacagacatagttacacagtcaaggaaattgccaataaactaactacatatatatatagttaaaagtgaggaatttcattcttatgcttaaattctaccaattttcttgtacaagaatccaattattcaaaagaaaatcttaaaatttgttgaattgatagtttaaggacaacaagatcttaatcgtcagtcagccactacataaagtttccgttttggtgtaaatttctagcgaaaactaaatggtgtctacgaatatgagaagttttaggtcaaaagttaagagaacaaagcttaatactaatggtagagttacataatgaatttaattatacaaacaatattagaagaataaccaatgcaccttattctttaacaaccaaaatcaatttacagaacctccacaagaaaacttatttggattacaaaacaataatgcccattaatttccagtacccatttcagttgaccccgcaacatttaagcaaaacccagaaacatataatccaaaataaggaaatttaagaataacccataaaaattaaaacaagcagatcatagaaaacaacaaaaacccatttaattaatcaatgagaaaagagtaaaaacactcacagaaggacagcagaagcacttgtaagcaaatgatactgtgactgagtcttaaagataccctttttctcatgccttgacttaagtagctcccaaataaggaaaccataaaaaggattcaaatggtggaaagacagaggcgaaagacagaagagaattaatgaaaagagtggttagaaagtaataggctttgaaacgagtgaatgtggagtaagaaagacaacacagaaaaggttacagggtaataaaatataggcgaggaggaggagagagtatgaagaagaagaagaagaagccatgaatgagagcttgaaagagggtgtgtgggtggggacggaagtagaatcagtaatagctgtccggcttgggaggaagtagaccccaccgatgaccagaaaaactcagatacaaggccattacactagtctaccgcattaacgccatcaattgccttttcccaccactctcttccctctcctcactcactttattcacctattcacttcgcacgcgtgacacatgtgagtaactagcacatcaccattcaccactgtataaatctaccaaaaatattatattaaaaaaaaaacaacaacatctctcatctcagtctcagacactcaaacagtcaactcagaaaagtaaatatttttttatttaaaaaaaaaaaaaatagaaaacttgagtgtgtcagccacgtggcaattggttgtttggataattaaagaggtcagtgactccttgtttacgatctctattattatcatttgttttaacttttctataaaaaaaatatgcttatgcaaatttgatgtcattcaataataagtatgatcttcttcatatgtgctgtactgagctgtgctgtaatatacaaaaatttaatacaagtttaaaatcttgtggcaatggattaattgcttatatatatattgaaaaaatttataatacactccttttaaaatgagtatattaatgtactttatttattttggtatctaaaaagctacttaatttaattttattttatgatcgaatacattataattatttaagacatttgataaaatattgagaaattcagaaaaatttaacaagtcgaaaacaatgttcaaagaatttattgcacgtgtgactttttattttatacgcatgtgaaatagacgttttaaataaattactttaaatttttcaaaattttacagaatatcttaaataactataacatacacgattataaaaaaaaaaaattagactaaaatattcttataaataccgaaacagttaaaaattacatcagtacacatattttaatggagtgtattctagaaacaccttatatttttttaaaaaaaataattagcagttaaatgaattttaaaggttggggcgttgaatctcttattaaaggttacattagtttttgatagttttattagttcatagagaagatatgaaatatgtggcgaagaagattgtatatgattaaaaccaatgaatgaatatggttgacaaatatgttaacattttgggtataaaaagggacaaataagtcacaaatcataatacagctcataaataccttttacggctttaccaactctcatgccatctatttaatccttatatttaaatcttaaccattcatatttatgagcttcaactccaaccctactttttcttatttcctaaaccaaaacctatatccatccattcacattcgaaaaagaaaaacgtatatccattaaaaaaataatattagtgctgcctagtattatcttatatgttattattataattggtttaattgagtatcgggtcctatataatttaatataattacttttaaagagtatcgctagtcaaatacaagacgacatgtgtagaggtactagaaactattggtgcccaatagcaatactcttaagaaaacatatcatgttttatttgatatcttttctaattaagggcgataaatatagtagaacatttatttagggatattatttaaaaataacctctaatttattataaaaaaataaatcacaaattaagtcaattataaataactttcaaattgtaattagttatacattttttaaatttagtactaaaaaatatatctttttataacaataattatatcttcgtgagatatatattttataaatttatttatgtagaataaataattttattttaaattataatacatatataaatattatatttactcaaaaataattttattgagaaataatattaaaggttgcttgcttattgtattgttgttaaattgattttttttttttttttagttttgatttttctttttaaatgtaattttatttagttataatttttcattaagaatataattaattagtgttaagtgtattcttagataatctaatatatatatatatatatagaaattaatataatagggtggaagagagagaagtgttaagatcaaaattttaaaataattgtatttgatttttctttttctttttagaatgaactatacattcatttattgcaagactaactgatttaatttcatttgatttctttaacttaacaaggtttcattgagagtacctcttaagtttttttttacacttaatggtcagttatttaagaaagttctagaaatataatttaagtattattactgtaaaaaattaaacttatatatttatttataattgagagttaaacttagatatttatgccgtaaattactcatttaaatataccaataaaaaatgatatgaaaataatgacttcacacttaacgtttaggtacttatagaagttctaaaaatataacttatgtattattatcatcaaaaattaaacttggatatttatttacaacctagagttaaacttagatatttacgtcgtaatttacttttaaaaaataatatacattcagactaattatgagtactttggatgaaattaaaatattgtgctttagttcctccaaatgaaaagttggtcgtcgtttgaaaaagagttctggaaggctagcttgtcctggaagaagtcttgtggaaagttagtcgttcttcgaaaagaagtttcagaatactagttgtttcctccaagaaagggctttgagtagcctgtttcaataggttttgtgcctatttagggcatccttcatgattgcacttcatctatttgggacgccaatcctagaagtaggggtaaaaatcggtcggttatggtcgatttttacaattttataaccgaccgatcggttacgatttttattttacgaaaactgtaac

SEQ ID NO: 16863 - DNA, 3429 bp, Cannabis sativa
agatgggaagacgtttaagaagcccagacgcccttacgagaaggagcgtttggacgctgagctgaaacttgtcggagagtacggtctccggtgcaaaagagagctttggagggttcagtatgtgttgagccgaatccgtaacaatgctagaatgcttctcactcttgatgagaaaaacccacgtcgtattttcgaaggggaagcccttttgaggaggatgaacagatatgggttgttggatgagagccagaacaagctcgattatgttcttgctcttactgttgagaactttttggagcgtcgtcttcagacccttgtcttcaagtctggtatggctaagtccatccaccatgctcgagttctcatcaggcaaaggcacattaggtatcaatttcaccatccttttatgtttttgaatatattaatcccaaatacttataatctaattcagaacaactgtagttgtattaggttaaaggttttcttattgtgtgataattttgggggattattaagcttgttttgtatgttttctagtttgtggatgatgtgctttagttttctaggtgtaaactaatcttagtatagactagttacttacaattagttgtgtgttttacagactattatcttagaatactaaatacattcactattctcaatggaatagtttgttgaatcttgaaattgattatgtgttttggttagttgcattttcatctgtgatacataataatgaatcttacaatactggttacttttgctcttctcagggttgggaggcaggtagtcaatatcccatcatttatggtgagagttgactctcagaagcacattgacttctctctcacaagtcccttcggaggtggccgccctggccgagtgaagcgaaagaaccagaaggcagctgccaagaaggcttctggtggagatggagatgaggaagaagaagaatgaagtacttcccattgagttttttagtctagtcttttcctatcatttgcagattttttgttttttttttgggttccaactctaattttgttttttgccaactctatcatggattttgttatgagactttagttttaagatatgtgtgatatgtacccttctgaacacatttcacatctccaaatcattttttctggtttacaagtatgatacaatcacattgaaatcttagtatagttttacataatttaaatttatctattttagtcatacattgtgcattgtctatatatgtttctcctttcatgtccatagctagtggccttcttcccctgtcagctgttctgttcccatgatttgttttctcctcatgggtggagtaagaactagggatgttagaattgttgttgttggttgtgatgtgcataagagattgtagcagattttagccatttcattagtaggattttgcaggagaatgtaaagtgtctctagtgtgtttatatgcccggtctttgcttaattgcattagttgagcgatccttccgttctagctgcaacttgttaagattttgctgcttttagggtagagacctggcggaagagactatcgagggaggcctgtttactgatcgtttggtccatagttgcctcagagttgccatatgcctaggaaaatttgagtggccataacagattgaaaaagccttaattctacattatattatttgttaagttgatggtcaaatttaactgcatagtgtagaaatcaattcaatacatagagaattgatttctcttttgtaagctattgatagttttgcttgagttttctaccaaaagagattagtgtgagtgggttgggtgagttttatacttttattgtgtaattctatttcaacgggtaaatatgcaacatagtaattcttattaaggttgagtactttagttgagtataaggttcaatcaacaacttagatggttagcctacaagaatataagcattactattaggtacaagtggtgcttggcacaatctatttatttagacggtgttatgcactactggtccttttagcatttctagattaaattcctatataatgtgaaaattctaagggaatatttaatcttttctaaagtataattgttagtgaattagatcactaaactaatactttcaactgtgttacaacattgaagtcagcacattcttttgtctgtgttcgagaggcggttaagttagttgggggattttaattctgtccaaccaatataacaaccaacctataaatagactactcagcggttgttttgtggtatcgtttgttgaatacttcattgacatgaaactgattcctttgatatttgatgttgagaaacgcaacgataggttggttgtgttgttcttcaagtatgctttcatgaaaaaaaaaatatattttattgatagtgatgatgaggctcctccaaagggtccaaagaaaaatttgatttagttatatatttgttgtttttagctaacagacgaatcgttttgttattttctttttttaatcaaattatgtagacaatcttagacgacttgttgtatccagcaagtgattttatatgattattgtgtatgttataattaaattttcttgtttagtcgatatatactttatactcaaaaaaaaaaagattataaaaataatttaattacaacttgcttttaattaaacaagcaactattaacgatttaattatgatatttaagttatttctatattaatgatcataatatttattttatcctaacaatctgtttaaaaaaattataaaaaataaaaaaaaaaaatccatataaaaaatactaaataaccaatgaaaaaatatgtaatgctcctgcatgtttttttgtttgtcgcaccgcacttgttttattttttttgtttcccaagctgtagttagtcttcttttcctcaaccttccaaatttgattctttctgtgggaggcaacactatgatgtcttgaaaaaattctagtaactaaatcccattctcgtaggttttcgactggtatactgtttcttaatatgttcgcatccatgcttttgatgtgtagtaatgtgcacaatagttgtacgtgtctatattcaagtctttcatcaatgcaactgcatggccacattacatttcatctttttgaaatttattgcatgtgtatgttttgtcctttaagtttataatttgtgttacatcttcatctattacctcaaataggttttcatttgctagtttcacatgcatttatttcaatttgtacagtatagacacatcattgtttgtaaagaatatattcaaagcaactttagttcaactaaaaaaactctataaaaataactttttcattatagataatgctacatatagtttcaacttacaatcgcaatgagtatacatagtttcctatgaggtttttttttttttttt

SEQ ID NO: 16864 - DNA, 7502 bp, Cannabis sativa
  modified_base (6219)..(6224): a, c, t, g, unknown or other
  modified_base (6429)..(6430): a, c, t, g, unknown or other
aacatggcaaatcatattcttcagaggaagaaaggctttacaggctccgtgtgtttgaggacaatatggctttcgttaccgaacacaatcaaatgcccaattcttcttataccctttctctaaatgcatttgctgatctaacccatcacgagtttaaggcctctcgtttaggcttttctccctttctcagctctcggcctagactgagttcggacgcagagattgagacccttcaagtgagggacatccctgcttcgctggattggagaaagaaaggggctgtcaccaatgttaaagatcaagccagttgtggtatgcaattatttatgttttgttaatcttttttaatattaatatacttcttagctatggtcttcaagatccaattccaaaaatctagtgattgcggttttcctttctttttcctagctttggttgcagaaattgttgtgtctttttttatgcaaaattgattgaaacttttggctttttgtgtatattttgtaacatggtggtttgatgtttcgactgtataattcttaattactgaagtgataataattggtggatcaaatcaaaaatcccaaatataatattgtgatttggtatgcaaattctctaaactcaaattgatttgggcttcttgttcttaaagatttatttgtcagcctaaagccatatagtaaatttttgtaagctaaagtatgttactcaagtgtatgttgtcacttgggttgtgtattcttttctcgatgtaccaaaatataagatgatgtaaaattttgctgactaaaactctcacaaggttgtgattttatcaatgaataatgtgaagttacttgtctatgttgtaggtgcttgctggtctttctcagcaacaggtgctattgaaggtatcaataagattgtaactggatctctagtgagtctctctgaacaagagttagttgattgtgacagaaaattcaacaatggctgcaatggtggactcatggactatgcttttcaattcgtaatcaataaccatggaatcgacaccgaagaagactacccttatgagcgtcgggaagctacctgcaataaggcaaaggttaggaaaactcccctgtttatggagctcctaagctatgtactgatcatattcactcttatctgtaacccattatttaccttctttttgttatcttgtgctgcagctaaaaagacacgttgtgacaattgatggctataccgatgtggccccgaacaatgagaagcagctactacaagctgtggcagctcaacctgtcagcgtaggcatatgcggcagcgagagagcttttcagctttactccaaggtttgtttccaatggtggtcaatataatctgatgtaaggatagaaatataggtggtgacacgatgaagcaatttaaaaataggattaaaaaataactgaaaggatagattagaagatgcagactcatttaaataactgaaaatcaagtttttagctagtatttaggttgtaacataaaaatgcattattcaagaacttatagttcgacacaaaattaactattagtaaaataaagaagatttaaactcatagtatgtaaataagataatttgtattaactcatttattaatataattaacaagataaaaatgattataataaaattaaaagttaaaagttaaaaataaaatgacctaaactatgagcaaacacttggtttacatctatagcttaaaattaacatataaaacatattaataggtgtgatatgggttaaacggacctacttgtctctgtttatttttttgtagtaatttataaataagtccacaatatgtgttggataagattataccaatctaatatggtcatgtttaaatattgtgttaaataatttatgggttcacctgtttataaacatgacctgtttgtgtttatattttccgacatgttatgtaatcgtatcgtatatgtgttaagcataatcgtatcttatcgtaatcgtgttgactcaaaaacacgaaacatatcgaattgcaattgtgttgacttgaaatacaaaatggattgtcataaatagatacattttgacgagtatttctacttgtttgatttggcaggggatttttaaaggcccttgttcaacctctttggaccatgcggtgttgatcgtaggttacgattcacaaaatggagtggactattggattgtgaagaactcgtggggaagacaatggggaatggatggttatatccacatagagcgtaacaatgggaattctcaaggaatatgtggtattaacatgctagcttcatacccgaccaagactagccccaacccgccgccatcaccagcaccgggtccaactaaatgcgatctgttctctcggtgtggagtgggagaaacctgttgttgcgctcatagcttctttggaatatgcttgtcatggaaatgctgtggcctcaattctgctgtttgctgtaaggaccgtattcactgttgcccccacgattatcccatatgtgatattcaaaggaatcaatgccttaaggtatgtatcatattatattatctcatctttgatttttcattggtgactctattattgctagagtaagtatcattagatcaaactgatttttctctataaattcaagacgctatcttgggttttttatgttatgtaatgaactgagcgagctatcacattgattgcagagtactactgctgctagtaactcaacaacagaagcgcttgaacacagaagcaactttgcgaagccagcccagtggggatcccttgttgaaggttgggtcctctaaagtttctccctttttaatgatgagaaaatattatatgtaccatgttgtagaatatttatcttccaaatctaaaaattgggagtatttatttatttattatgtatatttacgttgaaaatgagttatacattcgagcagtcgagctcgctattgttgtgtaacaatcgaaatttccgagccttgtattattagaataaataatgaaattttccttttagataaaaacaatttacacatatttctggaatggtttccattggtgtctcttatagcaacacagccacaggcatgtaatactacacacaaatcatctccaaatccaacataacagcacacacctcctcactgggatttaaatgcccatatacccccttgttctggtttgtaaaattaagaaatttatcacatttgtcattcattcatagtacaacatttttctcaatttgaagtttggaacacattaattaatctaaacatcataacaaacccgatcaacgtgtaagtattccctattaacaaaactatgctcaacagaccttttgtaataatcaagaagtaatattcccaattgtctttccaattgtgttaactctgttcattgagtatatatgaggaaaaaaaaagattcaaatggtagaaacaaagatgttgtcatagagccaagccaaatcatattacacatcaaaatgtacaacttcccctcccaaagtgcaaagctctcaacttataacaccactaagtctgcttcccttctttgcttccattgacgtttatgtatactatatctaacctgaaacgtggcttggtgtggtgttccgccgttgaaatcacgtcgaggggaagacgtccttaaccgccgaagctgccgataggtaattgagagtgtttctcaaggtctctttctcccgcttgagtctggtagccgtgtcctccaattcgagcaaggcttgctgctctctcggggcgccctcgaaggtgctcccaacgaaaaacgaaaacggcgttggaaaaaggttcctcctcagctcctgaacctccttctctggcttcccacctagccgattcgacaaccgaatcacgtccttcatatacgactccacttcgttcgccagcgaatccaaatcctcctcgccgtctggagatggcctgtcctctagccaagtaacctccgccaccagatagggtttcgtacggacgatgttgccgattcggaaccgctcctggcctttacagattaagaagaatcggtcatcgacgagtcgctcgtgcttcacgacctcgccgacacagccaacgtcggctgttcccgatacggcgtcggagtaaattacgccgaatcggaggtcggtctggagcagtgtgtgcatcatcatacggtaacggaactcgaagatctgtaaagggagaatggccccgggaaagagtaccaatggtaaaggaaagagtgggagctcaaccacatcgtccgactttggtgagttcgtgtagttcctctccgggtatgaagaggaagagcaacggaggccgttggacttccgacggcggcggaggaggagggaggatttgaatatggagttagggtttaaggaagatgaaagaagagcattggggtttaaggtgggtttgtagtgggtaaaagaagaagaggaaggtgaagaaggaatgagttggggaagtgccatttctgagcttatagaaagcattttagtgagagaaagagtgaaaatagctacaaacccatatgatatgtttgattctccatttccatttaccttgtccttcttttctctctctaaatcatgtatatggttttcctttttcttttctctctaaaaaatctggtggctttcaggggagcgaagtagatgtggataatatggagagagtgagctcttagagggtgggcccatgggccgtaggggccgtggaacgatggaagaggatatatattgtggagtcaggatgtttggatgtggtttacgattattccacgtgggagtgtgctgttgttgtggtatgaaattgaaaaccaatcattcttctttcgtagaatacataataaattattaaggatttggtggtgttgaatcttgattaatcaaaaggatctccaccgttaaatctagatttttatatacttgaattagtacttgttaactcttgtggctctaattttctttttcttttttcatctcaacgttgctctaaattgttatccaccgaatattcactacttctgtacaaagacacgaaattcacattaaataaatagatttagacttgtcttaaatgaatttgaggcattttcaagttataaggctaactcatttattaaacagattatttttaagttgagacacttaattggaaaataatatatgagtatatactttttaaatttattatatttattatatgtaaattatttttcttacataaataagggtagagataagattaaattttaagaggaagtaatagcgcaagcgatgacaaggtttcatatacatgaattaaattagggttgttcatttgatctaattcgtacttttttggtcaaacaacatctaatccgcactaagtgcgaattttatattttagatccaatccaatctgcatagcagtttaaattcaatccaatctaatccgcaatagtgcggattggattggttattttggatcggttatttttttaatgataaattatttaatatttcatagaaaaaaaataaaaaaagactattatttcttaatctctactaataatctatttccatcatcatttatatacaaatcaaaccactatacatatatgtaaatatatatgtactcatttttagatttacactaaaatatacatgtatccattattaaaataaataagcaagtatatatatatatttaaatttatgtgtatgtgtctatgtgaataaaaataattttttttgtgtcttccattataaaacaaataaaatacaccaacacaatatattactagaaaagattaagaaattagaaattttgacatttataattaaaattgaaaaaaataacatttgtgaaataatagataaatggttaaaaaatagtaaaattataactagtggggtacatctcatggccagccactatagggtttaatttgttattattttatcatttttattccatataatttaatcataaccctaagttaaatagtataaaagaatatgatggtctcattatccaactaatctctcataacttagtttacattctgttagaaaactagagttttgagacctccattctttcttcttctaatttcaaaatctcttataatgttcttcatcaaattttgagccattagtgagggagtgcatgcccacccatagcaagtctagtactcaatcatnnnnnntaagactgtgaagaatccaaatatctgaaggagaatcgaacttagatcttgataataatccgcaacaaaaatgaacaagggttagagttctgagtgggaggaatattcctttgcaatcaatgtaaggttactcaaactttatatgtgtttaaattccattactttagaaattcatatttagaatgttaataaacatacttgttannaaatctagatcctagtaaaatataatcaaacggtacctctatagccacatcatcatccccacccaaatctaccacaagattattgttgtaaaagggagtaccaaactcatctgaatgatcaaatgcgatatcagctctatgatcatctatattagtaggaagttgctcattcaagctaacccctagatcaatttctaggataaaggtcccaacaacactttgaggggttacattttagggagtaggctccaaattcacatttttcctcaccttagtcacacatagtggcaacaagttgtccactcatttttgccttcatgctcaagaacactcgtagttggctatctttcactaaaacctccagcgaaaacttagtgcctttcatgtacatgtaacaaacttctaattttagttgatacaccaatgggtccacatccaactcctcatgcaacacttcacacacctttttcaatgtagtgtcaatctcaaacatcaacgtcttaccttttagggaatcgaatacatagttgaaaccccccacaacccaaacatcatcatacagtatagacacaactacagttgaatctgttctaaaaaaatgcacataaatatgaaaataaacagaaaaaatcagcataatattgcacaataatcgcacaagatatcgcacacaaattgtcaaaccaacaaaattgcaaaaaattgcaagaacatcgtttattgtcgccaaaaagaatgaaagtcatccctaacttttgatttctgttggcatcgcacaaaaaatcgtacaatatcactcaaaatcgaaaaaacccaaaaaaacacagttttcgaaacaaactctatctccatttcaaggacacaaaaacgaaaaaatacaactaacaatttttaaatccatacaatacaatcaaaaataacatattttgtataaaaaatacttacccattgctttgttgagtgtggtggatgacttgctgagcttcgttcaaggtccggcttgggggtgagttgtttcctttgggattgtcgagagagagagagagagagagagagagagagagagagagag

SEQ ID NO: 16865 - DNA, 7271 bp, Cannabis sativa
  modified_base (664)..(664): a, c, t, g, unknown or other
aactattagcaaaatgtttatgcagctgtaatgcagctattatgaaacattaaaaatcagaacaatattttcacgtatgtaactctatctgcatgtcttttaaagatttaatatgaacaaattcaccactagaaatttggaaataacgaaaaatacaccaggataaatattttactgtagtattgatgtatttttttttttttattattatacttgagtttgattgtttgggaactctaattcaactttttgagatctgcctttcatggatctgaaaattgaagtcatgacattagttttatgcaaattaaactggattttcagttgaattttagtttcgtagtagtttttctatacttttttttttcatgaattcaaaacagtccctgtttcgattgattctggtcgtcttctcagataaagtccccagaattaatggtggttctcttgcaggttgaattttcgtttcggttgcgttgggttgttgtgtggttgcgcgacggttacacatagttgcccaggaagcatagatcttgggttgaaggtgaattaaagtggtatttgtgtaattttttttatttgagttgtatatttatttatttggccaactcaaaatatttttgtaatattgttaaaatcttaaaaaatataataataataatantaataataataataatataaagaaaaagaaaagtatgagtggtatatactccttccatttaaaagctctaacaatttgaaggttgcccatgactggtttcaatggaatataaaactctagcagatcaagtcataataacttattaaatttgaatttagtgggtcatgtgacacctatgaagtagcagcatatggtcttgtgattgattccaataggttgtgaaccataatatatacacactgatacatgttaaaactcttatcttaacatttttctattatataataatcttaaagatgtgctcagagattaaggccacaccccctggatgtggatcatagtctaaatagaataatgtacataaatctatgctccatttaaataattacaatttccaatccaacctaaaattccagactggaacctacagtaacctccattataccctaaaacccacaccccccacttaaataataaacattttattaccatatatttctctcttcattttttactgacctttcttcctagcattttaaattttacctatcaaaccaaacacactcattttctaattcacaaatttacagcccacccaccttcaactatgtcagtacccctgaaaataataacccagcaagacaaattaaattgtcaggaaaaaagaaaatctacaaatagttttttagaaaaaaaattacttataagagaaatggaaaacgacaacctatttttatgattataactaaaaatggtaattaaaaaaaattgtaataaggaggggtgacgctggtcaaggaattgggataaaaacagaagagtaacctgagagacacgtttcccagaatacacgtgtcagtaggtgattggtgggggaaggtagggagcagcaacgtcttggagtgcatggagtgagcaaagcagtcaaagcaaagaccggataagccaagcagtaggcgtacagtcaaagcaaaaactgtcacggtcaaatgcttagctggtactttattattttaaaggaagtaattaattaatattaataatcatattattataataaagcctcgctgactgggcccaccatttttttttatgaaaaagaaattattaaaattttgtttgggttattgttttttaaaattaaaatttaaaaaagtatctgaaaatattcgatttggtaaatcgagattgtggcatcgtaccggggatggtcttacttttttaaccatggctcggacccaaagtattgtcacccgtgtgggttgtatggattttagtaatattgaattattcttattattttcctacgtgcggtcaaaagaaaaagaccattttgtcctatgattgtccccataaaatgacctttttttttttctttaaaaggacatttaattgtttgtatatatatttccttttcaaagttcgtgtgtgttgagtattaattgtaattagtttcagtattaatgtccgttggcaaacaaatggtgtggcataatttaaaaaattaaaaaacattgaaagcaaaatatttggtcaaagttgaatattcaaaccatgtctatataatatataatcaattgaagttattcaagtatttgaaattcctatttatttactccacattatgcctttataaaaaggaaattaaaaataaatatatacgttaacaaagcttaaccaatttggggggaggggtagaattgtcatttgggaaagtcccttgggggacgaacaggggaagaatctagcaagtaaaaataactgggaaacggttgattaaagtgaacaatttaattgactgcacgtgtggtgcgcgggacgaggggcaaagttaccggctacagcccgtagctcccggttacccgatatttcaaagtctcacacatttttatgccatttatttatttatttatttattttacagtgtgattgtttttaattaatttattttttaataattatttttattattttccgtgaagggttttcattcagctaactgcccaaaagcagagccaaaggggaagcctttgccagagggagggatatggcttttctctactctcttcttctttgacccatggcggtacggcctctttcttagtttttcctcttaaggctcctcaagttcctcctttttttatgatctgggtcttccatttttttttagtttttcattcaaaatctctatatccttcccaaaaaggaaaatagttggttttttatttttgatttactggtctttactctctgcactgtttatttctctttgaatggtctaaattttctttctttctttctttctcttgctttatggcacatcttttttgttctggttaaaaggggttgttgatttaacccttttgaagcttgagcttgaagtgaaagaagtttgattatgtatttatgatgtgttttatgatgatggaaatggtgtgcttttgaccataaaaagggatcagagaaagctaaaggaacaggtgttgtgtgtgtgtttgtgagtgtgcaataaagagactagtatagtttgcttgtgattgtcaatgagtgaagaaaaataaaaaataaaaacttgaggaatttctgttctctctctttttttcttttatctcttttcacacacttcatgtgccagccagatgtaatgtgccctgaagggtgcttgtccttgcagtgattttttttttctttaaagggtttttcatttctgggttagattttggttttgggtgttctggttttcctctttgggttttcaaaaatgccgatgtatcagccctcaaagagggatggggttgctggttttgccagtggtggagatgcgcatgttctagatctggacacagctgtcaaagatggagtcttgggtggtattggtggtggagttgttggagctggtggtggtggtgacaaattggatctgaagaagatgattgaagagcttgacttgtctgaggtaccttctgtgttcatttgtccaatctctcttgaaccaatgcaagaccctgtgaccctttgcacgggccaaacttatgagaggtccaacattctcaaatggttcagcttgggacaccttacttgccccacaactatgcaggagctttgggatgattcagtcaccccaaatcgaaccctgtaccatcttatcatcacctggttttcacagaagtacttgctgatgaagaagaggtcagaggatgtgcaaggaagggcctcagaacttcttgagacactgaagaaagttaagggtcaagctagagtccaggcccttaaggagcttcaacaagttgtggcagtacatgccactgctaggaagacagtgattgaagatggtggggttgctgcaatttcatctctacttggtccatttacatcccacgcagtaggtgccgaagccattggaattcttgtgcacttgacccttgactcagaatcaaaaaccaatttgatgcagcctgctaagatttctttgttggtggacattttgaatgaagggtctatagagactaaaatcagttgtactaagttgattgaaactctaatggaagaaaaggattttagatctgaaattgtttcgagtcatagtctcttggtgggactgatgaggcttattaaagataggaggcataccaatggtgtcctgcctggacttggccttttgaaaactatttccttgcacaaggaagtaaggggtttgattgttaggattggtgctgttcctcaattggttaatttgttaccttctcttgatcctgaatgcttggaattagctctttttattctggatgcattgtcaactctaccagagggaatattagctttgaaagtttgttcaaacaccataccgaatatggtcagacttcttatgagaatttcagagagctgtactcagtatgcactatcaatcttatggtctgtatgcaaacttgccccggaggaatgctcaccagtggctgttgatgccggtctagccgcaaaacttctccttgtcattcaaagtggatgtggtcctgtcttaaagcaaaggtctgccgagcttttgaagctttgcagcttaaattatacagatactctattcatttccaagtgtaagcttacaaggacaatacagtgattgggaaacgttttcttgtatgttatacacaccactttctcaagtgacttgaggctaaggagatgatgatgatgacctgcttggattgaattcaaaagattttcagatgaaccccccaagagtgtggcaattgggaggtttaaggtacaaaaccagctctcctgtatatagtgaaaaagtacttagttccaacaattgattcaaaattcatgaggaagaatcataatgtgtacaccggaattatgtccggcctttttgtttgctggtgttcacttgtctaaattgtcaatgtttttccaataaaacccagctaggaagaagaaattttttttttttttttttaaactgttgttggataaagatacttgtaggaggaggggaaatcgcttgtggtaaaagaagggaaaaaaagaaaaaaaaaacttggaacttgcaattgcaattgtaattgttgaggaattgcttgcttccatgttactcttgtaactcttttagttcatagtccaaagggtctgaaggcctctttatttttcttttttgttcttagtgggagttttgctattgaccccacaaatgtaaagacttggaaatccattgagcattgtccttcaagatatccattcaatatgtaaaatgaaattagtttaaatcattgcactttcctctgtctttatgcttctgcaatactcttttgatctcaatacctttatttataggttggtttttttgtggtgatattgtagtttagtttctttttctattaaattctctatggaattatcccaacactcaattgattgcatcccataacttacttctcaagtctcaactggttatagaacacatttcattttcccttaagtacttgctacttagttggtttatgcaaatctaagtctgatttgggttgttgatatttctcatcaaagtgtagattttacactgttatagcttcattgacacagagataggggaagtgggttgcaggtcctatagatacatattatagatacactgcatgtgcaaacacttttgctaactttggagatgactagacaagtaggtggatgatgtacttccttttttatccttttgtgggaagtgtttgaacaggggacccatcgttacattcactcactcacacactcattcactactcactgctcagctgaattgaaaagaaagacttgaaagctcatagctttcactgaatagttgcttcaatctttccaaaaacatgtatattattatatacatttatattggctccaaattgtgggggcaactgaaaaaaaaaaaaaatactgcttctgcttccccaggaatctattatctttcgttacccatctagtggattttgatataaaatataaaagaaaaagaaaaagatgtagatagggtcatgaaaatgatattttttttggttgtcaacaacaaaatcatacttaagattttcttttattagattgtctttggatgcacgtagcgttcaaataaagatgggctcttcttcccatctattctttccaacatattgtttgagttgtgatttttggtggggtttttgagtctccctttgttgggggacatcactctcttgtttgcacaatcttactttttttttttggctcatacattacacaatacacactactttatttttttttttctctctagtctctatacacaatttttattatatttgaatttgttttgattgaaatagtctcataataattcttttcgttgcattgagaaaaggaaccttagtataaaaggtggcttggtattggcatctttgaacgacaggttgtcccaaattcatgggaaaaagctaattcttatcaaaaaaaagccaattagagaattcttgtcactgttttagtattgaccccctttgaactttattattggtgatgggctttttaaggtctatctttcggttttgttgtgctatattgtggatccatttttatataattatacaatcttttctttcttctttcttccacgagtataatcaattagtattagcacacacaaccatgagctcttgtaggcccatgaagttttaaaatgaccaaagtcattttataatgaaacaaattatgtaagtgaggaaaagagtattatttatctggtattttcgtttgtttaagacttgagaaagtggtaatgatttcaaataatcgatttgatagaatctgggaagtcagatacgctaatacgtttttgcatcaaatcaaatctaattagactggaacatattcttatgacaatagcctaagaatcaaatcttctacggttcaacacgggaaacgtctactaagttttttttcttaaataaacttcagaaaattatataaacttaattcttcaattaattagccacacttatatttctctcaactcttatatttatagaaagttggtactttttttaagttctgtcatattttggcggatataactttgtaaattagtaattttacc

SEQ ID NO: 16866 - DNA, 1893 bp, Cannabis sativa
acaccttattttatggttcatcgatattttatgtcggaaatttggaatagggtttgtcgtgttattctctattattctattttgaataattgggatgtttttaatctaatttttattggttagttgtcattaataggtgtgatatatcacatgtttattcggactagaaatctagtattcttgacactattttgatgcttcacaactgacgatttatatgagtcatttagttgaagatgttattaaaaattttgtcttatttaatgtaaacaacttagttaacctatttttgttgattttgctggataaccaatatgtacatataatgaactatgtccaattacctattaatggaaattccatttttcctccaaccaagtaacttcattttatatctgtaatgcatatcttttgttaatttatatgtagaaaatgttgttttgcaaagaattattaaaaaaaaaatctggtaagatgtcagatgacattaaaagccaaatgttcttcatttcattttcttgcaagacctttctgtgctaagctcttcataatagatcaacagaatatgtatttgctcatatctgtcattttaataaattagaatctaatttctgtttcggtttctaagctatcaaaatctggtaaaccgggatgttaaggcgagggatccaactaagatcgaaaaacactaatctttctcccccccaaaaaatagagaacccctctaaaccaaactaaagtacaacagcaacattctatcgaaatgcttaccctacttactaccttagataagatgttaaaattattgtaagatctagtttgggattgattggatcaacattaggcagaaatgcttggtagatcttcagacttttctttgggttcgatcggttgtgaggccggctttggagcaggaagtggcttaggcggtctattcggacgtgctttaacaacttcctctgatggaacctcaaactgcaacgaaagaaaaaagatctttttatataggtaatcttatgaactaatgcaatggaaacaaaggcaagtacttctaattggataaaagaattcgatttgaaatatcattgtgacccacatttctaacatgatcaaatcattatgcagaagaagcttaacagagttgagaatggtctaaccttgtaaccacagccggaaacacaagccgagaaacataactgtacaaagagataatgaaccaaacaatcattaggttgtacaaacaatcaagagcaaagctagaatttgggatcaaacattcattgcttcttattatcgtattcgatcgaaatacaaaagcttatgatcatagcagtataaattcaaaattatgcatgttttgagatggttgatggttttaaaactagtcctaaaccctaaaatcaatctttgcactaccttttacttcgaaaaatctgaagggtctgttgggaatgttctattagacaatgtacaagtcataagttcaatggatcccaagaaaaaatatggccatgaaaaatattcaaaaaagtttgattttgcctgcaatgattgaataagcaaactctaaaaacatttggcatgaagagaaacctcggagtaactatcagatccaggcgagcggtcgatataagcactccattgctggtcctttaagacaggatccttatagcatatctcagtgcattcatccaaacctgcaagagcaaatcaaagattaaaaataatcaaaatgaaatttaataagccatccatcaaatagtatatactatagttcctagctccaagccctttgtattgataggtatttactctatagcattggtgcaataactctttgtaaatgatgattttgtctccatataaaatcatgacaagagagagagagagaga

SEQ ID NO: 16867 - DNA, 6434 bp, Cannabis sativa
gaagtttttctagctcaataatatggactcgtgtactagagttcattaacaatcgaatcacgtaaaaatctttgtctctgcttctttgatttgcttctttcttaagcatatttattttataatcgatttccaaaaatctcagtaaacaggttgtgttgaggtgttaaatttactacaaaattggtaacccgaacacaaacgtgacacgaaaaatgtataaaaaacgtacacaaacacaactcaaataaatatcatgtcgtgtcgaacccgcaaaatctcatgtcttgttggtgggttgtaagctaaattcttgtttttaatgtcatcgtgtcgtgtggagttcttaaatttattttacaagccgacacgaacgcgtacgacttgtgacatgataaatttatagaacatgaacatgacctgcataattttcgtgtcgtgtcaaatcagtaaaatctcgagtgttgtttgtgtcatacttgtgggtcgtgacctgaattgacactcctaatatatataatacttttacaaagtgttatattattattagcaatgacgatgccaacccaaaaatttaaagagggccaatatatatagaaaatagaaatatgtaatttcaattattttttttcatgtaatttcgaataaaatggggggccacaacaccctccggccccttctagctcagtcattaattatcagattaatttaatatcgagtttacttattttataaagagactgccacataaggatgtttggccacataagtagggtttgggtaaaatgaatgaaaatatagaaatagaaattaaatggaattaaatttgaaaaacataaaaaaaacttggtaaaaatgttaataaaattttctcatcttatacgggaatagtcattccttttattttaaaataaaataatcatttcattcaaaataattaaaaaattattttatataactctaaatatttattattatatattgcctcaccatcaattgttattagttttatatttaacctatattagcggcgcaaattttattgatatataactactctacactagctaatagctatagcattatatatatgatcatttctagcattatattatatatctttattaaagagttgaagttggtactagctagcctagccttggaattatgatctaaattatataatggtgttgatatatattatatatacaattaatatttgcggtggctatcaacttagagttctaagttagactatagtcttttcttttgtatgtacaatattattccatcattcttgatggttaattactcaagtttatagcatacttattcctcattttgttatgaaaaagattttgttcaatacaatttgcaaaaacaatgaaaatagttaattaattgtttgaattttatttttaatgctgtaaaaatagttcattaataattttcaaaaacaatgaaatgactcttacaattataatgtacatacgtagtcatatatataaaaaaaaaaaaatgaatgtaatttctttagatatctctctgaaatataatttagaatacttctgttgctatttttgagtttgtggaaagaaaaagagaccaacatttaaataattggagtttaaagaaccttttttctactattttacatatgatcttattaatttgtaatcaaacttcgctaaagaacattatttaataacgttatcaaattattatgttacgaaatggtgtaaatatttaaaatcgtctcattattaaatattttaattaagttataataattgttatgaaaaattgttaactaaaatcatgcaataaaattagtgtgaaatctaactaatagcaaagtattatcacatattttttttatacaagagttattaatattaagaaatttgaagtcgaaggtagtataaattatagacttgactgtgtcaacacatatcataccccttgacttacacgtgttcccgacatgcgtattaacacgagaaatgttaaaaggtattagttgtgtctagcatcctcctacatgtcaatatcgttattggttcaactaagtattaaatttcatataatttaatataattaatagcttttagaaaatattactggtcaattgcaaagtgatacgtcttaaaggtactagacaccactggtatctaataacaatattttgttaatactaatggcacacacaaaatttaatttaagtgggagtgtaatttttttcgtaagtgtcatattttaaaggtagaaatttgtgattatgtagtattaaatataattataaaaaaataacaattgacactaaaattgtaatttaactcaactacaaaaacattagtgtatttttcttagagtaaattgcatatatttaaaaggaaaaataacattcaggccgttggggactttaacccttgtccttgagataaagctaaattaacacaattaactacaatatcaaagataatatattattataagtatattttaatatcgagtctcatataatttgacgtaaaaaaaaaaggctaacgaatcacagaaaaaatcacgtcacaattatattaggtgccaattagtaatggtggtgacacaagaagaaaatattatatgtatgtctcgtccaatttgaacggaactaggtataccaagacatgatagacttctcaaagtaagtcataaatggctaataataataaatatttctagagttatgtataacacttatatatattaaaaaagttggttggttggttcccaataacagaaattattaaaccctaatagtactatatataattaatggagttgatagatcactacataattcacattaccctacctcttctggccttgcagagtggccatgtcaccataccattatattataataaatatatatacatatatataccaattattaaatatcaaaattattaatcttcaatatttattctcaaccaatgctttatataactcgagtcgtgacttacgtgatcaaacacaatttataagatgatgagttttgatcgagcatttgttattataatataaaattggtatctaacatcatcatcaatcttcttcattgtacatttgactaataatgaatatcgtatattttattttaaattaaaacatattatagaatccaataataaattttacattcatatcattctccaaattatatatattattattaatttaaccactaactaattaatattaaggggttggatcttatttgatagctttcttctttttacattattttcttaatatatatttcaatataaaaactatcagataagtatacaatacacctttaaaaaggtgcttcggtagattctgtatttattttgatatatgagagagctgggctgatcttaacatttagtgggctataagaaaaaaattatttttgggcccttatttagaaaaaatggtatttttcaaaatcaataaaaaaaaattatgtaattttaaaagggtaaattttttttgggcctctggactaggtggccctaggcatagagcccgcctatgcccagggccggccctgtgagagagctttttcgtcaattttattttcatgatcacgtacgttagtcatttaagatcacttgtaaatttttaaaaaattttgagtaatttataatgtcgaaaatcaaatttacatattttatttcatgcacaattattttgtcttatacgcatggtaagtaaatgtttaaatctaattttcaacactgtaaactattcggaattttctaaaaatttacaaataatattaaattgctaaaacatacgcgatcataaaaaaataaacttaatagttattttgtatgcagaaacaggtaagaaatctatcataacgactttttaggatctagtccaaaaatttctaaaactatatatcctcactaattctattaattatcacacaaaatttctgtagtagacttctaaaaagttattttggtagatcatttatctattttggcatttaaaaaacttttttaatttattatttttcatgataacgtatgttgtaactatttattaaaatcgcttataaatttttatttaaaaaaatttgaatatgttatgttgcttaggatttcctaaatgcgtggcacttcaagaataagccatgtggtaataggactctcgatacaagacgtattatattaaaccgcctttggagcttagtaattggcaggagcttcaggagattagtcacctctagaaagacccaccaggaggatagtagttttgtctcttcttctccgcaagcgaaactcaacccgaagagaagatagagggatgtaaagagcatgacacaccgcttgaggctaagttactatacacacatttaatgcggtatttaagttactccttatgctgaaaagacgtgctcaatgggtttaaacccataattttccgatttcacgatgccttatacatcatttatgcattaatgacgactacattatgagctatcaagtcattggcaagagacaagtctagtctcaccacacatacattaagcccaggtacatcatgaaaaataggcaatcatgctctataatcaagtctgggaaattgtgcaaaatatggttcatacaagcacgaaaatagtggtctttttaccactattatgaacctataaatactccaatgatgtatggaatgtgactttttttagggattgtttataagaaaatacttagaaataaaagtgactcatggactaaggttcattaatgtcccaactacgtaaaaattctcctctttaattcacattaattgttccacacgatctaaattaattgatgtcaaaaatctcggtcaacagtttacaataccgaaaatatgatttaaataattacttaccatgtgtataaaaatagtagtctcgcgtacaacaaaatatgtaaatcttattttcattattgtaaactatttgattttttttgaaaaatttacaggtgatcttaaataactataacatatacgattatgaaaaaattagattaaaaaattctcataagtgctaccataatagataaaaaatctaccaaaacatttgtttaaaatgtgtaatgtaaacttacctattgtgtaattattattgctatatatgttcgtacttgtgtatacactacaacaaatgtcacttttgctagcacacttttgcgctggcaaaaatttggtatgttggcaaaaggggttggtaaattaatattggtattagaacttttgccagcgcaaaatgaaacgcgctggcaaaaatgacttttctcagtacgtaaatggactagtaaaagttagatttttgccagtacaaatgtgcgctggtaaactttaatctttttgccaacgcaatttgcgagatgtactggtaaagttacttttattagcgcagttgtgaacgcttataaaagtgacattttttgtagttatataattagtataaaaaacatattttaaaattagtaaaagaaaaagtgatagatttggccaaaataatatattattaacttgataaaagtacaattatatgtatatttcttttttagcagaagtacaactatatttttgtttaacttttatataaaaacactaaaaaggtgcatatatattatgagtaatgattatgacatacttaaaattatctataactaaaattaaatacacattattattgtaaataaaaagtgtgcgtatgtaataatatgagtgtgtttaccaaataatgatggacacacttttaatttgcataatacacactcaaaaataagtacattctaaaatatataattaaatatgggaccactttatatataattgtatggtaatatttgctagagttatatcattgtgtacaatttgttatctttactctctatgatttgactatatataaagaagaagataataaagtaaagtagtagtagttcaaacgccaacatagcatgatggggttcctatcattactagtaataagtagggttaatttaatgagttttttttttctaaaccttctcaaatatcattctatttctacttaactttctaaacttaaattttagtggtaaaatcctctaaattaatgaactgttaacaaatttaaggtatcatctatttttcagagttaattgtcaacatagacggtttatgtgtacacttttatacacgtggcacgtttatatattgatacacctaatgttattatttaatattataaaaaaaatatttttgatattttttattttcttaaatatttatttaattttaaaatgaattttaaaataataatattagatatagtactaatttataaatgtgatacgtgtaacataaacagttacggtagcggttaatcggatgagattagccgccaaaaattctaattt

SEQ ID NO: 16868 - DNA, 7475 bp, Cannabis sativa
atatatatatataatgtgttcattgtagttagtaggaaatggaactgattgaaaggaaaaaaaaacatatatgatgattataaatgttcctaaattcaaagggtgtgctaaaaggattatttcataaatatttaaaatgacaaaaaaatttataatttacaaatctatagctttttttttttcttttcttatatttttatgaattttatatatttttaacaaaatacataaaattgttttcagctacaagaaagcaatgtgaaaataacgttttcttcttgaaataagaaacaagtaaaaaaattgtaaaatactaaaattataaatatatgaaaattcttaaaaatatatatttatatgaaaatatataatacattatacataagccaagagaacattttgtttaagaaaaaggaggaaattgcattgtatactcattttattttacttattttatttttttacttttattttcatattctttaaaatatatacacttttatagatgatatctcattataccccttaggttaataaaaattatgtgctgaatttaagtggaggataagggtatattaggcaatcctctcataaaagtgggtagattttaatgaaatataagatgagggtatttttgattaatggatataaacaagaggtattcatcaacttatccacaaaaaacccacctaatttcaagcccaataaactaaatagacccataatcttagctcaaagcccaagcttaattttcaagaataacactttttcaactttgaaatatagcataacccaaatcttaaattggaaaattatcaaattctatacaatcatcacttttccacaaaggtcaaaactaaaaagagaactaaacacaaatagaataacaaatatgtccgagaggcacgagcacgatctgacatgaaaaaatatgtgcttatacacgatatgtcatgacacgaaaaaaatatgagtttaagcatgacacggtacgacaataagcccgcaagcgcgaatagattagctcaaaagtacaacacattaacatgtttaacaatttaataataataataataataaatatttatttattaattaaaattatagtaatattcaaatgataattattatagatatttttaatatgattgtatataattattattgaaaaagatataaaagtaactaaaattataaaatacacaaatattttagtatttagctcattaattgaaataaaaatgtaaaaatacagagcacgaatttgaacccgtacaaaaaaacgagttgatctaattaagaatagagggtccactcgaataattgaccaaatagaaaaaatgatgaataaattttggtggggttctaatgcttttgtcacccagtcaaagggagaagaaggcatgagtttcaaaaattttgtgcattaaaatcaagtcatgctagcaaaacaaacttgaaaaattttctgcaactcctcattactttttagtagattgttaaaacatcagtactttaaaaaaatttatttcttaagagtgatattatttcttatctttcaatgagtaggagagaaattatttgggataaagaattactacaataagatcttagatggaaagttggtaatgattttagtatcaattgtgctactgatccatggctgcctagtcacactatttttaaacatttatggtgggttctgctacaaatcttaaggttgaggcattaattaatgaggatcgacattgagatttatctcttctcaatagtcttttcttagacattgatgtggaaatgattcagagcattccattaactattcatcctcatgaagattagctgatttggcttcatgaatctaatggaagtaacacagtgaaattaggttataaattgggttctacccttgcggatcaatctctctcctctagttcacaacagtcgattcatatgtgaaaattttttttggggcactttctctcccttccaaggttcaaatttttttatggaaagccctccgcgagtgcttacccattgttgatgctctccataattctagatgtgttttatgtaattgtgatagtaaaataacaattcatgctttgtttaactgtaagagagctagaaaagtctggagagattcattttttttttttaattgagaatttgcttagagagagacataatctcaaagatttgattcttaaagtgtggcaagaatggtctcaatttgaattggaacaatttgcttataccatttggagcttgtgttatgaaaagaataaggagaggcatgacacaaaatcgaaacctcctgagctactactcttctccgccatttcttacttgggtgaatactattctactcgcctttcttctatttttcctcccagagagggcaactcatcctcacgagtttccgtaaggacacccaaatggatgaatccttctttaggcaggctgaaattaaacacggataccgctattaacgttatatcgcaaatatggttttggtgttgttttacgagattctatgggactagttattgttgcaatgtcaaaaccttatcctagttgttttaaaccagaagacataagtgattgaagcattagctcttatgtttagtctgcaatggcttaaagataccgattcattacattgagactgattctctttttgcggttaaaggattgaaaactacacaatctagtgtttcaaatttacatagtttgtaacaaatatttatattcttaaatttctcagagttcaaatctcccatgtatatagatccgcaaatactgttgtttatgaattagcaaaatatgctctttcggtggactcaaaaggtgtatggatggaggaatctccacctcctctgatatctattatattatataatagcattttatctaaaaaaaaaactataattagttatttgtgaggtaaaaaaaaaaataacccaaaaaataaataaattattggaataagaataattgtattacatgaatgttgtgataatcaatattagttgcttaaaagagaaaaagaaaaaacaaagtaattgtcgtatagcaaagaaatgtatgaaaataagaatatgtggctagaaacggtgccacaaaccaagaagcaatgaccaacccaacccaaacaaacacctttctcttctcttttcccatggctacatttccctctctcttctctcaaacccaattttctccatggctttcataaaccacacctctctcctttctccaactcccaaactcctcttctcactcacttcaccaaacccatcaccactaatcaaaccatttctcacccacaagaggagtctgagtctccacaccaagtatggtgcaaccactccttctgttgtagaagaagaagaggagggcaataatgtccttttgagttcaactagggaggaagaaagaagagaatcaaggattttggttgattatgattggactgaagaatggtaccctttatacctaaccaaagatgttcctgatgatgctcctttgggtctaactgtttatcataaacaattggttttgtaccgtgatgggtctggtgagctaaggtgctatgaagatcgatgccctcataggtaactttatgatcattacttttgtttaaacactataataataataaaaatcataatatttgtgtgtttttttaagaaaatgaaataatggaatgttttgtagattggctaaactatcagaaggtcagttgattgatgggagattggaatgtttgtatcatggttggcaatttgaaggggaaggacaatgtgttaagattcctcaggttggtttgtttttggtttattttcaatagtatttatatacccaataatactaatttctgaatgagaaaacaagagtaaaaacatgatgtggaaaaaaggaaaaagagaaaagaataaaattgctttaaaaatcatatggtttttggtattaagttataggacaattctatcatggactaggaaaatattttagtctatttttttttttatagtcgtgtatgttgtagttatttaatatatttttcaaaattttatgaaacgaaaaattttacgacatcgagaataagattcaaataatttattgtgcatatgactttttattttatacgagtgtaaaatagattacttaaacattactttttatattgtaaattatttagattttttaaaattttgcagagtcttaaataactataacgtactcgattataaaccaaaacagtaaagaatgtatcagtacatttttttttagaggtgttatacacccttttatttgtagcttagttactcttttctctttctcactctctttctttcatttaattggttacgagtgatagttttgaaagaaacattaaattagtataattgggtatactgtcatattttattgagctttcttttcacctttagattataccaaactaataatgatttcccaaatgggatattactatagcttccagctaatgccaagattcctaaagcagcttgcctaaagccatatgaaataagagactcccaaggggtcatttgggtgtggatgtcccaaaagacaccaccaaacctcaacaaaatcccttggtttgagaatttcgccaggccgggattcactgacatatctaccattcatgagctcccatatgaccactccatacttcttgagaatctgatggaccctgctcatgttcccatctcccatgaccgtactgactggactgccaaaagagaagatgctcagccactatcgtttgaggtcacggaacgcactgaccgaggtttcgcggggtggtggggaagggcgagggataattcgtcgcctaacttcttgaggtttgaagcaccttgtgttctccaaaacaatagggaaattgttgatgagaagactggagtgactaattacttcacagggttattcctatgtagaccgagtggacagggtaagtcgatgcttatagtgagatttgggaatactagaggatcgcctcttataaaactctttcctaaatggtactttcatcagaatgcttgtaaagttttcgagcaagatatgggatttctttcgtctcaaaatgaaatcctcatgaaagaaaaagtgcccaccaaagagctttacctcaatttgaaatcatcagatacttgggtggttgagtacaggaaatggatggacaaagttggacatggaatgccataccattttggacatggcacgatatggttacctcaagagccggcggttgtagagcatgctcctgcaggacttgttgctggaatatcagcttcttcaccagccaaaggagggataggaacaatgcacgcgcccaacttttccaaccggtattttcggcatgtgatacattgtaaagggtgtaggactgtggtcaaagcttttgaggcgtggaaaaagggtctctctgcagttgctgtggcgttgactgctttggcgattttggtgtcgggaagacagtggaagaccattcttttggtatcggcggccttgtgctctggtggggcttatgcctgttcaaaagctattgctatgaatactaccaacttcattagaacacacaggagattgtgaactttcaaatgaaattattaccattgaaatgaaaatttttaagtgatgatatatggatacagaacgtgaaaagtgatgttgaaacttaacattgtgaaaacgctcgtgtcaacattagttaattataatattggctagctgttgttacacaagtgtttgctgatcaaatacattgtagatgtttggcatggatatcagtgtaagtgtattcttaaactgtggagatgttttatttagtgtaatgataaagctgttttaaacttccaatactaaataagcaataaaaaattcacccttaattttaataacaagaacatgaactgtacactcaattaaattaaatggctgccgaagtaataactgctatatattattatgaaataatcctcaagctctcagttagtgaagcatatgatgtgtaatatttacagttatcaccttttggtagttgaacgaagctgatatccgatccctataacgcttgacggagctatagttgcacttgtatccgtgggagacctctttccagttgagatatcggattcaacttcctcaagcatcttaaataataggcacaatattgtattgcagctttgctcaacacaaattcataatgaaacaaattgatatgcaacacttttttgaaaaaaataggaacaagtaactatacatgtttgaatgaaattacctcaatagcctcttgtaagaccttaaacaattcttcattgcgcttccttttcaaaacaacctcatcctcttcaagcaataactcttcaaacaggtcctctctgcataaaaaaaaagacgttcaaagctttcgctttatgccataaataataaacaagctttttttccctaaaaaaaatcacatactaatggaatctgaatcatttcaattgaattcacagttgtttaacataattccttctgagtctagataccaattttaatataggacagtattataacagaatatcaaaaggaaagaaggatccaaaaatccaaatttgaactaaagaacctgtaaagtttctgtataaaggtactctgtactttccgtttcgtgtggttcacctgaagcacattaagcacaaaccaaagagtgttaagaaaaaaggtcagatatgaaagaagacaaaggagagaaattggcttaccagaaaatgcattacagcttttggcactagatcttgaatattctttctgacaatgtcatagtaagatcggatgagtaatttggttgcaaaaattttgactgtttcgtcctctgtagcttcaagtggccttaatacagatgggggctgatataagattacacagatataagacaagtaacaaattacatattaaaaactaactgctgaaaggcctatataattacctctattaattggattgtagcaggcatctgatcagaaccatcaagctcacctaaggttccactgctagatggattccctccagacgatcctctagtcccaaatatagaagagataccccaagtcctcgtcgatgtgttcccccctatattgcaacatatcaaatttttaaaactctagctagtgacactggatttcttgtcttagaacattagagttttaccagatgatacaggtttctcattgttcactgaagaccgacttccctgccaaacagaaattctcagataagagagtatcttcagaacacatcatcaaacaacgtatgactactacattggagaataggacagagcacttcagcattaaattccatccatcatatatatatttatatatactagtaaaaagttacgtgcgatgcacgtatactaaattttatgttagtttttttctacgttattaaaaagt

SEQ ID NO: 16869 - DNA, 5373 bp, Cannabis sativa
tgatgtgattcttcataatggggttactagcccctttgattactgtgtaattaccgtaaacgaggcttacgttgtctgacatgtccttttatgtgtgtttcaagacgtttttctcatgctgcattaaatgcgaggtgattgtttgagtatatcctcctcctcccaaagatgctttattatatgcctagctcccggagaggaagggcatgcttattgcagttctccgggggctcacttcttaaactacactagttcgcttgaatatgtctcaactaactcttgggtgaggtgtccttttagtctacgtgtcatatgtggtcgaggccacgtattttagaaaaaacccggggcaacaatatgtaacatgtcaataaaattaaatacctacattgaaatgcatatattatattaacaaaattatatactattattatatataaaaaaataaaaaataaatatcattaaaaataataatattaatatatcataccaaaaaaaaaaatataatatacgacaaaatataattaccaataaaaataattttaacaagattaatatcaatatataccatgatgatatgaagtgatgttcttctaatacttaaaaaggaatatagattaaacattcaaaatgttttgctcaaaaaaaaaaaacattcaaaatgtaatatatagtaataaatagtgtgaaatagtctctacatgttttaaaacggtacatttcgagaaaaaaaaaggttttaaaacggtaatatttagctagtttcccaaattgaacttcaagtcttgaacctcaagaataataaaacacataggagcaaatcatgtggacattagattcaacctccgtttatcttaaatctccgtcatctacagactacacgtgtcttattctcattggaccttgctcacttccacttctcataggcgacaatttttaagcaccaccactttttccactccattttatttttctctctgcgtgaggctacgcgcttactcttaagaggtacggacgccaaacccttcttcttcccctattcttcgtcgatttcgatttaggatttagggtttgctttctttttctcgtaacatatataactgtatattaatggattggatttcgatctgctggttcccgagaaattttatggaaaaaaaattaaatgacaatggtaagtttgaacttttgttttcagccaaaaaaatgtaatcttttgtcttttgaggaatattagtctgttgctggtttaagatttatgtaagcatgtacgtgtttcttatccagatctgaataccctagtgggtctgtaattacctattagttgttattcattttgtataattttgtgatacatgatttaggattttattaaattgaatcaggagtatcttctctgtcttttatttgttcttttctttatattgatattcatttatctgtatacatatttatatgtatgttttttttttcttactccttacagattcgataagcggctgctatacttaaattctctctcccctagggtttatttttccactcaggcatactgttgcaaggtattaccttcgtaattttcttctaattattatgcatatattccaagatttgctatgccatggccctgattcttttggtttctttatatgccttgaatttacctcttttgttttcttcgatcgggaacttcattggcggaatatttttaagtaaggtcattataatacgatgttggaaagataactttttgagaggtttattgggggcttaagctactttgaccgtcattgtttatatgggcaagttaactgattctgtcctattgattgtctgacatagattttggcttatttatctatgagaatgtattagctgcactctttaagaagagcttaggtcttttggttttaactaattttcactctgattaggtactgtttttactttttttttaaagggcagagactagaatttctttcttttttgttctcttttgcattgtgattttactgattcatatgatgatgggatgtgattattatggtcaattatgattgtcgttaaattttaaaatagatagtttattaataattgatagttgtagcacaattatcagcttatctgacattatttgtgatctctgtggcagctttgagattggatttgcatccattttttcttccttcaaaagattcattaattcaagggtaagcctcaaccactcctcaagattttactagacgaaccgccatggtagcgggcacgcagcaacagtcgcaacaactgctgcaaactcagccaccacaacaacagcaactgcctatttctgctgaggaggaggcattgaagagaaatactgactgtgtgtactttcttgcttctcctctcacatgtaaaaaggtagtacatttacttctttattatggtcttattgtacttcaaggttttgtttgttgtatcctttaaatcttaggcttttcttctttgaatttgcatttgtttggagaatctttttttttttttctgaattagctggaatctaactgtttgggatttccggccataggtagaaaactaagaatagaaatacacaattaccatcattgtaaattatatttttgcaatagatttttgtgacaataaataatttgatctgtaggaactaagtttttttccttatattttttagatttatatcttgtaggattgaatgtcatgtttttcaaatttaattaccacatttttcttaattttattgatagtattatgttgatttctgatgaaaggaaataattcaagttgtaattgttgaactcactagattgcaacaacgaacgtgtaattcttgattgttgctgttattgctatactttacctggtgtagttgcatatgatagtttccttgattctatcatctctattttctttgaatcagagcagcagcagtctgttatttgttttaaaactattgttcatcaaacagatttttgcccgaataaaatgaaaaccataacgacttcatgattattttgttgaacaaccctatagtatttttcccttttcattttgtgccttctcacctacactggatcatgttctatccttcaaggattttacttaaattcttacctagcattgtatatttttgttgttaattcagttccctttctttctttgcaccagggaagtgaatgtgaatatcgccatagtgaatatgctcggatcaatcccagggattgttggtattggttgaatggtaactgcttgaatccaaagtgctcgttccgacatccagtaagctctcttcccctagttgtactaaacctacttttcttttacattgtacttcatcttttaattggtttaaaattgaccactggctatgtgatataagtttttattttacattcaatagctctatggtcaaatacttctgcttaccgtttctgtttttggtgttctttcagcctcttgatggtctattggggacccaagcagcaccgtcggtaccttcagttggatctgggcccccctcatcacaggctgcagcggcatcagctgctgctggtactcaaaactctagtaagcagcctgtctcctgcatatttttccaaaagggttattgcaacaaaggagataaatgtgtctttttgcatggaccaaatagtacacacagtatgaaagtcccacagccttcagctcctacatttgtttctgagccatcaattgttaagaaagcttttggtggccttcagaagtgcactcaagagcaaaggattcctcaggcaaatagctcgaagttagttgtaccacctacaaaggctaacaatactctaaaggttgaaaatgctccttctagaaacggagttagttttgagagggttgccccatcagtcaaggcatttgatgataagtctcttagattcaagacagtgaatactcctgttattaatggaaatttgactagtaggtccagtcgttcacatatagttaatgtatcagatgataatagctttcagaatggtaaggatgcggacgagtacttgagggaatcatctcctggttttgatgttcttgttgatgatgagcttagagatcctgaatattttcacggcgaagatcaattcgggcaaggtcatgatggaaggaacgtgaacttggtggatgaatatgatatggaaaagtctgctgattatggtgcagctgctgaaattgatcgagagaggcttcgtgattctcgtgggtacgactcttatgatcacatgcaagggcagtatgcttgggaccaacacagggtgtcatctgagagattgttagttggaccagcacagtttgatagaaggggttatcgtaagtctcatagtccagataacattaatgagtcagatctaagacatcggttatccaagcacaggagagttgatggtttgagatctgtcattagtcatgatcatgctgtcaacaatcatgttgatgaccgaaattatagaggttcttcaagaagagattcacaccaaaaatctcaacatgagggtgctcttgggggtcgccttcgaggtagaataaagcttcctggaggatcttctaccaatagtggtgatttgccctttgacagagaatttgataggagtaggagtcgggggagattgtctcccagcaggcctcaaatctctaccaaccatggaaggtttagggacagattaaaaggaatagctcaggatgattacagtaatcaagatagaaatttcaggggtttgcggccaaggagagatgacatggatgatgaaagtatagattttagtggtccaaagcgtttgtcagaattaaaggtagggcgggttacagaaactaaggagcaatcacaccttggaaagcgtaagaatacaaggatggaggcttctcagcattctgaagatctctcatttgaaggaccaaaacctcttagtgagattctgaagagaaagagaggaggggctgactcagcagcctttagaagtggaaattctgtcactgaagaagataatcagagagaaaacaggaaaagcaatcaaggtgacttcaaggggactaggtctgctgtttctaaacaaggaaatagtgtgctaagcaatgaaggagaatccaagtctacaactgctgaggtagttggaatagaagataagggctctaatgttttgtcttccgaaacccctaatgccaacgatgaagtagaagatgggatgatctatgatgaaacaatagaccaggagtttgaagctgaagaccatggagaatatgattatgaacaaggtgaggagggggagtttgatggtgagaacgtggaaggtgaagaggaatactatgaagagggtgagggtgagggtgagggtg

SEQ ID NO: 16870 - DNA, 2800 bp, Cannabis sativa
tgcaaccttttagaagataacttactaggaaaacttgcttatacaatacctattaatatagataaacagaaccctcatacttagctaaactacacaatggcataatatagatgctgaaaaaaggagaagcaataattgtgaagagatttaattaagaagatgaagacaacaatgcatcaaacggcataatgtttaaattatctcaacaactaaacttccataccttttatgcatgctctatcaacaattgtctcatttaacacagataaattaggcatctacaaattttggacttaaagaaccaaagaaactgtcctcaacctagtccacctataacattatcatctagcatatatgtacatgtctataaagacagacattgtttgtattcatcactagagagtaaataatatttagcatgaaatcaggatagaagctaacctgtcgctcggcaaaagcagcctctaagtcaagttccttaacacttgttttctgccaacaaatatcaagagcagcagataaatatcacagagcagagatctatacaatgttctacatgaaaagaactagtgctctcaccaaagtcacttttggaactagtgttttcttataccgaactttggcatgttcaacactgttttcttcatcaaaatcttcatcatcacttaactctgacaatttttttcctttgtatttgtcaggattagcctccaaatcatccaaaatcatctgctcagcaatatgtatctgccacaactgcataaaaaccaagcttccatttaataatatactcaggtaaaccattttacagaatgatcaaacagaaaccagttatgttatcaaagtattctggtcctcccaaattgggtaagatggacagccatttgcgacaccaccacgcaaatgtactgtctagaaaaactgcaggtcaaagttcacaatttatgaagaataaaacataatatggcaacatttttcagaccttttcaacataagggtgatttgacaataaaggttcctcttctggtttgtctccagggattttccggggaataggaggcctgtcagcatcacgctgtgaaaatggaaaggcaaatcaaatgtaaaatcacacgaaccaaacgaacaataaacttgtaccgtggcctactataatgcaacataagaggtctgtttacaaaagtaaactggctgatgaaatcatttatcgataaaaccattagtttaaatattataatttatttatatatgccacttgagatgtagcccaagtggttggtgtgcaagtatatgaactaggattcaaaaatcatagtacaaagttttctctttttttttagtttgaaggtagcagcaaagttatgaacaatgcaatataattttcatcaacaccagtaattgagattaagttgctctgtttagacaagacataggtgtgctctacattataattgagtggggtgtactaagagggaaatgagacagacccgcaattcgtctggatttgtgtcatcgtctcgatggaatattggtgcaaactcaaatctgttaaagctggaataaaaaaaaaacaagaatctaaagtcagcaactttaaatagaatcaccaactaatcatacgacaagaagcagacaagaagttacaattttgaataaaatgttcgtgctaatcaaagagatggtcacataatttaactgtaaaacaatagagaacattaagtagacaacagtcacactatagaagggcatacatcaggtggtctatgttaggatggacaaatcgcatttcaataggaaatcgaaagcggtaaggatctctcttcgcctgcaaaaacattaatagaaatgaaatggtcaatgcaaaagttacgtatatgtaacactaaatttaattacagtggatagaggtatgcaagaataccccagatcaacactcaatgataataatgcaaggaaaatctatacatgaaaaaaaaatcgtactcaaagcatatatactcaccagaatttcaacaaggacaggcattccaacttgtatgtgatggcggatccagtaccagtcattaccttttattgggacccacctgaaacacaaaaatacacatgaatttagcaaaaaaccttacactaactgattttagttaattaagatgtttacatcgtcaatataattaaaagccatatgagtgcacacacaataacacacataagataaaatttggaagaagggataaaagttataaacttctaaacaatatttctaacaaagcaatttattgcttatagaaaaattaaaatggtattgtgagattcattgtagatcattctaggctcttagctcagccattgaaattttcagcaatgctgtttacttaaagaacgttcaaacaacaggaaatgttcatacaggttcatcttaaacatgaggggttccctagaagactattcatgttacaattttggtctaatcattactggttccacaagttgcaatttttcgttcctcccctcccacatatttactgtatttatatccagttgctttgaactgtcaaaacaggtcagctaattacagaaataaaaagaaactatcaagaattacactttattccaaaaattaagcaacaacctataatagttgtgcaaagcaagaaccttacaacagatgagaacattaacaaagaaatgataattacccatcatgaacaccaccaatgtcaacaaaagctccttgataaaggtgcaaagtagtcacttttccttcacaaatctgcaaaataagatttttttcatttgcaaa

SEQ ID NO: 16871 - DNA, 3216 bp, Cannabis sativa
  modified_base (2508)..(2522): a, c, t, g, unknown or other
ttattcctgattcttgccatctgcagctctggtgcctcaaggaattttagaattcgcataaatgaaacctttgcttgaatcgtcacactaacaacatcaggaaacaatctaacaggctcttgaataagacgtagagttgctacaaaagtgaagacattattggcatgaagaggaacatttagaaaataacatgctccaaaagaagcagcagagatcaaaataggcgacgaccagaagagaagtgaattatacgccttttgaaactgcactgcagatagccatttcatctccacattcctcaacctttctaccacagttttgaaatgattttcccatgcatatagcttcaacaccttcatgttcacaagagcctcactaagagccttaagcctttcatcttgagccatcataaggtttgtctgaaacttattctgtaacttagaaagtggagcattgcacgccacagtaaaaattactgcacataaggctgctattgttcccagtccaatcgcttgggcaagtattagcaaggaaatacatatttggaagggagttgtccaaatctgatgaaaccagaatggaaattctccaatcctatatgcatcaacagtaacataattcataatctcaccactagaatgaacaatcctagcagagttggataatctcaacagcttcttgtaagttgcagcagtgagcaaagacttgacttgcacaccaattagtctgcttctgaagtaccactgtctttgagagattgattcaagacactttgtaaggaagagaattatgaccaatacataaccttcatactcgaaactcacctttccttcagcaaccaaaatgaaagcatttaaaagcaaaggaccaacagagagactcaaaacctttagcagagcaaagaacccagatatcaaaatctctttccaatgacataaaatgattatcttcaacagtgatggctgagcagaaaaaccatctttctttttcttcttcttcttctgtttctctaattgctccaagaacatcagataacaactttctgctctatcagctttcctcaactttggtatatcttcttcattgagagtttcctccctacccttcttcatcaacgaatttagccaccaaaatgagatcttactgaaccagcctgctctggaaaatggggtaactgagtcaatatcatcattttcattgtttccactcaaaggtctataatggcctttaacttcatcctcactctcttcacttttacaactcttatgagtacataaaactaaaagaagaatcactccaggaacagataaaacatctaaaacaatttcaaatgttacttgtttgttcaaaacagcttcaaacaaagaaaaaacacaagatatcccagcaaacagggtggcaataatggtcaaaaaccaaactggtacagttggaagttgtttaagtttgatactcaaagtcaagccaaccaacaaccaagtgaagccttcaaataatggtggaaaccacagattcagaggcagtagagaatgggatactttcagtttgtcttgtaagttccatacaccaaggaacataaaagacagagaaagacagccattaaagatagcagaaactatttgcagagttgacaatccttgaaagcagtagtagttgctagtaggcctagctggaggaacttgaccaagttttgatgaggagagcttttggatcatggtgatcaagagagtgagcagaagaactacatcaaagaagatacttagggcttgtttggtacagtttgaaggactcagaaagtcaaatggtgaacttgagtactgatcatcaccacaaaacattgtgcagatattgtccatttttttctgtacttgttatataatagcaatatatatatatatatgtatatatatttttctgttacagaaagaacccagaaaaccaaagtagatgatacataaacatatgaaaaatatagattcaacaacttctttgacaacgtaacacatttaaagctaaacagtaacatagtaataggtacagagtattattaatgtatttattttttaagaaaatgtgtgtttttatgtttaatattttttaatttaaaaaaaaaaaagaaaaaaacttttttttaacatgagttgagactatatcattggctcgaaaaattaaaaaaaaaattattccagaaaagaaagagataaaaaaagttagtttatgttaattttttttaatataaatatatttttaatatagtgtagtaagatatatatttgattttttttaattaaatattttaaaaattaatatttataattaattttgtttaataaccataaataatacgcatgaaaaatcttatatatgttagacatttatatttcttttacccataatttttaacagtacatacttttttgtaaaataaaaagaaaacacacaataagtgtaatcattaatcattaatcattatgtatggttactgcttttttttattattattattannnnnnnnnnnnnnntttatttatttattttattttttagggtggcttcacatttttgtagtctagaatttaagaattatatataagccaatcatttggtatggataagtcataagtcaatggtttttaaattttagtatatgcaaacttgtggacatgtgtgtgattctatccaataattccaattgaatcctttaattttagtttaatatggaaactcttgccattttcatggcatcacttatgagttatctttattattttttgttttatccatgtttttttatttatttaaaaaatttattaattttgatcatcattattaataattaaataattaattatgcttatttttaatactcaaagaaaaatttaaaagacacactattaatcttatttagtctttattaagaacaaaagatgtaacatattctattaaaaaaatataatatattcatatcaatttcacaaatttatatatagttggatttaagagaccaatagtttttttttttttttttttgagaattatagtaaatggtcccaaattataagactatgttagtaaatatcttcattttaaaatttatagagaaatgacccttttagattatttattatttatattgtcttttaccagataaaaaaatccataattttttttttttttagaattgaagcaaaatacttaaagattatggtatatcta

SEQ ID NO: 16872 - DNA, 7466 bp, Cannabis sativa
  modified_base (5568)..(5584): a, c, t, g, unknown or other
  modified_base (7427)..(7440): a, c, t, g, unknown or other
acgttttttttttttttttgacaaaactcctatcacttatttggtgctctagagcaagattactaagcatgcatatttaggtggttattaggtaattgttatattattcataatattatgattgttttatattttgttattttcttagataattaatcatgtatattattgtatgtatagtttatggcaatttaatttatggctaaaaaagtttttatgtgatataatcaattttaaactctagagatagtatgcaatatttctctttctaatttatatattttgccaaaaaaatgtgatatgaggttttgtatgtgacatgtctctaaatctcataattatagtttattattattatatatttttcctcaacaatcatcttcattcttactcatttcatgttcttatcaactaattaatcaatacatatcacgtagaatatatattttatataattttcaataagaatatattaaaaaatctagatttgatacataaaaattaacataatgcatccaaaatcactattgttaatttgaaatattgtgctaataaaaattttgttgcaatattctcataaattaatataactaatttttgttacttttttttttaatcaatttatttttaactttattttctatataaacctaataaaagatacacatattttttttttattgtcacatactcttttatttttaattttatattattataatccttaaattaattttttattttgtatatatcgataagatgtacatgctagaagtgtgttagttcactttttattatatctttaagcatatatacattaaatgttttttaataataaaatatataattacaaactaacaaaattaaatgttagttaatttaaaataaatcttttaatatgattttattatgtatagatatttaatgtgattttattatgtatagatattttaatatattattttagaaaatatattttaaccacttataaaatttacattactttaaaaataattagaaaatcattataaaattaaaattttacgatatatatttttttagtaacaaaaatatgaaagtttattaaaataactactcataatattattaaaaatattatgtaataaaatatcaaaaatttgaaaattgatgtaacatacatatgctatatcaaagtttgaaatttggataagatatatatacaaattatgagatataatgaaataacagataagatacagtgatgacaataggtaagatacggtacacttatatttttctacattaccctatttatttatttttataacaacaatttatttttaacaaatcaatttaaaatactatatataataaattttatacttcttaatcaacaactccaaataataataattaataaaattgtgaatagacttaagttttttttttttttttttctttttatagagttttatcttttgataaataaaattattaatcataatatagaattagataatataattttatttttattatatattagttttttaagtaaatatttattatattaataaatagttattttttattatagtattaaaaaaattaaattagccgcgcaagatcagctatattacctaatttaatcataattaaatctaaaacttctcattcgacataactttagaattgtcatcttgctagaaattaattcctaatttctatttttttgacggtaaaatctcttaaaccatgaacctgttagcgaaatcacatctccattcacttgacctcattatttgccttcatggctcgagggtaccaagtgtcacgtagactcggcaataccatgtcacgagaattttatttacgtggcatatattaaaggagctaaaaagttattttttttttctacaataatttttttaagacaatttaaaacaaataaaattaaaaaaagctaaaattaaatcagaaccaaacaggaatccacaaaacccaaaacgacctcaacaactgtgatatcaatcccaaaaccagattaagagaccttacccattttttcgttcaaaatcaaagcaaacccagaaaaatggttggtcgaaattgaagaaagtgaaataatggtcgaaatcaaagtcgaagctttggggtacctagatctatactccattgttgaaggtgaacatcacaaaccaggtaaaaatatctacggggcctacctactgctgatgtaatccccctagagttgtagagatgaaaacatcttgggccaataagaatcctagatgaaagttcatttgatgcccactccatcaagtgagttttgattgctctgattatttgccctattttttttttcttctctcgttttcttctcttcataactgaacatgtttgtggcagcaagtagaagagtgtagtttttgaatgtagtacgacccacccacacttcatctgaagttgttgagaaccctattcccaataaagaacaatttgaatgtgtggagaattttcatgacaaaactccaactattgatggttgtcaaaattgaaggaaaacctgtaaatgtaaaaaaagagtggaaatattatactctctctctttttttttttttggtaaaatgacacattaacataacttaaaaagtggcatgaatatgtgagaacagtaagtagttaaggtaaaaataactacatatatcactaattggacatgcataaagtggacttgcataattaaaatagtaagtattaagactagcagagtaaacaattacctaatacactctaatacagtaattattaggtagtctttgcatccataatggcatggttgaagccttcacaaaattgttcaacaacatcatatttactctctttgaagtgtaattttttccattctactaggttctttctgctagcgaattgtatgcccttgtgttaacattctttgtatgatccattctcttatcaaactctgatgtaatggtggcatttgcaacattccatagaagttgtttaagcagtaggccaagaaactccttgaaatttttgtgcatatgtctcacacaaaacctactatcaagactattgaaaactttttccaccgcattatgaaaccccttctacctgtcactcataaaagctaaagagtttgactccatgggattcaagtcattttaataactctaaaaaccaactccagttgttggttatctctttttcaatgattacataggctattataaaaataaatttgacgcatcaatctcaattgcaacaagtagaattcttttgcaatatcctttcaaaaagtacacatccaaccttataagtggcctgcaaccttgtttaaatctttcttcgtaagcaagtagacacacataacgcatttgaaagattattttgccaccttgcatatcacatttaatcttggcactagtatttggattagtctccaaaagttgcttgaaataattctctagtatagcatactgcccactgaccaagccttctagttcttctcttaattaggctcttgctctataaaaataccaagtactcacctttgaatattttgtatccttggatatctgaactagactttgaagtgagttgcaagccactgtgcatcgatatgctatattatctgtaatcccaatttttgtccactcgacgtggcatgtccacatagtcaaaagtagaagacacgtgaagaacaactcatcactaaccggacaagatagtgatgtacggtttctcatccatcaagatgtcaagatcacaagaaggaatcaaataagaagaaccaggcaagtcttcaagacatggccagaccctagctggccgaccaatggtggtagcatgtgtcaaacaacttgcaaataaagatggcctaccaaaaagggcaccaagcttcgaacaacctacagcatgcctgcacaaggtcaagcagcctgcctgcacaaggtcaaacaacctgcttgcataaggtcggatagtctacagcctgcctgcacaaggttagacagcttgcaacttgcacaatggtggacaacttaatgtcggacaggtccttggccaccaagccttaaggtttcaaggaagaataatacaacctaaaaatacattgaagagaggtcagcactaacctgccaggttagtgtcgtgcagctttccaacctgccaggttagtgtcctgtagcttcacatatgcaagatcccatggctgcacaatggacaagcaagtttgtcctaatatcaatgccacaagcaaagatagaaatgtccacaagccaacaaggtcttggacggacctatagctggtcaacaagtagtggacaggtttcatgaaccaagcagcctttgataaggatggccggccaagtgtacagaaacacgccaacacttgtgttgttcaaaaaagccttccaactcgccctcaaaattcttacgactttgaaacagttcaaactgcccacaaagatagggactctccatcaacaaataacaaccttattccttagggattattaattatttacattgcatttcaaatatacagtgtaacttccctactttccaggaatatctctatgtatagtttgtaaactctaatactatataaagggtcatgacctcaagctaaaggaccatgctcaataaactttagacgatgcaagtacgctcaaaagtactatagcaacaagtcctctctcttttctcatacttctcacttgcaaaaaacactctcattgtaaaattgaagagagcctagcaagaaattataaggtttcagtctataatttgcttggtattatctcaagagtgaatataattaaaaggagagtatgtcattaccaaaacaaaaggggtcgaacctctgtaaatctttttgtctctatattatcattctcatgtggcagtcataagcaagaccaatcctaatcagactccaagtcggttggctaaatccatagtcaacatgaattgaacactaccacatttctcatactttgttttgtgttatcccaatttttgtcctcatgacgtggcatgcttacatggacaaacttgtgccatgtggcattacatctcaataaaaggaaggccaagtcaacaaccaaaccaacgaagactccgacactcaaacggggatcaagtgacaatccagctcgctcttgggagttggttagccacccctggttggccctatggctgccaggccaggaaacaactttatggtcaaccaacctggccagcacaaggccatggctggtcaaggattgcttagtggatccccacgggacacacctacacgtgggcatcataagtgggctgtgaattggggcccaaaagcccaacagataggcaaagaatatctagaatctaggggtattttggtcttatgtaaatatctagctaactatcctattttcaagggatttaagttgtaaacttagggtttaggcctcctatataaaggtctaaacctctagctgaaaacctaagttgcctaagcctcctctaagctagaaatctcctattctgtaagtgtcagactctctctctctctctctnnnnnnnnnnnnnnnnnacacacacacacacacacacccaaacatagctgtacaatactcttggctgtctaacacttgagtctgccaggtatcaatccatacattgtaatccaaagggcactatcgtagatcccacctatagcgattgagatattgattccctcggtatcaatacaattaaaaggagagtaggtcattatccactaccacatggggttaaagctctataacaaatcccgttgtttattgtttcttactcttatttgtgcacacacgtggcaagcatcaaatctatcgaccccgttgtcgggtgatcacttttcaaagtcatcagtttggtacttccattgagagcgtggatatcatgatttgatcaaacaccatggtgaacacaagaagaactcctgttccaccatctgcatcttcgggtctccctcaagacccatagattatagatataaacactcgggttccagtcacaacagggatccccatgaataccgcaaatgtggtgaatcccatcaccacaacaggcatagaaagtttagccaccactgttggccagcctgacgtaagcatcccaatggatgcaagtggcagccccattcctccactaaaggaaggacccaggggcaacaacctcctagaacaatgactggacctcaaatctggagaaacaggtctgggagtggatgagctagcaattagcgagcctcatctggaactaccttgagttggccagactcagggaagctgaaggccggcatggctaattgaagaaccacgcgctgctgattgcaatgtatttgcacagcaaagacgtaaattcctgagaaggatggatgaccaggagtacttccttggatctcaccaggaaaaattagatcgccactaccgggaggccagcagttcaatcagagaattaacacaagaggtcaggatcttcttagggatccactttaagtatgattaccgtcaagttcctcaggaactaggacggatcttcccttgctggagggatgatagaccttttcccaaaggttaaacggtgagaacaaccagatcccagcaaccagtggcttagggggccggccagggatctctggctcaatagcaacccacactgtacaaccactggccgaccatccatctgtaggagtacccatggtcgtccacggtacaacacttcctttctaaggggatcaaggcacatagaggttgatcttcgaccaacaaggaccgagactgggtggaaacacccaaaatggcgattaaagaagtgaaaccgataacaccaaactccagcaatatgtgtgctctaccctcgatcaacacacaattgacaccagtcgagtgaggagtcacgggcagccagagcctgtctaatgcaggtctggccggctatggaggcatcactggcagccaaaccctaccctttgcaggcctgaccgactatggaggagtactgggcggcaagaccctgcgcaatgcaggtctggccagccaagcacaacatacaggcataaacttggccaacctaggccaacttccgcacctggggatggccggccagggtttgtagggcatggctgatcttcaccatacactcactcagagtatggtcagccagcctctgtcccttcagaatcagtaacctccccaaggaggaccagtcaatcaagtccccatggcaacagatccttctgtgcaagcacagttggaccaactcagggacatgatttagggcatagctagctcaaagccatcagacctcgaacttgattggtcgaggggatcaccattctcggcatatataaatgccctacctctacaaaagttctgttggaaatattttaccannnnnnnnnnnnnntaccatgtatgtttcattaacatcct

SEQ ID NO: 16873 - DNA, 5512 bp, Cannabis sativa
aaataaactgaacattaaaaatatgagaaccgtgaaaattatacatgaaaaaagagaacttaaataataaatagtatcaaaatttcatttctctacaaattttaatataaaaacatttgattacatagtagtatgtttttgggtcattttgaccttccctccacttttctctctcatgttagttttctttccttccattttttttttttcaccgtaccaaacatagagaaagtgaaataaaacaaaactagagaaatacttccttgtaaaaaaaaaatatacttgaacagttaactgaacccgccaaggtaagaaataaataaacctgtcaattcaagtcacatgaacaagacattcaaaaattgttctctcatattattcagcaaaaaaaaaaaaaaaaaagaaaatgttctctcataaccttttcagtactcttttgtctaattcatgaaaaagcagttctagatatattgttgcatctgaaatatttgcatgtaagcaagtatatacaatatttgttgtattgaagtagtgaaatacaagagtgattgctaagtaactaaacaaaatggcacttagtactgtaacttgtctccaaaagggtgaaaaacttgatgaccataagcattaagcaataatcagatgtacatacaccaaaaatgtttaaacatgttctgtaatgttaaagcttcaccagtaatctccgcaagagcaggaaccattcttaaagtgatggaatcgacgaatatctctaactatgatctccctgtttaaaagctgagaagtacacttgataaagttatgacagtcagtacaaactctaagatttttcatgattcggattggagttccagatggcatgctgatgattccataagcaatagccagcttttcgctatgataaccaaggaactgctcaccctgctcttcttctacatcctgcattacttgatccaatgcagatgagtaacctatctccttcaatcttccaatcagcgcatctaagtatgagtatatctcagcttcacatggatgtgacctatctcccataacaaaaacgtggactttgttcttcagttggatccaagattgaccagggagtttattgatccctctatgtctcatcaagctcctcactttagctgcttcttcccatctttgattggcagcacacatatttgaaaacaggacatgagaaccagcatccaatgatttgaggtggagaagcttttcagaaacccagtttcccatgtctatatttttgtgaagtctgcaagaagatagaaatgacttcaaaactaaactctgattagaaacatgatttctatcaataaatttcttagcctcatccaagcgtccagcccgaccataaagatcaaccatacaagtgaagtgttcaattccaggcttgatgcgatacacttctttcatcaagcgaaaataattgcagccttcttcaagaagcccagaatggctacaagcagttaaaaccacagtaaaagaaatttcatttggtttgattccctcttcaatcatgagttcaaaaacccgaattgcctcatgtccttgcccatgtaatgcacaggcagaaaccattgatgtccacaacacaacattgggactagaggtttgttcaaaaatcactctggcatcctctaagcttccacatttggaatacagatcaactagtgaggaacctaagtgaaaatctagttggtgcccaattttgtgaatgtatgcatggatatgttgaccgagtgttaaactcccaacattagcacagacagaggcaatcgttgtgaccgtaaatttgtctacgccaatatcatcaccaaccatagaaacaaaagtttgtaaagcattttcatactcgttattatgaacaaacccggaaatcaatgtgctccatgctacaacttctgtcattgactcatcgccagtaatgatgggatttagagagttcgaatgaagcggatgtatctttctgaagatcatcaatgccttctccattttgccacatctgcaatagaaatctataagtgaagtcttaataaagcccttgttgtggatgcccactgtaatgacaaggttatgaatttgtctcccaagttccaagagtgataactttgaagccaaaaccaaagctgttgagaatgtgatttcattgaatgtaggtcccttgtttgccatctcatagagcagttctaaggcagtaccttcataccctttgcgcattaatccatctataatagtattccaactagcaacatctttgaaaggaaacctataaaataaatcaagagacttctccacatctccaatacgcatatgcccgcctatcattatattccaagcaattgtgtccctctcttttctcctttcaaataatctttctgcatattgaaaagcgccacattttacatatacatcaagaatagaattttccagtgcaacatccaaatcaatcccatttcttactatccatccatgaattcccttggctatctgaggttcacttttactagaacacaactttaacacactagataatgtgaattggtttggaggaacaccctcagtctgcattttcctaaaaagtttagagactgtactagaagaaccaattcgagctaaacccgaaataaggacagtccatgagtggatatccttgtcaggtatttcatcaaacaacctgtgtgcattctcaaagttctgagatttaacatacaagctcaggaggtaatttgctgtattcaaactcctaactgtaccatccttcactgctttggcatgaagaatataaggcatgggatgggcttatcagagaaatcacacttgagatactgtaatggttgcttaaagaagtacaaaaaaaaaaaaaaaattaaaaagccatctttgaccgcatcaaattccaattctaattcattaatctttgaacacataaaaagccatccttgagcacatcacactaacagagcaaaatcacatattacaaaaacatgtgtgatgtttgttccaagtaagacgaagtatggtgacaaacatgttcctgccaggaccaaaaagagaaacttttaaagataaacaaacaacaagacaagcaatagtctaataaaaaatctgaataacaacgaactaggataacatcaaaagttcataaaactttcattttaactcgcataaaactaggatggtgaaatgaccattgaaactaaacaaggtaacataaataaatttttataaattatttaaatataatgccaactacaaagttgttgaaatacattaattcttcgattctagaggcctcaacaataaatgttgtatagtattaatccaaagaagacatctcaatatacatgcagataggaaatatgaacttgaatcattaggaatgcataggaaagttgtggatatagcttcttccgacaataatgttatctgtaaaacctttacttagaaaagaaaaaaaaaacaactaacaagctgaagcagatgtaacatatatagaacaaaaaataacaaagtgaatcatacatatttatgcatatttatacatgcatgtatgcatttacacatatgtgagaacctaaatcttaataaaacaaatacaaaactttagtaatgaaagccgatcggcaataaatggtgaaaagacaatcttataatttccaagatcacatttgatcttgtatcacaaacccaattcagtaaatcaaatttcttcaaagaacctaagtaaagtaaaaaaggaatctgtaatagaatactctataaaatataatagaattagccttctcaccattggacaatgattgttatatacgcttgatcctgtctaactgttactgtctttccatgggcatccgcatatcctctgaacccaagtcctttgcaaattgcattatcttcttctccaactctaccatctgcctcaaatgaaatttaatgaattagttcaaaaaggagattgatttggctatttgtgatcagctttaataggtatgtaaaacaaaaataaaatatgaaatgataataataattcatatttactattgtgctatacaagaccacataaccgaaaaccatgtataacatgtgcaattatgtactggaatgaaaaacattaggagatgtaccgatctatgaaaatcaaaaccattattacaattgcacagcacattaatatgtattatataaatatataaatatatatgatacaaatttagtaatacttacaaagcactcagtaaaaataaatacaagtcttaaaagaatgcatgcttcatttaagtagacatcttgcccaattcacactagcagttcaaggaactataaaaaaataaagcatgttatatcaccagtaaactaatctgaaacatatatgtatcctctaaacataatgctagaagcttgttaattgttactttagagaaactaaaagtaagaatcaaattattatcaccaccacatgatccaattcaaacaaaaatgttaaaataaaaaagccatctctgagcacataaaaagccatctttgagcacatagcatttttagagcataagcacatattacaattacatgtatgatgtttgttccaaggaagaccaagtatggtgacaaacatgttcctgccaggacaaaaaaaaaacttctaaaggtaaacaaacaataagacaagccatagtctaacaaaaaaagaatctgaataacaaagaaatacaaaatcacagagcaaattcaaagatatgatttcatggtgacaaacatgaatgtaaattcattttgtaacatcatcaacaattcaaatcaacaccgtgtactcaaaacaaagctagcttagatatatgcatgtaaccatgtaaatatatataatataaaagccgttccttcatgaaactctaacattctaatgagaaaaccagcaatttataatgcttccatttctgaatcaaacaaaacaagaccacattacaccattataaagtaactcatccccggcaatagcacagcagaaatagaaaataataataataaaaaaaactctttacattagaaacttagaaagccacagacctgaacccaaattaaaccatcttccgaatagaactataatgtaaaaaaggcataaaaaatttaagaattatggtatctaaatctacaaagaaagcaaaaatggcacaaagagagaacagaagaaagttgaaactaatgagaaaaaaataccttcgcctcgcactaactgcactcttagcagaagaagacgagttggtcctctcgacccacccaatagccaccagagctgcgttcgcgtcccatcgtcgtcgaacggttagaccccccggtatcccgttgctgtccattcaagggagaatgactgagagagagatagagactgaagaagagccgcgagggaggggtatcttcagtctaggtatttttcgaaacacagaaaatattatgtgaaaaaaatgttaagcggaaataaaacatcaaagaaaaataattc

SEQ ID NO: 16874 - DNA, 5209 bp, Cannabis sativa
tcttatctaactatcatagttcaagaggaatttttaacgtctaaaaaagttcaagaacatgatttggtacatattaaagtttgtaacgaaactcctacttaccctttttaaaattgagatttgttaagtatattaaatgaaatttctcatttggatagggtaacctaatattaaaacgtagacaaagggaaagggaccaacatttgtgtaatagaaggggcggagccgttctcttcaaacactcccctccgcttaaccacacaagccagagccggtggcgatatttctccccaaaagattagggtttgccgaacttgaacaaccatggagagcgccttcgcgaatgcgtctgccatttctgatcagaggcaaaagatcgagcagtacaaacacatactctcatccgtaatttcttccaacgatacaacccaggccaagaagtttattgaccatagtaacatctcgaacttacttgctttcaccatactattgcacctaagtctaatcggttttaggcgcttagttttaccctaatcgatttcataattgtattgcagtgttatctgacgatgtacctttggtggtttcccggcaactacttcaaacctttgcgcaagaattaggggggttgcaaacggattctcagaaagagattgcccattatatccttgcgcagattcagcctcgggttgtttcgtttgaggaacaggtccgtttggccatttatttttatttgtttggttgctatttcaatgtacattgttctagaatgagaaatttggttatgtttgcctttaatagggttttggattttgtcttccggagatgactattgatgtttttgcagaatactgctggagataattaaccctttattctattgagttttaaaaatgctgcaggtgctaatcatacgagagaaacttgcggaattgtatgaatctgaacagcagtggtcgaaagcagctcatatgcttagtggcattgatctagattctggaatgaggtccgagagtaagaccctattttattttcttgtttattctcatgaaaatgagtatctcgcagttttctagaatgttaagcatgtggaattttgtttgatgtcttcatcagaatgattgacgatacgttcaggctatcaaaatgtgtccaagtagctcgcctgtatcttgaggtacatgtaaagaataattattacacaattattgaagttactattcgttagttgatgactatccttccctcccagaaatatatctgggtcattgtctctacttccgcagagtgtaggaatagtagttctcttctccttttcctttgggatttcaaagtttttagtatgctgttgttgtgcttgcattttatgaaatgcaggatgatgatgctattaatgcagaagcttttatcaataaggcctcattcttggttagcaacagtcagcaagaagtactgaacttacaatacaaggtccattgaaatgatgttgttaaattttccatttcaagcaaattttacgggttcttacttcttcctttgccccctctttttcctccaggtatgctatgctagaattttagacttgaagaggaagttcttggaagcagcattgcgttactatgacatttctcaaatcgagaagaggaaaataggcgaagagtatgtaacttattatgtttttgtgttgcttgtaaatataatctaattatttatttccaattgttaacaaattcttttatttttccctggttgatagtaaatcaattgagcctcgagcctgatttagtgacacactatgggtgatatatttttaataaatattcttatttcagagagattgatgaggaagcactggaacaagctctatctgcagctgtaacatgtacaattctagctgctgcaggaccccaacgttctcgtgttcttgcaactttatacaaagtaatttgcttctcaagattactatacatatactatttactgtgttttttcagttcttgtgttcttgtattgctctgatactttgagattcttggtgtaggatgaaagatgctcaaaattaaagatttatccaattctccaaaaggtactcacatcatattttgtgttgactgttattgtgcttccttactttgtttctcttgcttctttttgaaatgctgtctgttgtataattgggatgctaggtatacttggaaagaattttaagaaaacccgaaattgatgcatttgctgaagaattaaaagcacatcaggtaccttaatctttctggttgttgcaacttgcatatgcagcattttaattatgttgttgagaaagtttatttgtgtggcatcatttatcaactttaacagaaagctattttacctgacaacttcactgtccttgatcgtgctatgattgagcataatttgctaagtgcgagcaaactgtacacaaacataaggtatgatagtgatttggtttctttattgctcatcttaggcttccaatgcttttgttctttaagtccttttacatcattttgatgggattgatagtgttaacagctgtttttttttccagcttcgatgagttgggcacgttgctgggcattgaacctcataaggtcttggtcttttgttattttcttttttctctatttaagctagtgtttgtgtgtgtgtgttttgcactcaatgttatttctttcattttttgaatcctggggctttaaatttaatatccagtggtttatttgaatattataggaatgagatcgttctagtgtagtcttagattctggaaattagtatgcttcttttgtgtcaagtaattgaatttgtaactgaattttatcggatgtccttgaagggacagtgtcaaataatcgaattgttgttttatattgagtaatgctgttcctcactagttgaggctagctcaagtgagtaatggttctaggttttgaacctgagctgggacctagcagtttcgtattaaaaagcaatgcagccttgttcttttgctggtgtgctttccacgattgtttttgttctttttaagttcgccccaagaattttggttaaactatgcagtaaagtggttgaggtggcacgaaataaattagttatcactgaagtagttgtggtttatggctgtcttttctagcactggttcattttactctggttaattttttactcggttctttctgaaaatactgtaattgttttgcaggctgaaaaaatagcatcaagaatgatctatgaggacagaatgagaggatcaattgatcaggtattacaaagtatgcaatgtgacatctgtctttcaggaggtcatttcaaggatttaagtgatgcatgattttatctccatctagccttctgttaagtttttcatgaagttcacttgtgaatcaaattatttttggaaaattttagctgactgaatctttgtactttcctttcttctgttataataactccggttacttttcaagattatcaaaggaaaaaaaatagtttctttttttttacatcaagcactaatcttacaagtggtatgtcaggtggaagctgtcatacatttcgaggatgacacagaagaactgcagcgatgggatcaacaggtaatagttcatttttctctcatacatttcattgctgttttcatctttgtcttcatgatttttgcatcttcatttggtttataagtttcttataccacaaatatctttacatatgaaccagatagctgggctgtgtcaagccgtcaatgatgtcttggacagcatggcaaagaagggattgccgattccagtttgatctgctgcatctccattcatgcttgaaaagtttcttgtcagccggttttggcactgtaaggatttttatgatcattgtcactgtatattatgttactggacactgcctagcaaagcagtgtttcctttaatttgaaagaatacttttggtaatcttttcttcttcaatcgatacatttttcatttgttctttgtcagcttccttatctggtggtagggtggtggtgttttccctatgcttgtcctttcatttagttattatcagtatattaattattaaatataatttgtataaactattttgttagtttgcaagccgattgagctactgagttggcggtgcttgtctttacaaagagcagggtcgcctagagctagggggtcttccattttctattgcttttacttctgctaattattaagctggccctgcataaatatatatatagctagtttatgatcgtaaatgtgttaacgtgatgatttaaaaacatccagtttcactcattcaaaaagctctgtatcttctttcttctactgtcaaggaaaaaatcccaatacacagtaatattgttatattttttaagcaaatccgatatattgtataaactccacttcttttcctagtgggaatggaagtttgattgattgtgaaaactcataaaataagttaataaccaataggtgtacggcgatggacgcaatcaatgttagagcaatagattttaagggtgaaaaaattgcaattaccagggaagtatgtcgtaatttaatatggggagcgaaaaagaaaatgacttcgttttcttgctctctagttgaaaaatgatattaacatggcaattttgttgatgacctgcagtaatatgatttttttttttccttgcacgcctagcagcccgaatctggcaacatgcgcattgtgcagtttttgagcttgctgctcgtgtatgtgagccaggcgtcgagcacctcaacatgatgcacgaacccgttgcttgcagtatgctgcttgcatttctactttatgttgcttgtgctgttcatggtcagcattgaccaccacaatcttcacattgctcatttaatagttttacatctgaactgcaacaatcttcttaaaaaaaacaaagcttttaggtcaacaggttaatgcgcacaaagttcttaggtcaattgcatggtcccaagagttgggggagcttattgtacaatataaaaacttaactagctcaacaattaataggacttttcttcatattgctcgtgtggatgaacttataatggcatgtttactaataagtaatgggaatcaatagtaaagtaatcattcccttacatacattattaaaattaggaaagggagaacttgattgaataaaggagaaaagaaagggaga

SEQ ID NO: 16875 - DNA, 6089 bp, Cannabis sativa
  modified_base (83)..(84): a, c, t, g, unknown or other
ctgtaaatcgtcgagcagcagtttaactcaggttggccggcacacctgaattcagaactgaggtaagattagtataatgatanncatatgtgtttacatgtttagcgtacatatttgttaatcctgttagattacatcgatagagataacattatacgtagaatgatgttggataccgatatatgtatggttggctcagatactaattgaccctatcacattggtacgactagagtatgactagcataccgagataggctaatattatggtcgatagtattttcgtacgaacgttctagactcagtaccgtgtgggacacagagatagggttatggttgggtgtatgggtgactaattataattcggttattgatttgttttgattatgtttttcttactgagtctgtcgactcacagatatcgtttgcatgtgtaggtaagggcaaggctaaggttgagcagccgtgagagcgagctgatggagattgtacatgtcggagcttacggtctttgggacaactggttgtattttgtatggtcgttaggcgacatcttttgtaatacatactttgtaacagttgtaaacattttatactcgcgatcccgtttaaatatatatgttattttggtatttataagtaattaagtaaaattttagttattcacaatttttaataaactcattgattagcaacgagctgcacaattaagttaaaatcacgacaacacgcctaaactagtagggtgttacagtgtgtttcacaacaggagaaaaaatctcatcataatcaatccattctctctgtgtgaatccttttgctaccaatctagctttgaacctagactcttcaatcccatggattccctctttatacatgtagacccatttacagttgataaccttcccattggcttcatttctgactaaaacccaagtcttattcttttttaaggacttgacttcatcacacattgcttgattccactcagtttcattttccaacctcatggcttcttcataggacattggctcttccaccaccataacttctatactgagagcataatgagccacatttaaacacccaaacttgtcagggggttttattgtccttaccttcctatctcttactaactgataatcctgagcatcttcttccagctccagctccacctattcttcttcaatttcaacctcatcttcattcaaagttgtgtcagtacgagttcctacagcctttgagctacccttcaatgtgtctttgtagaacttgccttcttcaaaggtcataatcctgctcacaaagtatttttgatgttctcttggctcaatgctccacaatctttagcctttgacacatgttggataccctagaaaaatacattttatagctctgggttccaacttgccctactttatgtgttccacacatccaaaaactcttaggtgctcataccatgaattgtgtctagaccatatttctattggagttttgaattaattgttgatgaagggcatctatttatgaggtaacaagctgtaacaattgcctttgtccaaaaattctttggcattcctgacagaattatcatacacctaacaatttcaaggatagttctatcctttctgctaaaccattttgttgggggtattcttggtactgacttatgtctagcaataccaattgacttacaaaatcggttgaattcatcagcacaaaacaccaaaccattgtcagtccttaatttctttattttcctttcagtttgattttctagcatggttctcaattttttaaacttactaagaaaagtattcttgttctttaagataaatacccaaagatgtatagagtaatcatctataatagttagtaagtacattgctccacctcgagacacatttatggagggcccatataagtttgaatgcaagtagtctagaattcctttggagttatggttttatgttttccatcctttgacacaacattgacttgatcttgcaggtgtatttcgttgcagaacataaattccattaactattgaacccttccataatgatattttctcccttaattactctcaactttccatcttctactttgatcaaacaaccatcttgatccagcattgatactaatatcaaattccttttgatctcggatacatttctgacgtgatccagttgagtaattcttccatcattcatttttaatatgattgagccaagccctattattttgcaagacctattgtctcctactttgacaaccccacatgtaactttttgataagaccagaattgatcttgatcagggcatatgtagaaagaatactctaagttaagaacccaattctattgcatatttgtcttggatactaccattacactagcactatcataaccactatcttctccatctgagataatgtctgcatttccacttttctttagattgtatccttttaagactggataatctcttttcagatgattgaaagagttacaaatgtagcactttcttttgaattttaatgcagttttcccattttctgttatgtcctttgttcttctttttggattgttttcctctaacaagcaagccatttctagtgctttcctccttgatctctgacctcctcttaatctctttggacattagtgctgattgaacttcctcaaatgttaaagaatccttaccatacatcatggtatccacaaagtgtttatagttctctatgggaagagaattcataactataatggcctagtcctcatcttcaaccttgatcctaatgctctctaaatctaggatcaccttgttgaaatcatctaaatgttcttcaacatctttccctggcatcattttgaaataatacaacttttatttcaaaaataacttgttttctagagattttatcatgtacagactctccaatttggtccaaactccagcagtcacgctttcctttgagacttccctaaaaactttacccctagacttaggattatagcattgtgtgcttttttaagaatatcggtcttttctttctcagttaatcatttaggtaagttcttctttccttggatggccgattgcaacccctgttgaatcagcagagctaccatcttgaccctccacaaaccaaagtcattcttgcctgtaaacttttccagatcatacttagcattccttattcctctctgttatttgatcaaactcttgtatcttcaacctcggatcaataatttctttcaaagctcaagattcacctttaaagattaagattcaccttcgaacagtctaactctgatactacttgttgacgatgctactgatcttgagccttagagacactcacaaaaacaaacactagaacatacacacagacacactacacataagtacactcacagaaccaaacacacataagcactttaacggcgtttaacacttgggaattcttgaaactcttagagcattttatttattttagcaattgtgttacattaaggaataagtcgaaatggcattggtctagtctatttatcgacttgacctagggcggaacatttgtactcgaaaacccatccactagaccggaactcgaaaaacccaaaaaaattgggtttaaaaaattattggtcgggtttgggtgtaacccaattacacactgagtcaggtccgtgtgtcccaaaaaactgaagttcaggtttgggtataacccggaacttgtataaaataataataaaatacatattttttatttttattttcattagcagccctaaatctaacaaaacccctaaaactaaatttctttctcaaaatcaaaccctttccactcttcctttctctctctagcagtcacacccaatgttgctatatttttattgtatacgtaagtgtacgtaatctattgtagttttactcacacatgtgaggtcaaccaacatggaattcgtattgagtaccactaagctagatttatgtttttatttgataaaattgagaataatatttaacaagaattaaattaaaggcagtaaaataaaaacagaataacaatgtagttaactatggatgaatgcttatgaatatgaatcttgttatttcagttacctaattgttaatgtaaattattgatgtatgttcttccctttaagtgatgacagattataaaagtaagtaacattaactcttctcagatcattaagatcctaaatcatatgttatctacttgcatctctgaaataaattaacatgtaacttgcattaaacacaaaatctaattgtcacataggctatgaaaatactctcgttttacatcaaaacctatgtttgttctattagagcattcctaatattcacttctcagattttatattaggatcataaaccacattaaagatggtcagtctaaaacatgtaattaacacaaataagaacaaatcacccaatcaaggaaagaaaattaataatcactcatcatatccctaaatttggagtttagttcatgttcatatccataataaaactaaaatagaattaaacataaaagaaataaaaggagaagaaagaaattgacggaggaatgaattcgggttgccacttcgctctcactgtcgtcctttactgcttctagggttaaaattctaagtatctgcttcttcactagaagtccctttaaatagagtctgtttaaacttcaaatatcgcaaaaatatgaatttgccctcgagaagtacggacattctcgtcgtggccatgaaatgcctcgctacggcgagatcaccaccttaaactttgacactctctgccaagatctcattgcggccatgaataaatctgctgtggcgagaagacttggccgggtccaccatagccctcgtcacggccactggacccacactaattttttcaattctgccatcctagctgcgaccacgaataaattagttgtggcgaggaatgcaccgaatgttattttctcaatttaacttcactcgcctcgatctttttatcacacttttgaagctctggacttttacaactataacaagcctgaaaatacagaacacaagcgtaattctgtcctaaaaacattaaaaacgactaaaactaattctaatttatacctgaaacctaggctaaaaataccctaacaccaaacactcatatccacctacacaagactactaacatgtaccaacgacggaccacacacagttggtgaggcaacgacaaccatggacgaccggcgaggcagcaacgaacactcacatcgtgagcatattgactcctcctttcttctattttttttctctttactttccgtttctctctttatttctctttgattcgggttgggaagataatggaagcagatcaatcctccccccttccggccttgctccgacgcccatggtggtccaactctgatctccctctctctaatttctttttttcttcttctttctctttcttagcctctttgaactgtatgggttgggaatagaatgggaattagggttattctatttttcttttatagtacactggtttggattggaggcttatttttttaaaaaatgtgttggaaggtccaaacccaattctcaccaaaaaccaccaaaattttggtctcatcaacatagacaaacatgaacccaaatctcatcaaaacttgtctacaaatgggtgagttcagtattaaatttcccacacccgaaacctagacccaaatatacctgaaaccttgaaacccgcccgaatatgcaactctaacttgacctcttacaacaaaaccaatttttaactaacctcctaaactaatagtcctcactaactactaactgaattatttgtcaattaattattaacaatatcttatttttattactgtaaattatttataattatttttaaatttactagtggtgctaaataaatagagccataataaaaaaaaataaactaaaaaactaaagtaaatattgaaacaaataaaaaaaaaatgcactacaaattgtttttcaaaccaacttctctttcttacatttgaaaattaataataaaaaaaa

SEQ ID NO: 16876 - DNA, 1732 bp, Cannabis sativa
tttgaaactgttccccaccattcttatttcagcttggggagattggaaggctttctgggtcaatgaaaaagttggagaaggatctcaagggcagtgataaatatgaagtaagtcaatgagacaacatctggatttttattgtcttgatatagctgtgctatttcttcatgattttgtttattgatgagtgcagaatgagcagtaccgtgctaaactcaagaaatcaaatgagagaacactgtctctgattaaagcatccatagatatagtggtagctgcagggctgcttcagttgtccccaaagaaaattaccccacgagttactggagccttcggattcaccagctctctcatctcttgttatcaggtaatcactgatcactgatatttgcagtttctgtcatgagtattattttttatctgataatattcaattcattgttatgcagttgcttccatcaccagcagcaaagtccaaggcagcctagagagccattctattgtcctgaaagcttctacagtcgtaataattatttagtgtgatacaaaatccatggcaatggaaagcctttaaataaagacttgtgaaattgggctttcattatattctgttccatactgctcttcttactgtagcaataataaatgttgtttctgtggtcaatagtatttagtaattaggtggaggaaaagtactcactcaatacttgggtagtttattctaatggtaaatgtatgggccaaacccatttcgattttattacagatgattaaatcccgagtatgctttcgttcgtggaatttacagatcaaaggcagatgattcctcaaatttaatgtaattcaatatgcaactgctctagcaactgtcattaactgatgccgatttttactttagtgataacgaatattaaaaaataaaaacaaaaatacaaacttcacatttctcgtattagaactgtgatgtttcgatctttgagagataaatttgtattatgtattgaattgtaagagtacaagttaatatacatgaattaaaataacagaaagcgtaacaatccttttaacaacttcttactaacacaactaacacctctgttatttaactacctggatccttgacagccccttcaaactgacagtaattttagaaaccatacacagcttgtgtctaaactctgataacctagtgctagagatagagtgagatagtctgcaacctgagttgtagaaagggcatatttcacttgaatgcgctgttgtgaaaccttgtctcgaaaaagatgtagatcaatttttattatgttttgtacaagaatggagaatagaatttgcagcaaggagggttgtgctttgattatcacactatatcaaaagaacaactacttcaggaatttgaagctcatggagaagcgactgaaccaatgtaacctcagcaacaacactagcaagactgcgaaactctacttcagttgatgacttgttgattgtaacttgcttttgagatttctaggccacaatgttacctccaaagtagatacaatagcccgtggtggagtgcttgtcatttggattagatacctaatcggcatcatagacacatcaagaaaaaaaatctattactggtttgaccaggagaccatgatcaagagtacctgcaatataccttagaatttgttttactacaatctagtgtgtatccaaaggatttgcataaattgacacactttat

SEQ ID NO: 16877 - DNA, 5984 bp, Cannabis sativa
  modified_base (5461)..(5482): a, c, t, g, unknown or other
tcagtggttgacagttttaagttaacattatcgtgtttacagatagaaaggatgattagaattttaagcaggactatcaattttagtcggggggatttcttttgtgaaacgtcttataagatattgcgttagtggtcatacacttcattgatgtgccaatgcatggttgcatactataaatggatgttggctttctgccttttgtctcaaagatgtaccattcttgcagtaggtggagcttagaatataagtttttatgctggacgaacctgatatgagcagcataatgttttgttttgatttataaacacttaacctctgtttgcttactccttttttgtcatatgtgttacagaatgaacttgcaattttggaattcattcatctattagttgaaaccatggaccgtcattttggcaatgtggtaagttctttattctaagaatgtgtagaatttaaaattatatgtaaaactagaaatatctgttcaattccatttctttaatcacttttctacatgaatctgcagtgtgagttagacatcatgttccacttggagaaagcccatttcatgcttgaggaaatggtaatgaatgggtgtgtggtggaaacaagcaagagtaacattttagctccaatacaactgatggacaagacatattaaagagtttccagatgggcttccagggtttggtctgaggttatcaatggaattgttgactttattgttaatacttgtgcaattaagttaagagcataaaattcaatccctatttgtaaaaactaatgtttgatcacatgaaatggggcatatgagattgtttggaagtgtttttttaaggcctttgacactggatggagtgaactacaaagaggttaaaaacaacgaaataagaagaaactgacatttgtaattacaaaatttacaagtatcttattaattttacattgttcataataaacaccaccgtgaaatggtttatataatcaatatcccagtaggcattagaccatattggaaaatatcaattgatgtgtaaattatggaacaattttgtaaatcgatatcaattgatgtgtagccaaaaccctgttcgactttatgatgtttcaacattcaactgattcaacaggctgcaggctttccatcttttctgggatcactaactgcaacaagtgtaccatagagtgtttgtccattaggagattttacatttttcctacccatggcaattggggattgtagtgtttgaacaataaactgagtgatggcaccccctgccctaggcactatttgatgacctctttcttgcaagaacagcttggttccttctgaaagctcaatgtgattgccacatatcactgtccagttctcataggagacctggttaggaattaactgcaaagacacaaccacaaaatcaattagccatttggagatatttccttagtgatatcaattctatgacttgaaacgattcaggaacctcatgatagatccttggactctgaactgcagccaatggatccattcccaaaacaaaatagttaagaaaaacctgagcaaccgcagagatgatatccatacccccactgccaccaaggaccccaactacttgattatcctgcaaggagcataataaattgggaaaacatcacatttaattggtaaattggattattaagaagatagttactagcatcagtatctggtctgatgctttgaaactcttcctctttaccttggtgacaataattggggtcatggaagataaaggtctcttgttcggtttgataaagtttgcaggagcaggagggagctcatctggggttatttctgtaggtgttgagaaatcacccatctcattgttgagcacaaccccagtggaaggggagagaaccccacctccaaatggaaaatttacggttgttgtcattgatactgcatttcgatctgtatctacaatgctgaaatggctggttccatgatctcttagctgactccacctgccatttgtgatctcagtagttagggcaccattatcatagacctcttaattgagttatcaaggctgaagggatagtacctgttcatgtagtactctggaggaaaagtagtattgtcaaatattctttccttaatttgcttagcaaaatctggtgaaagcatttgattttcatatttactaatatttacaaaatcagggtctcccaggttcattcgtatggccaacatgtgctttagcgattcaatcaaccgatgcacaccaagatctccctttgcagcatcagagcttccataactatcaaggatgttcataacctgttctaacaataaaagacatccttatttcaccaaaggcatcacttaagcattaaaaactatagttactaagcagtatcaacttgaaatattttgggcaaacacacattaccagagaaatcccgagggttccacttgaaggcggtggcatcccatatacagtgtagcccattacatctgcagccatggcatccatagtcttcaccttgtaatttctcaaatcctccattgacaaaatcccaccagcctctttcacatctttgaccagtttctcaccgatagaaccattatagaaggcttggggtcctagctctgcaatttcctctaaactacggccaagtttcacattgtagcatgtgtcaccagcttttaccaacttcccattaggagcaaaaacttgtctcaatccagggtcatttaaaatcatctgtgctttattaattatctttcctccaagcaaaggggtaattacaaatccatctttagcaagttttatagcaggttggaacaacttcttccattccaaacgtccatggtctaaccaggctttgtgtagaccagctatctccccaggaactcccatagacagtggaccatagaacttggcatcgggtgcatttgcatacatatcctgtttgttgaaatttcacatttttacaagaagtcacacttgtcaaacacctcaaaaagcatagtcaagcgtaagtgtgaaaaagatacatatacgattgactattgatatgattgagagagagagggagagagagagagagattttaaacctctgaggcagccaaaggagcagtttccctgaagtcaaaagcttgtgtttgcatggttgatgaagatcggaggatcatgaaaccacctcctccgatcccacttgacgccggattaacgacaccgaggcacaatgcggtggccactgcagcatcaacggcatgaccattctgcctaaggaatgaagctccaacttcagaacaacggccatcatcagctgcaacaacacccttctgtgactcgattatgtcagcatcatttacttgaatccaattactatgcttgtttccatctttctgtttccaaagatttatgttgtttccaggcactagaagaatcacgactgaggaaaaacaaaatatggaataagatcaaaatgaagtaggcaaaagagcagcagagccacaaaataacaacccagtatttaagattttattattataaaaaacaaattttggagataaacagacaccatttgtggtgtggatttgctttggaacagtcttttactaattcaccacaaaattggtcaaaagaactatgtaattgtatcaaaaagcactgaaacttcttcacctggtctctaactgaagaaaactaaactgagttgacttttttttttcaccttaatcccaaacccataacacaaaacatgatattgtttcgtaattggtatttaaaaagaagaagagagaattaagagagaaaagaaaattagctaactaacttatgagggtaaggagagtgagagtaatgagacaggagagaggtttcctccatttcttgttttcttgagaggcataggccaagagaggagatcccaggcggtggttacccatcattgcacaactgtacgacgatgaatatgtgatgctcctcttttttcttttttttttttttaagaaaaaaaattggtttaaggttggtaagttggaggagaggagagagtgagcaataatatttccatagccataagcaaactattacgtatcgtatttagctcttcaattataaacagcctattgctataagcattggtattcgtatgattactgctaattagtaaaatatatgggatttgatatgtaattggaataataatatgagaattgttgaaagctactattagtgtctagtattttttttttcggtgttatactgttattgatgtaattaaatattaggtctaatataatttaagaaaataacttttagagaatattgctaactaatcgtgaagcgtcacttatagaaagtgatggatactagcaatgctcttatatagaattactaaaagatattattagtaaaagatactgttattagtataattaagtattaggtctcaaataatttaagaaaaaatatcttttagggaatatagttaacatatcgctaactattttaagggtgtcaatcgtagtacccaatagcaatgctcactattataaggtataatattatgagagcattctcttatatatccaatagtgttaaataattatattattattagtgtaattaagtattagatctcaaataatttaagaataaatttcttttagagaatatagttaatatatagctaactattttaagggtgctaattgtgtacccaatagtaatactcactattataaggtataatattattagaacattgttattagaactaataatattttttaacaattttatatataaaatttaatatttaattatattaatagtaaaatgacataaaaaaaaaattattaagcactaatattattttttaacaattctatataacggtggttcgtttagcaattctcaattactattggtgtcatatttgtttttatataaaatgagctcaatacatattacaccaattacagttgagtgttatgttaaacattagttactttagcaattggaaaaatatcgttagttacatcgtgtcactcttcaacttgcgtgccgtccaaaataaatgggtatctaatttatttttatattatattatgtatttgtatttgtctaagttgccaacaattatttatatttttattttattggacataaggaatgatgattccgtatccaatagtgttaaataatcataagctacttttaaaactttcgtgcttaaatatttttaaaagattcccttaaaaaaaaattaaaaagatgaaattactactttattcatacaccaagaacctacaatcatttatttcaaaaaaaataaataaaaaataaaaaaataaaacaaccaatcattaaagtggcatttaattaggagaaataaaaatataaaaataaaaatgagaatgagaataagaataaaagtagaatagaataaaatttaaaatnnnnnnnnnnnnnnnnnnnnnnaaatcattaaattttttctcttgttacaattagaattgtcttttcttcctttttaaaatggaatagtcattccatcaaaatagtagaaaaagcatcacattggaatgtcattctaatactttaaaatgcaatcaaacaaaggaatagaatgaaaattattttcttttcattccattccatttcattaccttcaaccaaacgctacctaaattctcaaagtcgaacttttttattaacagtaatttttatttatatataaatatatttattatattaaaaataaatatgtaaaaaaaaatataagtatattattctatacaattttataaaaaaattattacatagaaaatacaaatggacactttatttacaaaaatacctccataaaatgtggacaacatttataaattttatgtgcttttaattatcaaaatacctcttaaactatcacttacaaaatcagacgaatgttgttgggtagttggctgaaggttgcatcaga

SEQ ID NO: 16878 - DNA, 4465 bp, Cannabis sativa
  modified_base (2879)..(2879): a, c, t, g, unknown or other
gccgagtctttctgtacggagtagggcgtgagggcttaatgctcaaggccctatgtatgcgcctcttccacctcggcgtctccgctcacttcgtcttcgacatgaccacgccgcccatacacggtccacaggatctcctcatttcctcggcgggtccgggaggattctccaccgtcgatgctctctgctccatagccagatcgaacggcgctagagtgttgctgctgactgctcagccggatacgggttcttgcgtgaagcacgctagcgtggtgggccacgtggcagcgcagacgatggcggatgatgagtcggtgaataaatctcggccgttgcttctgatgggcagtgcttatgagggagctctgtttgtgctgtttgagatggctgtgtatcgtttgggtgaggaactgaaacagagccctgagctcatacgaaatcgccataccaatcttgagtgaggtgagagattatttgagttttcttttaaactatatatacatatataaatataattatatttatatgttggtttcagttccactttgtaagtatgaattaatcaaaagagtttgcagtggaagtttactattaattgatttttcctaataaaattgagtttttaagtaccaatgattgccccttagttgttcatgcatcttctctctttttactttttcattttgacatcacaaatcataaactgctcaagaaaaataaaataaaatgaactgaaaataactaatatagattcgtaaaatgaagcaggtttcagtgacagaccaagaaaatgaaaaacaaaagactacagcatgatagattggtgtggtgttagtatcaaaaaagagaatgaaattaggatactgtaagacttattaatcttttccctccttggactgtgtatttacaacgtaatatttatcaaattactaattctatcgtaagattgagatttgatagctatctagctatagagataatcagttttgtatgagaaagtgtttggtgtggtagctagaaaccatgatgatcaggttctttgggctcaaacgaattttgttcagcgtcctttctctcctctagcggctgagtttatggccatccgtttcgcgatcatacttgctgtggaacaaaaattgcagaactcgattacagattttgaaattcagctcatcaaatccaacaaaagagacatttattccttttgttcaatttgggtaggattaatctttgttttgagtatagagatctaaccttctagctcataatcttactaagtatgctttgaatgttaaagctactactaattgaaatggggttttgctcactgttgctagtcctttcgttgataaggacctgcctttccatttgtaactgcttggttgtttaatgaattcttccctttcaaaaaaaaaaaaaaaagggtgtttggtgtaaagtttctgttagtggattttagttgaaaggcgttaagaattgagattatcactatatttgatagaaaagaaggtgtgacgaaattaatcttttttctttgctgcatctttctattatgactgtggtccttcaatggacaaatgacacaactctaagaagctgttagaattagtgatccttaggtagattataatgttgcaaatgtaacgatgattgcactatggtgtgtacgagatattcactttttctgttagtattgcttgccaaatgtaattgagctatatgctcctctgttgtaaatgacccttgacctttgataataaatagcaattattctagctctcaaagtttgagctgagatttcacaaattaattttgcttaaaattaaacttggtatcagagccacaccattttcaccatgtcgtcagattcccaaaaccctagaaacaacaatcctactcaaccctcaagcgctgcagcaacatccattgtgatgggtgctagctcgagcaaaccacagtttcaaaacccactcacaaaccactttcgcaccttgaaccaacccttctctttcaaacttgatagacataactacaacttatggaaaacctggtctcaactatagttagaggccatctgctagatgggtttctcaacgtcactaatatattgtccacctgaatttgttaatgcaagaacagttatggagagcatagacattgcagactctcaaattgtcaatctagcttatgaaaattggatcataaatgattagttgttgatgggatgattgtatagctcaatgactgagactatagcaacataagtgatgggagttgctactgcaacagggttatggcaagcccttgaacaattttatggtgctcattctaattctaaaatggatgaaacaagaagattaagagactaggacaagagatacgccaatgactaagtacctcatgcaaaagaagaattaggcaaatcggctagccctggctagtgagccaaatcctgactcacaattagtcaccaatgttctctcatgtcttgatgtcagctactttaccaatgtgcttcaaattgaagctcgaccaaatacctcttaccaagggctccaagagatgttactcagttttgacagcaagatagaaagactacaaggcttatcctcaaatggtaaaagcatcataccttggttaaccctcaaggaaactttgtccaaaagccacaaacgggaggacaaggctgaggattttcccactactctcaaccatatggtggacatggaggaagacattcaaatgaaggaggtggaaatcgagccaaaggaagaggatgttaggtattatactctaaacaaagtatttaatggctaatatgttatagaatatatgaaatacaaatataagataaatgaatacattaattatagaagtanaattaataaatatctgaaaattctttattcatatagagatagtataatctagtaaggccgtacaagagaattaagattatacaatataaataaaacaagtatgtagtgtcttaaagtaagagatctttaatatggaattatcaagtacggtttactatacatttctagtgtgtgtgattttgattcagatcacatatgtggatagacatgtagtgaaggtgttgtgtataatttgattgtacatgacttgacctatatgtaataacctctttcatcaacatgtcgtttactatgaaagaattgtttatatcacaacgatgatcattagtagatcagtctaaattctgagtatacatgaactcctatttgtgttcattgaattatttgattcactctataaaatttctcagagaaaatgattcttacaacttctattttaggagcttaataacatgagtcactgggaacatgttatacaataatggaatccaagcagtctgagaggatcaaatattagttcccttatagtgttaattttgagagttctaatagtttgatccaaatctataattagattatagattaactgttcacattaaattaatgatacataagaattcaagagataattagaagggtaaaacgatatttttgacaactctaattatgaactaataattagagggaaaactacttgttgatctcacttttagtcaataaaaatgagtaaattaaagtgattagaaacaattaataataataattaatcaataagaacacgaatttgttatagagattctaccccgtaatagtggtaacagcctactcccatttttttttttgaaagaaaatcttgtggaatacaaagaccaaaaccacaagactaaaaggaaggcaaagagccattccaaacgaactcactatcaagcccaataccccatttagcaacattatgcgccaacgtattataattcctactaacatggaccacttggaggtttgggcaaggagataacaagctcttgatacaagttactaaatcatctaaaatattacaaccccgattacaagaatacaatttatctacaatagacttgcaatctgtttttaaaatgtccagaggcaagaggatagaggaggcccactgaagagcatggacaattgctttagcctcagctaccaaaggatcaacacagcctgtaaatggcatagccaaaccagccacaacctgattagaatgattcaagacaatagccccaacactatattttttcctctgaacatcaatggctgcatcagtgaacatctgaaaagccccctgaggaggaataagttgcaaagctgcctgatccggattggaaacagagggaggaacagggacctgctgagaatccaaaaacttgaagaaaaaagtaacactccagtcataaacatcaaaaggttggctatcttgcttatggtgaaaaatattattcctttgattccacaaagcccaaagaaaacaacacaaaatacaaaaataatccttatctagctcctgtgatacactacaaaagaaatcataaatattcaaatgcttatattta

SEQ ID NO: 16879 - DNA, 5270 bp, Cannabis sativa
tcactaattttgaaagtaaacagtaaaatgacttaaaatttcgagtcttgcctactttgccaaaaaaaaaatcgagtcttgccctttatcttttgttcactgttcactctaccccctttcattttggcgccagaaaaagtaaagggcaagaccccaaggctcgagtaaaccatggtggacacggaggaggacgattcgatgaccgagttgttgcgagaccgatttaggctttctaccatctctattgctgaagcccaaggttccttcttcttctcctcctccacctttttcttcttttaaatccatttcttttcaattcacatttgattctaatcctataaacagcgaagcaaaacgacatggaagtatctgaaaccgtagtagcttgcattggcgatttagcattcaaatacacaggtattgttcccactggattctgttattgtcgctttttccttttccgagaatgggttcttatcatttatatttatatctatgttattgggggtaatgaatgtgataggctctgttctattaacatgttgtctgatattatcaggagtcaaatttgtttattactttaatttatttcatattattaaatttcattgcttggagattggaaggaaatcatgtgtaccaagaccagaattttattgatttgtttattgataatttgggttggaacagccccagtgagatttatcaaagtttttagtatgtgatgttgaagatgacttagctagcccatgtggttggggggagtatgggttcaaatccagttgggtctcaccaacggcttaaatggaagatagctcattttcatgtttgccacactaattaactattgcaaaacattaaatttcatacttcttcaaaggagaaggataacatacttaataattgaatgatcattatcagcataccaatcaaggactatagctcttgtttggtgaaaagcaccaccaaacagtataattcgaactaggcattattgtgggtttaggctttgattagtgacattaaatgcaagtaattctaaaagtgcttgtgtactatcttatgggatattagtaatggttctctgttgtttcttgttgttattattatctttgccgcaaagcagaacagttagcaaaagaccttgagctatttgcgcagcatgccagccgtaaatctgtgaacacggaagatgtcatacttgccggtgagtttttgaaagcctgcagctgcaggaactttcagctccttcactatatatatgattaattttttaaaaaacaaagtaacctctgaatggagtctcatcaagatattctttcagctcatagaaatgaacatctagctgcttcattgaggtctctcggtcatgagttgaaagccaaagaacctcaatctgaaaggaagcgaaagaaaggaccgaggaaggaagacaaattgagagcaagtacaagtgctgtgcatattgaagactagttactataataaaaaaaaaaacaaggctcgaatttcatcatcaaattctatttgtatatgtgtcaactacaaatttgcttggcgctgtcaaaattaggaactattctcttactttcgagcctcattataatgagtatatactgctcaaaattcttctacagcactggaaatcctactcaaatttctgcaattactcaagaacagtgaccaatgcagcattagtggtccgaccaaaatgtaagctatgtaacatgatcaagctgcacgtttaaaagtgtttcaagaccgatttgataccaactttactgtgttgtctgaccgaaatgtctcacattgtaataagaattactctactcatcacttgtagctttgttgtctgaccgatttgacaattacacataagttgattagcaattacacaaatagaaaaatctttcacgacagatgtgcaagtctttttaggtcgttttttctatgttgtttttggaagttcaaatcttcctgatatcattttaggttgccttaaaagtgacattttatttagaagacatgttagataagataaccatagctttccgggaaatgcttccccaacctcgtgtttctcctcaatcactttggctatgggagggtttgggattgagataagactcaccatcgatgagtacaagaaaagcttcaaagcttagaaaagagagaaaataaataaacttttcataatatcatatcctagtttcgagtgtggatttgcaaatgctactagtagtagtgacaaagattgagataaggtccatgactggtgtcaatgcttggcattgattggtttcaccaacctctcttgtgcatttatctacataaaaacaaataggcttgatcttaaagcaaataaaatgtcaactatgtataaatcctgaaatgcgtgtttcaatatcaacatacatttatataaataaaaatatatagggagctgaaattacgggtaatgaataatccctatgaattcttttatctctaatgattgtagttgtactacactttgtaacatgggtgacattcttttatttgttatctttgtttttatagtgattgagcaattcaatgtggaaagaatcaatttcttccttttgtgttttcgagcaaaactttattgttattattattataaatgtacctttatctttactagccacgatatgcaaatttttttagcatttttaacacaagtgctaaagtcaaattaatgctaaatttgaggtgagaataggtttgaatttgagcactttttgcatttcaatatttcataatctatggttctatttaaactaggcccgctcttaaccgatagtgtgctatgttgttatttgccaaatttcggcatcaatggaatacgtacgcacatatactatacaatagccacttttattttttatataaaaaaatattgctatcagatttcattcatctgaaatatttaaatcattaaatttaaccactcactcataacatattatatcaaataatgtcaagcaccaccatattataaagtaactcatcatttttttagagtgatctgagttacactataacgattgtcgaggtaaaaaaaaaacattagtcaacaagttaattgtctagtcaaagatatacaaggtcgtaatacgagttcactataaaataaaataacttatataagactaagttatctcatagacaaaataattttagaccactttcaaaaggcagttaatataaacaaataatgaaatcaaaagtacctacaaaataaataattataaaaaatagattagcacattatacaataataatgttgtgaattttaaattaaggatgaaacacaattattattttaacaaaaaaaaaaaactttttttttcacttaacatgtgaccattgtatcgaaattaatttgttatgtctaactactagagttaagtctttaaggcagaaatatactagtcaactgaatctatattatacataaaatttaagagattaatcaaatttaataaattaaatcccaattaaattaattattttgctcaaaaaaaagacaacaaaaactcaattagctaacaaataaataataaaaaaaataatgatataaaataatagaaagaaaattctttcaaaattattaaaatataattaaaagcaaaatttaaaatttattagtgaaaatctgtaataacactctttgagcttgtatctataagtaaaactagtaacaacatacttcaaattagtcaaataatttagtacaaactagctaaacaaaataacacaaattaattaaaaaaatatggcacaactaaccaaaaaaaatattaactcgtcatttaattggagaagaaaaaagttggtaaaacaataaaaaggaaaaagaaaaacgagtagatgttacaattagtagagttggttataaagtctctttaagaaaatgaacaaaactccgtatttctagtctcaaataccaaaaattttggaggcacaattcaaatgagtgaatagtaccttattattatcataaaaagttaaggttgcattattattatactcccaaaaaattaatgattaagaaaaaagcaggcctaaaaaggaggagaaaagagaaaggtacaatatagggtccaataaatatatacattttttatacataatatttaattaagcatgtgtatgcatccttgtatccttttcctatccaactacaagtgtttatggaacctcttttgtcgtttctatactccattactggtcctgcctcatatttttcacaaggaatatccgtatatataaatacccaacttctcacttaatcaattgaagtgatcaatgggcctacaacacaattcaatctttatttcaatctaccactcattaattattacatttggcataaaataaaataaaaaacccaacaaaataaaatgtggtaaaattcagcaaaataaattgtatttttttttttgggttttcaaatttcgagttgtaccatgtcctgagtctgctgacctgacttatcttttaaaacttgtaagagatttgacatgaggaacagctttgaccatgaaaggccaagcccatgcttccaatccaataatggaaaagttatagccacccatttgataaatgacacgtggataaaagtattcatcacacatgtttaattaattaatttttaaagaaaaaataaggatagagccaaaccacgtgaacctttttagaaccttaaccgctgcaatgcaatgtctctctttagtctttctcttacggctttctttccggaaaaattgtttcatattacgtacatctcatgtcaccccaaataacgccacgaaatttaccatagctagagttggacgctacacatttgtttggtatctcgtgttacagtatcatattatattaaattgtattttatgcaaaattatatataagattgaatcccatgagcacattttcttctcttgtgtgttgtcaagcagggttcttgatatgatgttcaagtggatgggatatagaaggtggccgactgattatgcaggctggcgtatttggttagctttgagagggcaatgctctatgcacaggattaactcgtccattttggcagctgtggtctacaacatctggctcaataaaaacagatgcatctttaaaagttactcaaaatccatttgtggtattgttaataatgtaaagaatactgttaagtacagattacaaattgtaaacactagaaagctaaatactcttgagaaaagatatgtgct

SEQ ID NO: 16880 - DNA, 5018 bp, Cannabis sativa
gagagagagagagaaagagtttcaatctcatggagctgtgagaatatttccgagaaagaaactttctgatatactcttcaaatctaattccttttctccaattctaattcctgcaaatcggtaaatctcagaactttccttcgactctcctctcagatcttacttttttccactttaaattaacctattttgttaactagatatgattaactacccctcttaccaatcttccaaaatcagaaatttcatgattcccatttctctgtttgtgtaaatcgtgatctgggtatgatttttttattcaattttcaaagcattagctaaatttttgcagtagaatgagcaattattcatttgggtcttctggaactcctaagtctttcagtgcatacccaagaggtgattttgatctagaatctggaaccatcaaaagagtccgcaagtataagaattcacgtttacatcccatgaaaatgatcaattcgattcgaaatcacctgcattattatttcaagctccaccccattttatgttttcttggatcattgtcccttggagtctcagttttcttagttttttctctttatgagagccgttacaagatgatgaatggttatcaaagttataatgttgaaccagataagtatccatttcccaagcttcaaaatttagtaatggttgctgggcattcaatttatactagcaatggctgtggaaaagttgatgaggagaattcttggtttttggagccttatcagaagaatccaggtcaagctgctacttttctatctcatatagaaggaggagttgaacttgcagccaaagatgaaaatgccttacttctgtttagtggtggagaaactaggaaagatgctggtccaaggagtgaggcacagagttattgggctattgctgaatcaaaaggatggtttggtgagttactgttattgatttttgggtggagttcattgttgactagaattgtggtgttttgtgctttatttgtttatgacaggttgagtgaacacactgggcattttctgctctgtttaattgttttagtactatgaatttgagtttttatggtgccatattactacacctgttattttcttatggaaattctttgtcttgataattcttaggtaaaggagagaatattaaatcaagggcacttactgaagagcatgcaagggacagctttgaaaatcttctcttcagtgtgtgccggttccgagaactaacaggcacctatcctcagaacataacagtaagttcaatttactcgaaatcttctcttacccttttctgttttgtgtttgatattaaatgttgattctctttaaaagttgttctgatcatcaagttattcctaatgacacatctcatattataaatatcaagatagagtatgactgattgaactacacgtttctctgctctatggtgcagtatatgtttgtcattagcaggaaaaatgtccaccatgataatagacgacgtgaacatgttttgttagtataggatttgagggtaatttatagaagagtgtttcatttcttagagcaattgtgggactcacttgtacagtaactaggttacaacctggggcattgcaactttgatgtttttttcattatttttttcttagcttaataccgactattctgttaccaggtggtaagctatgattttaaggctgagagattttcacagctgcatcgatctgcattaggctttccggaatctaggtttttcttcttgggcactccagctacctcctctgcaagagcagcagctgagaaaggcgaggcactggtgcgaactcagttcaaagaagacccgtatgggtgtagaggatcacttcttcgtaagaaactagggcgtgatccttttcacagaacaattccttatcctattggttgtcctgagattgaaggtcttttcagatactgtggaactgatccttatccagcctcccttccgtgggcttagtaaaacttttacttacctttgatccctacaacctaaacaaaaacaatagttttggagtcttgggttactttttttgggttcaaatctttaattatagaagaaattagaaatattggttaggtgtatcatataccaaaaggagaagaattatttgactattgtgtcactatgaaaggctgggggtatggtaattcacttctgtgcaaaatcataataaaagacacagaatgttgtgctatgtaacctgtcattcatatgtacattaataatgctgttgtgtcatattaaattttgagtttaagcacctttaaagaattcgaagtattattgtgcattcaaacacttcttttgttccaagattgatgtgaatgaaagtctactctttaagctgtaatgcagctataaaactgggctcctttatgttgcccatagaatttttatttatatttatatagaaattacagctcttgatggaagtacacaagagacccagatacaatgctaatgcctaattgcattatgtggcaaggcttattacttcacacagagaataatagtttaatagcttgatttcctttagcagattgtttcagttgactgaaaacactacccagttttcttcattaagggacaagttgaagctccatcttcaaggataccactatccgagcttgaagaaccctttaaaagacctcccagtagttctccgcgatcatagaagaactgcaccttcacaatcttctgttgttcatctagctgcaatttcagacagcaaggaactcatttgatttgtaagtttctcatgcctagaattacttaaatgatgtgtatattttgtattgtcacataacattatcatgctaaccatgtccaaatcagttgatcggatacaataaacaatataactgataaactgagaaaagggatagtaggagatacctcgaaaatggacatgccaatgaattgaaccatttctccagtaggggcatgacccttgaaagggccttccatataaccccagtgccggaacttgtaaacaataacaggtgggccagagtagacatgaagaatttccacagcaaatcctcgaggaaaggtggtcgtgaaagcacggtgagaagaatctgctgtttcttctgctgggttgtagcaccgcaagctgtctggtaaggaagtctgcaataagctgttgtatcctcccccaagcatagccacttgttttaaactcaaagctttccttcctatacatatagttccattctcctttcaaagcatatgacacacaaacatgaatttcttatctgaacaataataaaaatctacttaccatttatgctgacagtgtacttgttttgatcaacagttttgtagtcctcagtgcttttcttgtggaacatctccatttcccatgtcttcacaaggttttgcactttctcttcaagtgaccctgttggccatatctaccacatatacatatatacatataatttttaatgattacaacagattataagtaccaaaatgaatataatatgtacttattatggatatatatatatagtacctttgttcttccttcttcaaatagcttgttcacaacatcatagttgggaggaactccatacacccatttggtgtttttctctgcttctccatacatatgtgtacggtacttgtcttctttaacttccccagatgccatcttagctaatctttagtctcaagagtttataagattttttagctgttttacttgggacactttcaacttctgctgataagagttctttcttatacagattccaaaagaaaattcactgtcactactcactaacatctaattttgaggagattaagacagaaatgagtaataaaaattcagggaaaagataatatatgttgtggtttaaaatatattttgaattgctaagagttgacttgaagtttgattgagtcaataaaaaaaaaaaaaaaaaaaattgaatacctttgaaataaaactatttatttatgaaagttataagttagtcatatatttgttatacatttctaaacatgtaaaacaagacaaaaataaaaaattatttgactatatttaaaatgaataatttataacatccacatataaaattttttaatcattcctagtcaattatgttttgttattgatttaacaacacaattgtcacgattctcatctctgcttttgaaatttcaacatatttccaccattcaaatatttaactatttttcaagccaaaaaaaaaaaaaatgtaagaaagagtaacatagataatttgtaaaaattggcaattaatagatgagagaggcagaatatatgtaattaagtcatttttcttttaaagataataagtcgatctaaagatgtgggttctattcatggtattaaaatttttagagttgccctagcgattttacactttatgtttgtttgtcgatgataccattttgtttgcccgtggtaatgaaaatgaagcaaaggtgttgttcaagtgcctatccttgtattagaagtggtctagccaggtttgtaataaagccaagagtagtgttttttttctccaataatatggagaacatcaggagagactctgtcctccaactcctaagcgtttctcaaatgcacggggaggaaatacatctaggcaatcggtttgtttttgaaagaaggaagactataccaagctgagagaaagcatggtaaagtggctgtaaggttggaagtttaagttgttgtcctatgctagtaggcacgctgcttctttgccaatttatgtcatgtccactaataaagttcctctagcttcttgtcgggaacttgatgcgctgatcagaaaattttggtagtttggaaactttgacaaatagagatttatggctttcaaatcttgggatactatttgtcaacctgggtggtttgggtttaaggaagattgaaagtatgaatcgagcttttttggccaaacttacctggagtttactgagtaaggagcaaaaatctt

SEQ ID NO: 16881 - DNA, 2837 bp, Cannabis sativa
atgaaactggcttagttttttctctttaatgttatggttttgtaaaagaatcaagagatgaattttagtttgggatctccatttttgagcttcaattctcgtttgaacagttttaagattgcttaaagaaaatttagtgcagagataagttgtttaaaagcttatagtgagctggaaaacacaatgtagcagttgattttattaacatggcagatgcctgagatattattgactgtgaaacttggtttgagcttacatgttgaaaatgttcacttcttttgttaaaaattgactgtatcagttggtgcattgctgaccaataacaagatatatattgatgttgtgttttaaatttttagagccttttatgaatctgaaaacatggctatagttgaacttgaattcaatatttcgttgaatgaaatactacatcattgtaatttagcagttaaatattcgcaaatgcaattcattacaatatgatttgtgtttccttatgttgtgccatacccaaataatctcgttgaattgtttggtttcctgtttctgcttgaaatatgcatatatgaaagtatatgaagctagcaataactttaaaatgggaactgtgttttagattctctaattgtttgctcatgttatcatttattaggagttgatgcctggaggtgtaaattcccctgttcgtgcttttaaatctgtcggcggacaacctattgtcgttgattctgtgaagggctctcacatgcgggatattgatggcaatgactacattgattatgttggctcatggggacctgctattattggccatgcagatgatgaggttctattcttctttatttggaatgcattgcatattttgacatccttaatgccattattgaagttttaagtcctgattttattagcattcagcaatagttttcttctttatagatattaggagatatgttataggactacagggtgctctcctgcttcaaatttaattttggttttgagtttatctgatagtgcctgagatgttgttactcaatcatctttgaatgatactttcctgcaggtacttgcagcccttgctgaaacaatgaagaaaggaaccagctttggtgctccttgtcttctagaaaatgtactagcagagatggtcatctcagctgttccaagtattgaaatggttagatttgtgaactcgggtacagaagcatgcatgggtgtgctccggctggcccgtgctttcactggaaagccgaaaatcatcaagtttgagggatgttatcatggtcatgctgatcccttccttgtcaaggctggtagtggtgttgccacattgggacttcccgattctccaggtgttcccaaagcagcaaccgttgatactctaacggcgccctacaatgacatctcagctgtggaagaactctttaagaacaacaaaggagagattgctgcaattattcttgaacctgtggttgggaactctggcttcattcctcctaagccagatttccttaatgccatccgcaaactcacaaaagacaatgacactcttctcatctttgatgaagttatgacaggattccgtttatcttatggtggagctcaagaatatttcggtataactcctgatttaacaacactcggaaagatcattggaggcggtctgccagtgggtgcatatggaggaaggagggagatcatggagatggtagcaccagcaggaccaatgtatcaagctgggaccttgagtggaaatccattggcaatgactgcaggaatacacaccctcaagcggttgatgaagccgggaaactacgaatacttaaataagatcacaagcgaacttactcaaggtcttttggaagctgggaagaagaccggccacgcaatgtgtggtggatatataggtgggatgtttgggtttttcttcacagaaggacctgtacacaacttttcagacgcaaaaaagagcgacactgaaaagtttggaaggttttacagaggaatgctggaagaaggtgtttatttcgcaccttcacagtttgaggccgggtttacaagcttggcacacactgccgaagatattcaacaaacaatagctgcagccgaaaaggttttaaggcggatttagattgctatctttagtactattttcccccattttctttagtactattttcccacattttctttctttcctatcacttgcatagttgccatcttttgtagatgtactggagagtttgttttgtagacataaaaaatcatgtattaacctccatttggttttgtagaataaaccctgtttaagaagagaattgaactcaattgaatctatcaaaaacactgcatttgtaaattgtaatcacaagtcatagctgaattttcatcataattcataaacacagcattttctccttatattgaatgtggatctttacaataatgaggtctatacagcttgcttgacataacataactggaatgatatctataatataagactacaaagtagaagagaccaaacgagaagaaagaaacaaaatagaaaaaggaaataaaaacaaacaatatgctgaactgaaagtgaaaactaataatctgtaaggagtcacgaacgaagaacacttgactttctttctatcaagacaaatcatcatcaccagcttgtacttttacacatgaaagctgccacaaaacatggtctccaagacttattctgttgcacaaagcttacaacatactgactctataacattttaattcacagtatagaacatgagcatacaactttcctgggagaatcatcaatcttcttttctgttcaggaaaac

SEQ ID NO: 16882 - DNA, 5794 bp, Cannabis sativa
atattgacacgtaggagggcacgtaggagggtgttagtaggagggtgttaggcacgagggtgttaggcactactgttaggcactactggtaggcactactggtgccctttagcatttctctttaaaaaaatagcttttacgttaaataatcctaagatgttatctatagaaagtgttgaacaatactgatgcctaataacaatatttacattagaatctatgattgaacaatattcttaaaaattaaaaatgaagatatcattattggtatgtgtatattatggttgtgttgtattatgcataaattttctttttctatatattttacaattttgttgcaattttactgtattgacttttaagtgataattcaaaaacacgtgacgatatattattagactacgtattaaataaagaaaataaatttttatatttttctaaaatttaaagttagcacttaacaattaaaaaaataagactgtaacaaaatcgtaaaatagtatacttttactattattttttttcttaaaattatatgtataataattattaatataaaaagctttggcggcaaataatactcttttacaaattgattcgaaaaaatgaaagtccacttaaattttaacttgtacaatagatttttgtaaaagagataataattaaattatatcaccccattttatgatttgttataaagtaataaatttgattttatatcttataaaactaacctaagttatcataattgattatcccttagtaaagtagtaataatactaattaagatgcatgtgtgttattgagataagtagttctataaatgcaatttatgaatgatgatgatgatgatgatgatgatgttttagcacgtggtcagcatacaaagcaacacgtcattttccatgacaaacaaaaatggcggcgataaagaaacatatcaacaagtctttgtttctttcaaattccaagtcttaattttcaatctttggtcaatttctatacaaatatctataaaccgcacgtacacataactaaaatttgattagtagccaaagaaacaagttcgaacaacaacaacaatgctcataaaataatagtagctagactaaaaacctctcttatatactcaactataaaatctatactataaacttttcataaactatatatatttttctttaaaaaaaatattgttattgggcacaagtagtgttcaacaccttttattgtaattggataacgatattcctttaaaaattattacattaaattatatgagactcgatacttaattacaccaataataatatgtcacctaagaagctactagacacgagtagtaccttttaatatttctctaaaaaaaatataccataaaaatttatctttctttttttttttttttgtatttgtactccaatacataaaatgcaaattagctataaaaatcaatattatcattaatgctcattcaaaatataaaaaataattaattttgtttatattattttaatatattttaaatatattttattcaaagttaatgaatagtattaataacagacaaacatgtaattaaaaagaaaaatatttatattgtgggttaaaatttggcccaagttatattttgtgccaaatttagcacaatttttagcttgagccgaattcagcacacattttacatcccattgaagttaaattttaacaaaatattctaaaaaaatagcaatattaaattttaacaaaatattttaaaaaataacaatacaccatatttataactctcaattgaagatactccaacactctttaatgtgtaaaatcattaatcactattagtgcaatgattattgagtctcatataattatatataataactttaaggttaatcaatcacaaagcgccgttacagcatcaaatatatataaaaattgagtattgatattgaacactgctagcgatattaagttatataaaaactgatacttaattataacaataacaatataacactcaagaatgaaaaaaatagttatataaaattattaataaatttattatatagatatgtatttaaggaagtttcgaagcaagaaccaatggacacaaccatcatatatgacctaataatacttactcccatcatgaataattaagacccaaaaatcaatatcagcacaccacacaacatatctattagattcacctataaataatctcatccaaccattactatttttcaaattaataaattaattaataaaaatggagatgggaaacaaaaatagcaacaacaacaacagaggaggaggaagaacagacaagtacagaggaatacgacgtcgtccgtggggaaaatatgctgcagagattcgtgacccatctaggaatggtgctcgtttatggcttggaacatttgaaactgcagaggaagctgcacgtgcttatgatcgtgctgcttttgcttttaggggccatttagcaattttgaactttcccaatgagtttcaacaccaacaacatcatagtactactactactacttcaaataatcctcaacaacaacctcaaacttgttcttcttcttcttcttctttggtttccaataatggtgttattgagtttgagtatttggatgataagttgttggaggatttacttgattgtcaaaatgctacaaaccatggaaataataattagttgtggtcctaataattaataataagattttattgaatattcaagttctgatttttcattcatttgtatatatttatttttctctgaggaaatgatgaaaaatgttgaagaaaaaatacagttttttggtaaaaatctaaattttttatttttgggtaattatgaaaaaatacgaaaaaatgagtcattttgcaataattaagttgtttgattattgattttattgaatcaaagctgtgattttttattcatgaattgttattggttatttatttttatatatagaagtttaataatttgttgtcattagttttctctatgaaaatgatgaaaaatgtaaggaaaaaaaatccatcttttttggtaaaaatcaaaatttctatcttttgggtaattatgaaaatatcctaaatatggtaattgagattaatttgggtttttattggtttcattgagaataaagttatggtttttattaaatcaaagttgtgtttatagaagttcataattgtcattattacttttctcctaagccaaaaaaaaaatcagtttttttggtaaaaatctaatctttctatatttttttttgggtaattatgaaaaaatcccaaaaaatattgtaactttttatttttctgaaaaatatactatgaagtactaagaaactaagataatcaacaacattcactatggactaatttgggattatatgggggtttattgaagaaggattaatcattaagtaaagggaaaagagaaaaagagtaatttttattttattctattttatttattaataaaaaatgatattgttgaccaaagaaagcaagtcagaaaaatggctaaaaagaaaatcaaattcactggatttaactgtctttcaacaattccatcaaaaataactttcaacaaaaagttagtcaattcaaacagctcaataattatataatatagtccatattgaaaacgcagttaatagatactcacataataaactataattttttcttattgaagtaaatattttaatttaatcttcccttgtaatagtagataaatattaaaatttaatttttgtcataactgacttttaattattattttattttcttgtagatttttatctttaaacaaaaaataaaaatttaatgatttgaactaattattaaatacttaccgaaatttaaaaaatataacttataagattaaaaattaagcttaaatatatatctattagataaattactctaattttattattggataaaatacttatgtttttttttttttgattttttatattatatcctgtaattaataaggacgttttatgaaataattcaaccaacaaataccaattttatccaaaaagtcaaaacactttacatttactgtttttcaatcttagaacattatacagttaatcatcacgtgataagaattactattacaaaaatttatataaaataatattaacgaagtcatattattttgactaaaacagtttaatttagtaaaaggttgcctttataatactcctctttttatgctctgttttttttttttttgagaagttatgctctgttttttaaaacaacaaaactatttatataaactaagattaattaataaaatgcttaagttttttgattggttatttcataatataagctcttttacaataaagatatcttattatatatataactcaattcaaccaatcattaccaaaattactcaaaaatctaaataaaaaaaagtcagagactttacattacagttcttcattctttcattacacataaattatataatactaaaaacaagaaaaaaaaagtaatatggtgttattttaacttattttagataaattttgaataatttataatatcaaaaatataaattattcaaaattttccaaaataataggtataattacaaaattttgttgtcattattttctctcctttaatatttattgctctgtttttttgttaattaagataaactatttatataattaaatacaaaataaataaataaaaataattaactttgatttcctttgttgtcaaaatcaagaagctcatccaataacttatcatccaaatattcaaattcaaacacttctctttgttgagtttccgagtttcgaatcgcagaagaagaagaagaggaagaagaagaagaagagaagaagaagaagaacttgaggccgaggccgaagaaggaacagagagattcgggtagtcattaggaaaattaagaatagcaaaaggtcctctcatggaaaaagctgctctatcataagctctagcagcttcttcagctgtagcaaaagttccaagccaaattcgagctccatttcgattagaatctcgaatttcggctgcgaatttcccccatggacgccttcttactcctctgtatttaacttcttgatcttcttttctttccatgtttgaagaaaaaaacagagtaaagatttgatttttatgagttgaattgagtttgtaattggtggggtttatttatattgagtggaaatttgtgttaattaatgatatataattgaattcatcgaatttggaagattcagtactcactgatcaaggtgatgatggcttttttttttaaaaaaattaagatttgatttgattagattaattaattattagccttttgagttttttttttttggattcgatgaggttttgtagtgacgtcacttctggttttgtttactatgtttgtatatattaatattcttaggccgtacggtattacttttgacctttgatatagaatcttttttatatacgatgttatatgtttttatggattattgtgtatttttattaatttaatataattatcgggctctaaatacgcaattttagacaaattttaatttttttatattattattaaacttagtttttagtatttaaataaatagattttaaaaaataaataaaaatatattatatttatattttaaatttgaaaatattataatttaaattaattataagattttatcataagattaatatatttgagtaaatataaataagaaaattaaataaa

SEQ ID NO: 16883 - DNA, 4621 bp, Cannabis sativa
ggcattttacatttaagggctgttttttttgttacattgagactattgtctatatgatatatatgtgtcctgtgaagtttggaatgattgggtaggttttggtggtgtttccaagagtgtaaaactcaaaacatacattcttgtggaaaacattctgttgtttgggagaaaacatctagttacttcgtgccaagaaatctagagaaaacgactagctatttcccaaaatagtatgttgtttttgaagctcgttttttgtattttcctggaatttaaagtagggataccctagttacctataggggacccttaagaatgaactttttaacttggaataaggttagatggcttagttaacgattgatttgttgttatgatatagggctcaaaatcatcgatcgttctctaagctggtcggccaaaatacctgaaccgaaacttgaggtaagtaaagtataatgtacctcatggcatgataggtttcttaattttcaattttatgttaggcaatggcaatgtgattgtgatatacgggtttacctaattaggcagtgcgatacattgatgcgcggttgtggcatgggctcacctaattaggtgatgcgatatattggtgctagattagggcacacgctcacctaattaggcgatgtgttacattggtgccaggttgtggcacaagctcacctgattaggtgatacggtgatattacgtatggtgccaaatatcggcatgggctcacgaaattaggtgatgccatgttatgatgtatggtgtcaggttatgacatgggcttgcctgattaggcaatgcaatgtatggttacttgttctttccatgcatatggtgaattatattatatactctttagaatgttattatttaattattttacgacagtagaatggatgattaattagtatatgtattttcctttattacttttcttgctgagtcgttgtgactcacaggtactctgtggtgcaggtaagggcaatgaaaagagcaaccatgaggtgatggtcttctctagaaatgtacatgttaacactaccgaactgtaagctgagttgccaggagttcttttgggttgtatctactgtgtatttagacttaatattctatatagtccttttgtaaaatatttatagcaatgatccctaaaacaaagtgttagtatcattatattttccgttactagggttttattatagtgaagttttttaataatatcacagattttaataattaattaatctattagtactaaactagcttataaaatcacacacgtggtgtctctatagattagggcattgcagtcataccctcgcgaaccatagccaaaacatcgcgtggagtaaccctctcctcctgctcttcctcctcctcatcatgagtagaaggctggacatagggagcatcctgacacccttggggaggaggatctaggaaagaagctagaaccgaagatggaaggataatggtcgttgaaccataattcttgagattagcaagagtaaacaaatgcttggtggtcctctcatacgaaatgttatagagcttctacaagggcctacaagtgcctccgctaagctaaggaatattcttggtcactgcaataaaaaaggtaaagtgtaagcctacaataaagtaagaaaatcaaaacaaagatagtgaaagttaacaagaaaagttcacttgaaaatcaaaactcagagatgacatcaggaggcatgccttcaactatgaagaatctggaggtcctgatagcaattttggagggcatcccaaataagcattcaacatccttgactctcacctgttagaaaaaataagtccctgttgtacaggtgttgtgggcaatgttgtagacggagtggaactcctctgctaaaggaaagtgaccattcacccccttgaagtcaataacaaagcatgtcagaattatgtagcagattggagccaattggagagaagcaataccaaagtaagctagacatgtaataaggaaagggttaaaaacggaagggtagcaccgcatgcaagcaactgctcactaaaggtagctctggcagtcacagggcgattggcctactccacatcgccattaaatcataaaatgtaggaggcattagaccaaatggtgtagttagcgctaatgtcatgaagtttgttggcagtaagaaaacagggagcaccagcatgagcaaacaaatccgatggaataggaaaacaagggatcacctttctcttaggcatacctgcaaacacaaggaaatgatggtaagcacgagcttcaggcttgcaatttcttttagttattcgacaagatggagtcttaatcttgcataatatagaaagaaatgggggatgaatggatcttcatcgcgtaatcatcaggaaaaatagattcaggtcaagggggaagggcaggctacggaggaatggtattatcgagatacaacaactcgttctcagtctcaactaatgacaccctaagcctatataaatatacttcagggttggttaactcccccctcaagattgaatgaatttgaggccaaagtctttccaaacactccttgtagttaataatgccccctaaaccccctcttagatagcaacctagcatatctcacatgaggactctctcgagaacttttaatgtctgaagaagagatataaataaagatatccctaggagggacttgtttgggattcaatgtcgactcgggatgaagtcactcgactcccttacctaagaaatagaagaaaaactaccaagtttgtcaggcaaagaaggtagatacaaggactctacgagcaacatgcaaccctatttactaaggtgcgggaaggataaaactcatacatacaagaactaagtaaacatatgtacaagcttgacaaggataagaaaacttactttacaagtgccaaagaaggatcgatggggtgcaatgttgaatagacaaaaggagaagcacctacaaacaatgtgtgcatgttagaactggtcatctaacaaaaggcatcaaaagagtaactcgaccaagcctcgtgaaaagtcactcatcaaaagccttaggacagtaactcggccaagccatgtgaaaagtcacctcgccaagccttgtgaaaagtcacctaaccattccttgtaaaaattcattcggccaagccttgtgacaagtcacttagccaagcctcgagataagtcactcggtaaagccttgaggcatgtcactcggccaagccttgtgaaaagtcacttgacaaagccacattacaagtcactcaaccaaagcctctcaaaaagtcaatcgaccaagcctcgtgacaagtaactcaccaaggtcttgtgaaaagtcactgaaccaagccttataaaaatcactcagccaagcctcatgacaagtcacccgaaaaagcctcgagacaagtcactcagccaagccttgtgataagtcactcggccaagcctcgagacaagtcacttggccaagcctcgtgaaaagtcacccagtcaagcctcgtgaaaagtcactctgccaaaccttgtgacaagtcactcggccaagccttgtgtaaagtgactcggccaagcctcgtgaaaagtgaatcagccaagccttgtgaaaagtcacttggccaagcctcgtgacgagtcacccgaccaagcctcgagacaagtcactcaagaaagccttgtcaaaagtcactaggccaagcctcatgaaaattcactcaaccaagcctcctgaaatgtcacttggctaatccttgtgaaaagtcacacggccaagcctcgtgacgagtcactcggccaagccttgtgaaaagtttgtcagccaaggctcatgaaaagtcactcaaccaagccttgagacaaataactcgaccaagcctcatgaaaattcacttgaccaagcctcatggcgactcactcggccaagcctcatgacaagtaactaagcaaagcctcaagataagtaactcggtcaggccttgtgaaaattcacttggctaaggctcgtgacgagtctcttggccaagcctcgttaggagtcactcggccaagcctcctgacaagtcactcaaccaagcctcatgacaagtcacttgaccaagccttatgacaattaactcgaccaagcctcatgacaagttacttggataagtgttgtcaaaagtcaattggctaagcctcgtgacaagtcagttaaccaagccttatgaaaagtcactcggccaagcctcatgacaagtcacttggccaagcatcaagacaagtcactcggccaagccttgtgaaaagtcacttggccaagcttcgtgaaaagtcatttggcctccaagagtggcaatatcatccaacaaaaaaaagaaaaaaaaatgatgttaacaataagaagaaaaacaacaaaaaggaatgacttgaaggggagtcaaacgtaggacctcttggaaaggaagctagtaaatttcaactacatcaaggatgaagtaagtgaaggtgaatgagaagaatcctcctatatatagcaagttgtatctgttggaaatctttttaccaagatctagatttactaccaagtatgtttgattaacatccta

SEQ ID NO: 16884 - DNA, 4988 bp, Cannabis sativa
  modified_base (3932)..(3935): a, c, t, g, unknown or other
tcatcaatggtgaatgtgaagggagggaccagaccaccatgggttggtttaggagctgccgtttgggttcagattgcttcagggaacgcttacacctttcctttgtactctcactcactcaaaacggttctgggtttcaaccagcgccagctcactatgcttggagttgctaatgacataggtgaaaacgttggcctcgttccgggcatcgttagcaacaagttagctccgtgggttgttttgttgattggtggtttggcttgtttctttggctatggtgttttgtggctcgctgttagcgaaactgttacatccattccttattggttggtaagttcctttcattgctgtgatttttctttctttctttctttctttttttgccttttctggttcattttatgtatacccttttgctgatttggttgcttgagtacttgatgtgaattctaggttcattaaattgtgaagtttttggtttttctaatgaatttaggcatgcccttttgctgatttggttgcttggattcttgatttacgacttctaagttgttcatattgtcacgtttctgggtttcctatgaaaattaagcgtacccttttgctcattcttcgattggaaacttaaattatgcttatttatattcatttacaatgtatgtaattgatttgacaaggttaagatgatccatgcatctgaattgttcttttattcagctctatttaagatcattggtcactcggtttagctgattgaatttcaggttttaaagaacaccctataattacatcaaaatacccaactttataaaaaattgaacagcattctgctgatgtatgttgctaaactattacctctttgaaatatagtttgaaggagatgatatatttttcccaatgttgattagcttgtatcccatttgatcatattttgaagttagaaggactatttccagatcaaagaggatttttttttcaacctgttaaggacagagcagactactgtactccccttcttatttatttaacaaatcaggaaactaatgtcataactcctttagatcttgtctttcaaattacttgcaagaaaaataaattctgctacatcacagaaaatcaagtttttcaagccatacagagctttcatttggacatagctttctgaaaattgatttgcttgacaaggagcatatatttctatccataaaatttaccttaaaaatacttaaattttgtgtaagaacatggccctaatgtttttctttatggtattgcagctatggatagccctttgtataggcaccaatagttctgcctggttgactacagctgtgcttgtaaccaacatgagaaacttccctgttaatagaggcactgtcgctggtattctgaaaggctacggagggctcagcggagctgtgttcacagaaatttatagtgtgctgcttcggaattcttcttctgagcttctgttgtttctggcaataggggttcctgtcctttgtttcattatgatgtatttcatcaggccttgcactccagcttctggtgatgactctgctgaacatggtcattttctttttgcccaaattgcaagttttgtgcttggcttatatcttctgtcaactacaatattggatgatatgcttaatttaagccctctcatttcgaatacaattgttgccataatggtcatacttattatggctccgcttgcaatccctattaaaatgacgctgtatccttcccgacccagcagatcagagacacttgataataaagctggttcttcagaaagcctgattcagggagaaggcaatgcagagaaaacagaacccttgctgacaccagtttcatcagcaatcaaccaagaaagcttttatgatgacgatggaaatgagtctgaggtggctatgcttctcgctgagggtgaaggagcaataaagaggaagagaaggcctagaagaggggatgattttacatttactgaagctatagtcaaggctgatttctggcttttattctttgtatactttgtaggggttggttctggggttaccgttcttaataatcttgctcaaattgggagtgcacaaggtctgcctgataccacgattctgttgtctctcttcagttttggcaattttcttggtcgtcttggtgggggcgttgtgtctgaatactttgtcaggtgagtaatctattgttccaaattcgctaattcacgagatatcaggaatgaactttgtatctttgtcctgactcttgaatggcgggcataatagtctaacttgcgttgtattattttgtaggttgaaaacacttccaaggacagtttggatgacagttactcaaacgatcatgatcatcacctaccttttattctcttctgctattaagggcaccctgtatccagctactgctttacttggaatctgctatggtgttcaattttcggtcatgatcccaacagtctctgagcttttcggactgagaaatttcggtttgtttttcaatttcatgtccttaggcaaccctttaggtgctctcctcttttctggtctcctagcagggtatatatatgacaatgaagcagctaagcagcacagtcttcatctgtctgattcaactgtcgcttgcttgggtccaaattgcttcagactcaccttctatgctttggccactgtctgtggcattggtgttatggtcagcattgttctaaccaggaggataaagcctgtctaccaaatgctgtatgctggaggttctttcagattgccccaaagcacaaatcagtaattttacttggcggagtgtagaaattcgaacatgcccgacatggatactttcactcttgtgagttttgccccccttagactcttaccggcaccattcattaagagtcatcttaataataaactaatccgtagttttactgttgttactgtatttaatagaatatgtttgtgcatcatggtgccagaccttgctcctagcccatcagggtaattgagctgtaaaagttatatactgaaccaagaatttatatggtgttggaaattaagtatacaaatatttattcattcattcaacttgttgtttggtacagttgatagatatgttcatactagctagggaatgataatgtgaaatattgtctgtttgtttttagggtttatttttttctttttcaacttcaaaatattattcatttaataatataataacctttgagaggataatatgtacttcttacaaaagggtggatttgattattacctttaattatattaattttaagaataattagtatttttattctctaaactttcgacactacttgatcataccccttaaaatatatatacggcttgttataaattatccttaaaatataatagttacataattatgttcattctgttaggttatgattatcttatcattaaaagttagtatttttactcttgactttgaccaatacaaaatttagtttgtttttataaaaaaagataattttgaaaattataatgttctatttatttttttaaaaaaatgtaacgccatatttcataaggacaccacgtgtgtgattttataaactaggttaatactaatagaataattaattataaaaaacttactaaaaaatattaaaaacgaacatcataacagcagtaaaaaagtgttccagggatatttgtttaaaatatttacccaaaagactatatacaataacaattcaaaacacaattgaaaatacaacagatcaaccagtccaaaataattcctaaccaacttgacacacaggccggtagggtcaatacgtacattgctggagaagactgtcatctcatggctgttctaacttttcttgccctcacctgcatcacagagtacccgtgaatcacatagactcagcaagaaaagtnnnnaagaaggatacattaaatagctaattatacatttcattatcataaaatgattataccataacatttaacaataggtaatataatcagccatatgcataaaaatagataagttcatacatttgcattgcctaatcaagcaagcccgtgtcataatgtaatatcatattcatatataataccattgcaccacctaattaagtgagctcgtgccacgacatgacaccaatataacgcatcgcctaattagacgagcccgtacctatgcctggtactcatatgttactgacgctcgtacctacacctaatacgtcaccaggaggaaaccctacaacgatttcattctgtgtcataacctggaaattttcatattattgtcgcatgtatctaataaggtacgccgccagttggaaacctaacaacggtttcaatctatgccataaccagacattttcatattactgtcgtccgtatctaataaggtacgctgctagttagaaacttaacaaagtttttagttcatagtcatgaatttataacggttgcctcacatgcacaacctgaatatcaatatccacatatctcattacctactcaagcaagattatgccataacctaacattcatcatatatatatattgcattgcctaatcaggcaagctcatgtcataatctaacattcgtatactgcattgccttatcaggcaagctaagcctataccataactcggtaccatatcacctaatcaggtgtacttatatatcatattgcctaatcaggcaaacccatttcacaatctaaaatccatatatcatatcgctttatcaggtgaaaatcgtatgtcacattcacattttttttatcaagaaggaaagaacttcattaatcacaagcaattataaaaaaccacaataagcagctcgaacacacaccagctaattataataaattctctctatgtatctgaacttttcaattcctttttttagctatttttaatctataagacactatatttgaaaaaccgagtttttgcaaatgtcagttgtatata

SEQ ID NO: 16885 - DNA, 7643 bp, Cannabis sativa
cttagcttgccaaaatatagatttattttgtgacaagcgactcattcctatctcctaacaattttattaggtgtaatctgaaaattgatttctcatgtttgtactatttgacctcttctttgactatcctttatcaaataggttggttcgtctaatatttggatggctgagctttgatgcttggttgttggagtataagaattggttagtgtggttgaggaacaagatgacgggtatgttagttgaaactgttagtgcgttgtttgaaaccttttacctataatagataatacatcactagaaaccgttgtttatttatgtatttcccttaagtcaaagtaactataccatttttacaaatgaatgcacaacacctagaaagctccacttgattacactttcttctatttgataactgttttccaattgctcatcatactcaaaacctcacatttgtgtacttaaatatgtatttatgtgatatgaggcttaactcaacgtgttatctcatctgttactcaaattttctgtcctttaaacatagcagaaaactggtatgaaccaaaaaaaaatagaggggctctcatggtgtgatcaaatggcatacattttcttatattcactgttcaaaatctcagaatcagacattacagacaatgaacatgaccttgacctgcttcccattgatgatcttctaatacttctcatattagaatcctcaattcgatgccttataacccaataacacatggtaccaagtgtagtagccattatagttgtccctattatggtcactccaatggccaaccacttctgatttttccccacaactacaaatgacaaggccaaaaaagcaaccgaaacaagcacacaagccaaccacatcagcttgttgatcacagccatcatctgtttcttggccttgctctcaatcaccacaacagaggtttgtaccacaactacagccagtgaaatgaaaagggcaatcgaatcgaacacaaagaagatcaagaatggagcttttgaggcaatgttggcctcaccaagagtgaatccaagaggaatgtttttcgggtcatccacatattggccagggacagtgaagatcgctgcaaaggcgacggttgcaatgaggactgccaccacagttgtcgagttaatagcgttgttgagtccctcggcgtgcatcttattgagtcttttggctatgccttgaactcgccttcttgtctgccgtgtatgttctaattggtcatgtacttcatgtttgatgtcactcactgtttgttttagctctctggctgtgcttgttccctgaggcttcatgtttttcgcactctgcacgccgtgctcttgtagaattagcttgacgtcgttgttccctgtcttctccgccgtgtcaatggctgtttcgcccgtcttatttactgctttcttgtcggtatcgttgtgcccgagtagcatcctaactatctgcataaaaatataggcaatgactttgtcaaaaagttcatgcttaagtaatataaaatgtactattattgtgtttttaataatactcatttagtatctagctgatatttcaaaattgtacctttcactacgtttaagtgttaaccattttcatttatgcgagtttgattaaataaacaaaattttattgatcaaattaaaacataaggtaccgaatgagtaatattcaaaataaagtactaaatgagtatattcccacttataaaatagacaaatcttaaggccaaacacaagacttgcacagcatgcatttgttcaagaatagtgtctttatctatgaactggttcatgaaatctcactctctttataaacaggtgttacttaattgggttagaaaacactatgttcagtttccccatttttgaaataagcaacacatattagtggtccctagagaaaattccattctaatattatgcatacccatctagtgtttaattttctctacacagaaccttatcttataacttatttggctaattgattgagatgtgtgaacgtgaaaatataatacacaacaaaaccaacaaggtcatacagaatttaccatattgacatatattttaagattttagacaaataaatgaaattacaacttgcctctataagacaaatactacttcaaataattaagattatgacctcactgaagccagaagcatgaaccaaaatcgtattgaattgaaaagtcttggtcaataaatgtaaagctaaaataataataacaataaaaatatataagaaagagagaaatgaccaatgtgagaattaaactaagcatttcaaatcaaattattatatgccttatcttctatctcccactataagaaggtcaaactattttaatgcacattcacttccacatatacttatgttttttcactaagtcaaaactgcaatagctaaattgataagatatgaatcatatgattcaggacttaaatgctttttgagtaccaactcattttataaacaatctttttctgcacccaaggctctcaaagtttgactataataaatgagagttaaaagagtactatctttctacttagcccacatcagagagttgacttctcaatctagaaagaaatcaacttaaatccaaacagaaaattatgtacttgggaaagaaactaaggcaattggaacttttaacactaaaaacggtttaagacaataattaacaataaataaggtcattctactaagtatcaaacttaatgaatcaaaacaaaatcaagaaaatatatattacctgagttctaccctttcgagtagctatatgcaaagcagtgttacccttgttatccactatgttaacagacaaaggatctgcttttacaagttcttccacaacctcaagcttctgacctttcacagccatatgaagagctgtttgtccctttttatctgtacgagtagccaaaccaggctcagctctaagaagctctttaacaacatccaaatgcccatttcgcgcagcagaatgaagggcggttttaccattacttctggcaatggtggcgaggctgcttccggtttctaacaacagattcactatctctgtatgaccttgtgttgcagctgtgtgaagagccgttgtgttggatatatcaacagtcattgctagttctggatatgcctccattagtactgtcaaaacatctaaaagcaaatagagcaaaattaataaacatggcctaaaaagaaaagggattctttttcccgaattattgagattattggattcaagaactatcgttcaacttcagttcatgtcaggtacttaaatctctaaaaagttcgggttaaaaaacaaaggagggagtaataaggtacctaaatctccttgcttggcagcaatgtggaaagcatcaaaaccattcctggctttgattccagcatcagaaagatcatagtactgaatcatttctctcaccaaatcaacatatccatactcagccgcaacatataaggcggtttcgccggaatggttttgcttagccagaagctgcttcaattctgttcctcctccggtgccggtgaggatttctctggcggcaacaatgtttccagctctcgcagccgaatgcaacggactgtcatcacgttttccggtcaattgcttggtcattttctttctgggcaaacttggttgaactgtctgaagctgagactgttgctgctccccaactggttcttccgccattgatgaacaatctctttcctttctcagattttttttttttttcaatctacaacccacttcttcagaaattcttttctcttaattccaacgaaaacccagatcaaagtttgcatcttttatccaaaacaatcatcatttcttcaaaacaaaaacaatcctttgaattataatgaaactcaaagaaaaaaaagctaaagatataagctttactaataaagggttgtcaaatattgaattgcattctccgatgtaacaaaatcatagatgtttaaggtctcacttttcccagcacaacatcagtattcttttttttttttaacaattgagatgattttggataaaatattaaagaaaattcaattatttttttaaaaaaaaatacctgggtttgaaaggaggagaccctttattctcctccattaaacaccaaagaaaaagccatatattcaggccccaggttctagagaaaacagaggatttaataaaatacacctattcagacccctgtgaccaatttatggaatacacataaaaataaaaatgaaaaggagagatttttatttggtatgaagaaaggaataattatagtataataatgtaagatacattaaacacataagcacatgtatgaagcaacttttttggaatcttatataattagaccccagaagctaatatacgaacaacttagccaataaagaagggttcttttgtaaaggtggtgatcatgacaacaaaataaataaataaattaaataagaaataatggctgagaatcaaaataaacaagaaaattgcagaaagaaaagtcttttgttgttaataaaaaaaaaaaaaaaagaagaagaagaaaaagaaattaaaagcaagaaaaatgcagctaaaaaaagtctttaattaaacgaaaaagaattgtatagcaaaaagggaggacaaatgaaataacggaaataacagaaccacgcgcattcttacccgtagcagagagtgttgtttgatttaatttaattttttagttaatataaataatttattattggttattttgatttttgatacttgtatttgtatttgtgtaaattattatgaacaaaaatagcaatttggaaagaattttttatattatcacgatttcaattattaaatttgaatgaatatatatttttttttttgagttttatttgccctctacacatatgtgcatctcaatattacaaaaaagtaaagttaaaataattttaaaaaatcatttttaatattttttaatttttttaatattattttgataaattataatactcattttaattttattttcataattatttttgaatcatgtataatttatttttatttttttaatataatttcatattgttacaagaattggttatgttattttggtcattgtttgtccctactctcaggagttacttagttatgatgatgtttgttttgtctcctttttattcttattattaactaattaattaattaagtcggtttagttagttttgggtcacaacctatatatggttggttttactctataatttatttattcgattactcaataaaatgtttctcttgttttcatttctaatctacaatatggtatcagagcgggaaagaaaagcttttcccaaatcttgattcttctccgccctatttgtcgtgtttctattctcttctccaatgaactcctgaaccagagttggtgcctcgtttagctctatgctttcctttcttgttctttttatcagtgttttcttgcctgatctttttatttatgtttcaaggatgtcaaatgacgatcaatctagtcctgcggtcataggtgaatattctgggctacctacgaattcagttgatcaagaagctagatgcagcagagaaaccctctcgaagatccttctaatccttattacctccaccatgttaataatctaggcaatatacttgtctctcaacttctcactaggcaggataactacatgtcgtggagcagagctatgcaattggcaatttcagtcaagaacaaagtcaggttcttggacggttctattcctaaaccttcactttccaaatctattttgtataatgtttggactggaaataataacattgtcatatcatggatcttgaattctaattctaaagagatttcctctagtattttgtatgacgaatctactacaactatatggaatgatcttaaagttcgtttttatcaaaagaatagcccgcacatatacaacttaaggaaaggtatgatgaatatgaaacaagacaaccagggaattagtatgtacttcaccaagctgaagacaatttgggaacaattgtcttagtatcgtcttacttgtgtatgcaatggctgaaattaaggaggtgtcaaaagactccaagaacactaccacatggagtatattatgtcattcttaatggggctttctgattcctattcacaagtgaaaagcagtatacttcttatggatcctctaccaaaggtaaatcgtgtttttgtcacacgggaggaaaaccaaaggaaaaatcaacttctggtgttaaacaaaatcaaagcatggcttttgcctttcaatgagacaaaagcaaatctaacaaaccagattccaatggaaacaagtcatttccacataagaggaacaaacctttctacactcattgcaatattcttggacacacaattaagaaatgttacaaaatacacggctaaccatctggttataacaagaacaacaaaagaaaagaagccttagccaatcaagttcaaaatagtaatgagaatattggtgcttctggtgacagccaaacactccttccacaactcaccttaacacaatacaagcaacttctgaatcttcttgttgttcaacaaataagtatgaccacatcagaacctatcacttctacgggcaacacaagtatcattctctcaaatgtgtcttctttccctgttaatggatctaggatcttagattcaggggcaacaaggcacatttgttctaatctcaaactctctcaattcatctgaaatgttaacaatactagattgttgttgcctgacaatgacaaattattagtaagtaaaagtggttatgttgccatttctcctcatttgatcctaaatgatgtcctatatgtaccaaattttaaatacaatattatatcagtaaattgcctcactgatcaaaattctctctgtgttaaattctttaatgatcatttcatcatacaggacaccatccacaagagaatgattggaaaaagtgagtccaagaatggtctatacatgttggattcttcacctgtagaattgcatattctccacatagctgccgacctttggcactccagtcttggacacctctccaataaatacttacatttacttagcaataaactgaaatgtaatgttacaaacttgcataaaaaaatctccatgttatatttgtcatatggctaaataaagaaaactttcttttcctaatattaacaattttacctctaatacttttgatctcttacactgtgacatttagggatcctatcacattacttctcattctggacataaattgttttctcactttagttgatgatcattcaagatttacatggtcttatcttttaaaacaaaaatctgatgcaccaagtgttattctttaatttttttcttatgttcaaaaccaatttaaccgcatgattaaaaaattcaagttcgacaatgcacttgaattggtttttagagaactttttcaaaaacatggcatactacacgactttacttgtgtagaaatccctgaacaaaatgtcgttgctgaaagaaagcatcaacatttgttaaatgtggcaaaatctctttgttttcaagctcac

SEQ ID NO: 16886 - DNA, 5079 bp, Cannabis sativa
ttttttttttgcaactttggttctctttaacattttttttttacggtgcttaccttatgaaaatagaaaatagttgctgaactgaacttgtataattaaaagattactatcaataatatttatccaaactttctgattggttagggcaaagccaaaattaccacagctgtaaagctagtgttattgggtaggtaggaactatttcactatggggtcatagggttggagcttgtccaccatcagtttaccacagctgagaaacaagtttgacaaccccagacatcggagcatcattctgcagtcaaagcatacataaaattagaagttgcatctgacaattgtgtaccagagtagaaaaataagcactggaccataagttgctttcaaagataagataaatgctaaccttataaacaattgcataaaagtttataaggttgaaacaacataagcaaatgatctaagcaatgatgtttgacttaccaagtaaacaacatcaaaggcattgcggtaggcatcgagcgagctttcaacgttatcattcctgaaacaccaacaggaatcatcaatgaattttctaagaatcaaagttaggtagaagtacaaagtagctctcatttgttgaaattcttaaaagggtaatgtagcagacataacacagctttgtcacaatagagaagtcaaggaatcttattataagatccaagagggtgctgttaacccttctagaagaataaatttaggtgccattaggttggaacttggaaggaatgaaaacacaagaatatgaatggaataaaatcaaatttaaaatgcataaaaaaattggattaaattttttcttatcttccattggaatagtttttctttccattttaaaatgaaatagtcattccaccaaaatgatagaaattagtcattgaaactacacagtacaaatacagcttcaaaaactaaataaaaactggaaatatgtttttttttatggaacactggaaatatgttgagtaatgaatataaactttaactgattgataatctcacaatacaaactttaactctgtaaaagagtaaaacataatgcaagctactgttaaagaaacaaatttaatagctaagtaaaaagaattgacagaatttactcacagaaatcccacagaaattctggtcacatagttcaaaccatcagacattcccaggtctccaaggtgatcaccaagaagcaacacattggttcttgtctttactgatgaattgtcagaagttggttcatctacatcacccagttctttgtggagaggagcagccatttcaagtgcgtgttcattcttatttaaagtgtgaattgtcttccctgtacgaaaaattagtggaaacaaaaaacatgaactccctctaaatcttctatcacttaataatgaataaataaaaacaaatactggcataagaaagaaaggctgagcccgagctatgattctaaagatcatgaagttaagcactactcatcaggctaaaatacccctaccccctaacaatattattctcgtttgcctcttacaattggttaatgtcttcaaagaattggttacctttaaaagaaaccagacagcccttttcattgaataccattcggtttgagacaatcttcacatttttgaaagatttgtgaagcttctgcctcatgacctgatattaagaaataagtgacattaaaccaaactgtaagtcagatccacaattaaaacataatattcattagttccagaagtaaaattttatcactcacttcttcaattatatccgctagtccagctgaaaatataagtacaggaatgtctctttcctgggatagcaaaaaccaacaaaaatataaggaagaaaattaaaaaatgagacttattctttatgaaattaataatcaagcctaggatagccatcctatactcttcaaaatatagtcccaatcaaatcattggaagagaattgctgttgcaatgcctcactgtgatgcatatatatccatccagaaaacatggtatacataaaatgaactttacctccaaaagttcaagtagttcgccaacaccttccctaaaagcaattgtagaatcagcaacagattgctttatgccatcacaagtaacacctccttcgattaaaagagcatgtgtttttccccacctgcatcaatactattgacagtttcaatcttttgaaaattattgtccaaacttaattttatcttagatgcagaacacttcatgaccaagtgtgattagaagctaccctagtggacataattgaaccataatgctaatatagtttcatcatggatggaagcattttagagtagtgaatgggtaaagatgcgaaccactcttccatgagctttgttttctcctcaattggaattgttggcgaaaactctaagggatgatagtgataatacaattccctccttttcatatcatattccggattcacctgtcgcaaaaggccatgactacctatggttgttatcaataaaactgagacaaatcaaacatatagaaaattatataaaccatttaagcactagggtgccttacttgtcccacgaagaccattgacccaatacttggttagtgtggcatcaaaatctgcaattacctggtatgaaaatgttccataataagtaaatatcaacaaatataagaaagtcaccgaaaaattaaccaattcaatgaaatcaaacaagtgtagcagcacttctgattctgaacattgtatgaactattctcactttccacacagcaaattatttaagtagagtaatcgtaaaacactatctatatctacaaatcaataaaaatgagattgctctaattatataaatgtatatgtatattccttacaacattatgtaatgtgttgccttgcctgtagatgagctatgtttcttaaacatcaaggacccaaaaatcacaaaataaaaactagaataaagggaatgcaagaaggtacttggagttttgcagaaccagcagcccgaattgcagagattttgtttgataacttatcagggtcagccaccaccacctcagaaccaccagatagaccattctcctccatttctgtcttatcaagacaaattctaccgaacccagaaaaacatatatactgattagtgtaagttttaataactaagatcattttttcaaagtgtgagcataggataggtgggtggtaaaaggggaaacctggttctgaattggaccgaaaagcaacggtggttccgtacggcgttcaagctgactgggagagttttgaagaagctttgaagatgataattcattttactgagaaaccatctttttatttttttccaaccagtttttatttttcttcttcttctttcctccccctaaaaatgttttcattcaaattaagatattacagtccttaccaaaaatacatataattacaataacagataatggtacctaaaatttactcatgctcaaattccaaagtaaattttgtttttggtatttttcataatagttaacatttttcatgtatatatatgcatttttctgaaaattacacattttatagtattttatgagattatcaaggtgtaatatatggtaaatggttactctgaacatattttttcatttttttttaaacttttttggaatttttctcacaaaatattgtttttgaaaaaaaaaactacatttttataaacattgacaaaaagaaaaccataaataataatgaaaattcacctagccatcatttgttgataaaactcgtgtctttgcattaataagttttggtcgacatgagttagttagttacttggtaaaatcaatctcggttataattaacttgttatggagtataatataaaatgtcaaattgtatgatctctcttacttatataaggcaataccaaatacattgaacttccaaaagcaacataaacatgttaaagtgaatttagaaaatgaaactcaaaactttgagctcatatgaggtagggccttggatggagagttctcaaacacaatattatttcattctcaaatgggctaggaggagcaacccacaatccatttagattcatcttgggctaccccattattttattagtattaggcaaacacataatcccacaaaacctttttacttaaaaaaaaacaaaaaacaaaaaaagaagaagaagaagataaaactttactaatatctattagtttattgtaaatgaatattgatagatcttttacattgccgaaaaaaattattgtttcacaaataatcatattttgggttaatacataattaaaactagttcaatctttttaataccagttcagtagttgcaccaatattttttataatatgctcaaagtggacaattttgaattatattttcgcatgctataattacaatacatattatcatactaaaaaaataaataaactattatttatctacgtataaaaaacaaattttctttatggatcggatagtggcaaaattattaatgcactcctacatacatattgttgaagaaagttagtttagtttgttacagttaactttctcttaactgattaatttttcagttagtctttggttcagctcagttgagctaagtcatgtatatatatacttccaagctctttttcaatatcaataatgaatatctttttcactctattatatattttgacatagtattaggtctctcttttgtctctcatcatgttccttctataagcactccttaggattagcttaagatgagatggacttaaaataaagataattgggctcagaatctaagccatgaccaaaatccattatgcgccatagagttagatttttgtcactttagcgttcccactcaattgccctattgaattccaagatgtaagtataggctagtcctgtgggtaagctaataacaaacaagtcaaagaacccatataatataattgtagaaatagtgattcgaattgtgtattgatttcatagaataatacatatttatatacaaaattaggagactaaatatctactaaata

SEQ ID NO: 16887 - DNA, 6380 bp, Cannabis sativa
aaaatggtgtacgattgtttttttggggttaaatttaacggaatattcttttatttgtaaagcatattctgttaaaccaagaattgccgttacataggcacttttaatatataaagatatatatttattggtaaaaaacattaaaaaaaccacaataaccataaatttaataaagtctaaaaagtaaataaaaaatatatatgataatatttaaatagaataaattaaatatataattaataaaaaatattcaatatatatttatatcaaggtgtatatgaagtggtatgtactaatattggacccgtaccatactcgcatatgtacagcgcaatttcgtcctaattattattttttgtttaatcggttaatctcatccatgttccgatcaaataataccataaatattcgtaattgtgaattatattgccttaattgtcaattatattaccattcctataattaaagtctctaattgtattgcttaagtaataaataattgtcttgtcttgtgatatggtcaagtttcaatagacgttggtgagtgtgttctgtgttggtgaatgagttttgtactgattcttgtttcaatagttttggcctttactatggaggaggattatgagaacgctatggtggaagaggtagagatgggaaggttgttgtatgaagatgaagatgaagatctgtcggagatagacgattggtggggccttgtgggtcgtttcttaacgaaacatgtggtggattttcaggcgatgcaacataagatggcatcattgtggcaatcgggtaggggcatgtatgtgaaagaactaagtcctaatcattttatttttcaattttactatgaagtagatattgaacatgttatagaagggagtctatggatttttgatcatgcaccgcttcttttttagagggtgaaattgggggaaaaacccaagatcaatccaattgtatatattggatttctggattcaacttcatgggatgacgtcgggcttcatgtcggagagggtggttcgggacatcgggaattatataggggtgtttgttaaatcggatcccaataatttttctagcgtatggagggattatctcaaggttagagttactattcggactgataagccgttagaacgaaagatgaaactggaaaagaaaagtggtgtctcttgtgttgttcaattcaaatatgaagatctacctacgttttgtttcatttgtggtatgtttggccattcgaaacgattctgtgaactttgtttgaaactcctctgcatctaattgagaagccatatagctttgagataaaggctgccccgagacgaagacattacaatatgggtgcacagtggctccggtcaggcattgcatcaaaataaggcagctctacctctcatggtagtttccagcaaaggaattctgatggggacaacacagttatggaagagagaaaatttaggggactgaaattttggctccaagatatttggataataatgttggtaatttttctgatggttatggcaagaatctgcccaatcatacatgtggcagtaatcaagatatacaaggaaagtcaacagaaatctttatggctcccgtttcattacaaaataatataattcttagtttataggtgttggacttgaaaagaaggaaaaccaatattgatgtggggtctagtggattcgtggatagtgggccgaaaatcaatatgtatgacaatgtgggaaaaggtgtcgatgagggtgatgtgattatgggcttcagtgagggtagtagtataaaaaaaaaacttgaatggaaacccgccaagcattatgaatgttttaagttagaattgtcgtgggcttaggaaccaacagacatttcaatttcttaaagagattatttctcaaaagtaacctaattttattttttttatgtgagactaaatgtaacaaaaatagagtggaatgggtgggtagacaattgggctttcagggagtttttatggtggaagcccatggtgtaaatggtgggctggctcccctttggaaagaaaaagatgatgaaaatctattgggcttttcctttaatcatattgacttctgtgttaaagtggagggtaacaggatttggagacttactagtctctatggggatccaaacagagcaagatgatttcaaatgtggaaactgatgaaaacaattgctggtgattagaatcttccatggtgtgttataggggatctaaacaatgtgttaacccagattgataaaagaggcgggtatccttacccacgatggcttcttgatggtttctaggcgtgtcttacagattgtggtctctcgaacatggagttatcaggatatctatttaccttaggaaaaagcagagggtcgagttcgtggattgaggcacgcctcgatcgtgctctggtttctgaagcttggatgaatatttttccaggtgttattctcaccgatcttgaacattcaaccttggaccattgtccgttactgttagaactggttgacgtagtaagcttattcctatcatcggtttcattccgagaatgtgtggcttaaagagcctatatgttatcaaattattgaggattgttggggtcaagatagtagtatgggagtaatggagaaacttcaattgtgtgcttcgaatttggcacattgggggaaggaagttactgggtgctttcgaaaaaaggatcaaattttgtaaagatgagctaaagattttgaaaagtaagagagatgttagttcagtccaaaggtatgaagacgtcaaaaaccaagtttcatgtatcttggatcaaaaagagacattttggaaacaaatggctaaacaattttggcttaaagaaggtgaccacaacaacaaatattttcatctcatggccagaaagcgcaagagaaacaatctcatttgaaaactcaaaaaccaatagggagcttaggtggactgggagcacagtttaactgaggtaatggtagactatttttcctctctttttttggcttttaatgtttcttgtcccgaagtggttgatagtgtggataggcttgtacctgatttggctagtgaagattttcacagactagtcacggaagaggaggttcgtaaagcgatctttcaaatgcacccggataaaagttcgggcatggatggcatgaccctgactttcttaaaaaatgttaggatacgattaaagtagatgtgactcggtttgttcaacgattctttgaaagtggtgagttagaatcagcttgtggtgatgctaacgtggtattgatcccgaaaaagaaaggcctagataccatgaaaaatcttaggccaatcgctatttgtaatgtcttgtataaagtaatcacgaaagttatggccaaccggatgaagccattcatggacacaattatttcggactctcaaagtgcattcataccagggagattgatctctcctttgaagttcttcattacctcaagaggaagagaaaggggaagacagggttcatggcgttgaaacttgatgtgaaccctgtaaagagtgcttatggtttattgcaactaatcccaatatcatttcaactcacatggctctttttagtgctattgtggcaaacttaatggctatggatagttctagttgggacgatgagattattggggatctatttgaggaaagagaccaacggttgattaaaagaatccctttgcaagctacaacagcctcagataaactatattggacagaggaggtgttaggtatgtacacggtaaagagtgcttatggtttattgcaacttcaaaaagggttttggtatgaagacactgcatcgactttctggcataagctttggagcctgaaggtgccaccaaaaatagctaacttgctatggcgttcttgctccgagtgtctccccaaattagtacaacttcgtgtcaagagagtggttatttgtaccttgtgcccgttatgccgtgaaacagaggaaacaaccctgcattgcttggtcacttgcagggtggttcaagtttgttggaaccgtgtaggaataggcacaactctaacacctggtgcatcagtacttttcaagtagaaagtttgagtagaaaggtattgtggttgttgtttgttgggctatatggggagcccgaaataatctcgtttggcaaaataaagaatttaacccacataacgttgttatgtttgctaagtcgtatcttgatcaatggaagaatgctagaaaattcaacatggatgcatcatggtctgaatatcagaaaggtgatgggagagagcattggacaccaccaaatgttaatagtatcaagattaacatggacgcgatattgttcgagggcggtcgtagttatggcattggcctcgtggcccgagattctaatgggacgcttatcgagggcaaaacttccttttcccaaagcatgattgaactatctcttgttgaagccataggcatcaaagatgcactcacctggatcaaagaaaggcaatggcagaatgtttgtctggagtccgattgtctatgtgtgatttaagctctacgaagttctttaaaaatgatttctttatttggtttagttatttaggattgtaaatctttgcttgatactattggtaatgtgtttgtctcttttgttaaacgatctgctaatgtagtgacccataattttgcaaaaggctgctattttatttcctgaccgtcgtttcagtttagagcagtagcgaaccaagatttaaagtgagggggcgtaattttttttttttttttggtaaagcaggggagcaaaagtaaacttaaaaagaaaaaagtattgtttgtaagatttgatcctttaacctctaacatatatataatttagcttaattattgcaccaaaactagtattatgtttataaatattatcttttattacaaatatatgttgtaatcaactaaaatacatatacattttttcctaatttttttagggggcgactatcctcttgttacaatgtgggttcgcctttagtttaaaaattattttaactgatttgttattttgtttgctaaatgaagtaattagttaataaagctaatttcttactaaaaaaaatctgtaattgcaatagtaaattagatgcaattacaaaatatatttttttattaaaaacaaaaataacaatttatatataattgttacatgagaatattttatcattaattaatattatataattactacgaagacttccaaaacgcccttactataataagttttaaaaaaatatcaacttctagaaaagtctttaattaattaagtaataggaaactgggcaagtttcaaggcgcgttcaaaatgaagccacgtgtcgagaaaggaatataacacacttcgaggtatttgtgttgagaaataaaaaggaggtcatagtcaactctcccactcccatcgcaaccgtttatttttatatagctcatccaacggttaatatatgatataccggcagtaaacggtttttaaattaaaaactggtcaacagtttcagctttaaataaagaaaaacgaatgactccacgtgatccccactttcagagtcagctttctttctctcacaaaattaatatgtgtctgtagattaattaatctcgtgattagttagatttaattttttaattaacttcaattaaatattttactttttcactgaattattaagagattatctagaagaaaaaaattccatataaaattggaaatgtcgagtcaaaaatattgaattttttttaggcggcttcatttactaattttctcttaaaaaataaattagaggtaaagaatcttacaaataaagaaaaaaaaaatagaggtaaagaaaaaaaaaataatacatttggaatttggatcagcatcgtttcttgctaaaactttgaatgtagacaaaactaaagttgtctttaaacggataagttattaataaaaatttgggaaaaggtttacattggtgataccaacacaacttataaacgaatactgcgtgttaatttttatttttgtcttttgttccaaatttaaattaaagaagaaacgttcctcttcatatcttattattattattattattattacaaacaaaaagtttgctaaaatagtaagagtgcgtttggaagtatctatttaattactaggtaaggtaattttaaggtagtaattacgtaatttatggtgcgtttgaaaagctacaatgtaattaaatttgtgtgtaattggaggtaattacacaatttgtcatgtttgtctgtccatgtaaattacactgtaactgtgtaattgaaagtaattgaggggttccaattacactctccaat

SEQ ID NO: 16888 - DNA, 4899 bp, Cannabis sativa
ttggatatctccctaagtaaattttagtcttaacagtacaaatcaattcctaatcctttaggattaatcagtccctctatttatacttattcatccctactgttttaagctaactattaggacagctcatttaacaactaaaaatttgacaactcagcctctataatcctaatcaattatatttgagagactaatatcaaggccatgtgatcagtaaaagaagcacatgtttatggagaacggcagtcatggcagttctatgggtagtttggttagaacgtaataatagaatctttgaaggttcggagaactcagcagaggccctatgggataaaattaaattttggactgcttcttgggtgtacaagactaagctatttgaaaatgtttctttctcagatttaatgagagaatggagagcactgttgtaaagatataataagagaatatgatcgctgtaatcatatctttgagactttgtttaagccttagaatttagggcaatttgtaaccacggttttcctccgccataagcgagggtttatttatctcaagggtgggggccaatcttagtgagtggtccctcctcccttttttcagaaaaaaaaaaagaaattaaagagaacttatctgagtgtatttcgatgtgactcagcaatgcaaagaagttagaaaacagagtcataacagtaaatgatttccatcaaagacattaaacttgactttgaaatcttgatccttcgaagtcttctacaatactcacttggtgagacccaattttttttcatttgtgtatttatcttttaagatgatggttgtattggtgattcaagattatttaatcttgatattgttgtgagcctctaattatattagagaagaaccttgaaccctattattgaactttggtaatagtggatgattaaatcagactacggtttgcgtggttttttcctagcaattgggtttccacgtaaaatcttggcgactaacttttatgcttgatttgagtattttatgttgcttgtagtgctttgatattgcttattatgacttgaaaaaatattgtgattaattggaataaattttctcaacaagtatacaagtagtgtttgaaattttgtcaatattaaacggtacaatgctagaaaacaccacttaatgcatctaaacatttctactcttttaaaacggtcaaagtcggtggctgaccctggaggagcaatcagtcatcttcgaattgatatttttcctactaaagttttttttttttttttttttgtacaaaaaagccagaaaactaatcacccttatatctttttaaacttaataaactattaaaccacagattaatgtacattgtggtgaactagaaaattaatagcatatggagttctttccttttcttgtcaccttattagttgttttgagacttttctctctgtctgcaacttcttttgctgtgcttcataatgatatcattagaccttcagatgttctcagagataatcacaatgactacacagacacagctaatttattggtatccaaagaaggaaggtttgttctgaaattctttagtccatatgatttattaaaccatcgttatctgggaatatggtataaccacactacatatattcgacctgtttgggttgcaaaccgatgtaaaccaatggaagattcatctggcttgttgagtatagacaacaaaggaaatcttgtgcttttttcagaagaaaataatagtaagagagaaattgtttggtctacaaactcgtctaaacaagccgcgaaaccattggttcagcttttggataatggtaacttggttttgagagacgagaaagatgcaaacacaacaaactatttatgggaaagctttgattatccaactgatacattgttgccaggaatgaaattaggatgggacttgaagagaggtctcaataggcgtttatcatcatggaagagcttttatagtgatccatgtgatggagatttcacttatgggattgagcttgatgagaaacgccatacatatcctcaactaactgtccgtaatggatctgcaatattgtatcgtcaagggttgtgggatggtatgagttccagcgatgctgtggatgattctattttcaattctgtgtacaacgatgatgaagtttactacacttacagcctccaaaataagtccatgatgccacaaattgtcctgaattatgacggaactattgaacctagctgggactttgggactttttatggggcaatcccaagagacaaatgtgactattatggcttctgcggagctaattcacaatgtaatgttgtaagtgtaacagaggagccaatatgccaatgcttagaaggcttcaagccaaagaatcaagacaattggaactcaaggtcttggtcagaagggtgtgagccatacagtcctccaagttgccatgatgaagttgaagaggaggaaggatttgaatttgatcaatattcaggctttagagcaccggatactaattatagttgggtgactaagactaaggatgaaagcgaatgcaggagtaaatgcttgagcaattgctcttgtatggcttatagctatccattctcagagtcaatttactcaaatgaagattgtatccactggtttggagatctgtttgatattagacaactgtcttctagtcgtttcgaaccacatacttatattcgaatatcaaattcaaaaataggttcacatcgcgtgttcttagtacattttatatggatctcctttcccttgttcaatatttgattaatgtttgcttcttttgtttcacagctccaaaaattcataatgaaaccagagctgatggtagtcgtgggaaggtgaaagtgaagagagtagtcataataatagctatagtagtcggattaggtggtgtgtttattttgattgccttttacattcgaaggaggagacgcattttcagtaaatactttcttctctaccttttacttcattctgtctttttctttattctttagattgcgctcttgtaattagatttgttataaatagtcccacaaagataataccacatataagatgtatgcgctactttttttattgtcaagttttgacatagaatctcatgcaccttacaaactcacttacatatcctacaaaagaaaaacttctcattttaaacattaactactaaaaactattaatggttttttttttcagagagaaaggaaagccaatatgatgattttgagcttccatttttggacctgcatacaattagtcttgccactaaaaattttgcagaggcaaataagcttggagagggtggttttggacctgtatacaaagtaagcttctctcactcaacatgtcattctcttttttatttctttcttaatatggtaaataattattgtcattgtcacataatagggtactatggaaggaggtcaagagattgctgtgaaaaggctatcaatgtgttctggacaaggagtcaatgagttcaaaaatgaaataaacctaattgctaagattcaacaccggaatcttgtaaagatatttggttattgcattcatagagaaatgaaactactgatttatgagtacatgtccaacaaaagtcttgactatttcatttttggcaagtctcttttcaactcttttaatacatgtgatgttctatatatatatatatatatatatataagttgccaatattgttctaataaagcaggtggcaacatttgcagatgaaagacaaagcgtactattagaatggcctaagcgttacaaaattgtatctgggattgccaaagggcttctctatcttcaccatgattctagattgagaattatacatagggatctcaaagctagtaatgtgttacttgatgaagaaatgaatcccaaaatttcagacttcggcttggctagaacttttggtggagaccaacttgaaggaaacacgaacaaagttgtaggaacttagtaagtgatcttgagaaatcttttagttgccttaacataaacatattacatactaatatatagtgttgtgcaaatacagtggttacatggcacccgaatatgcttccaatggcctattctcaataaaatctgatgtgtttagttttggcacattggtgctagaaatagtaagtggaaagaaaagtagaggtctttacgatgaagataaaattctaaacctcactggattagtaagtgcaaatagaaaaaactttattaaattttacattgattcgtagctcgttttcatttatacttttataatgtttattaggcgtggactttgatgaaagaaggtcatgcatttaagctaattgaaaagtgcttgttaagtgatccatacatcaacatggaagaagcattgcgttgcattcacattggtctcttatgtgtgcaacaaaatcctaatgataggcctaatatgtcttctatcattctaatgttgagtggtgagaaaatgttgcctcagcccaaaccaccagcctattttactaacacagatatgtgggaagaagctcattcctccgttcttaagcccccatcgtgcaatacaagcataactgctgtcgatgggcgatgacaattcacacaacagatcggtggaatttcccacatgaatattgagaatttacaccatgacaatttcattttgtttggtttaaaattgcattgatgattttataattattaatatacatgtcagaaatttataattattagtatacatgttggaaatttataattattagtatacagtaagagttggaatccagaatatggtggctctttttcttgtaagtccgctttcctttgcttcacttcaaataatagctcaaggaacccagagtgggcta

SEQ ID NO: 16889 - DNA, 8023 bp, Cannabis sativa
ttgtgtaatgaatctttctttattttcaaaattttaatttttaattaaaaaattaaaaatatttatagagcatgttttttgaattaaaaggttaaaaaattaattcaaaaaaaatgttactactctaaattttaagtatttttatttattttttaaattaattcctattgatgtatgaattaaattttaagtattttaaaagagataacattgttagtttttttttttttaccaaaacatgttgagactgaggggactatatttcttaccattttaactattacgaagtcttatttattattttttaaaaacaaagagtaatataaaatttaacaacatatgagatctttttttgtatatcctgagaaataacacaaacaaaaactaaagtaagaatatctaatttgaagaccaataaatcacctatatatataaagtgatatattaaaaatatatgcattaattatgtattatatatcatgcagtgtttgcatgaagaaagcttggaaaacaaagatttggataggaatgaattaagataggtgattcttcacagttaaaattaatatgtacgtagtaattagttactgtagttattaacttattattataataagcggctttaaaagttgttatatttattgttttatctttccccacctaattaatttctttcatattttcataataatatttataatttttttttttttgaaagaacataatatttatgattgaatatataacttctaactacaaacctgagaataggttatgttatcatcccaccgtccatggttatctccccacccatcatatcaatatttatggaagttaaaaaaaataacttcgattccttaatttataaattaatttggatatcaaaattttaaatttatacccttaaaaaaattatacaaatgaataattattattaatttatatgtacatacagaatttcaaaattataatttataaatcaaccagaaaagtactattgaaatattctaaatgcttggaaggtatgcagtgcactaatgaaatatagggtaattgaaaattatgcaaattacaaaatatattgccctcctcatagttagttagggccaacttaagttgtttggaggccttcgacgaaaaattaaaattaataaacgttttattaaaaaatatatattaatcaatactttataaatttaattttttaaaaaaatactttataaattctaaaatagacaatttttttaaagatcatgtgtatttatcaatttttttaagcgctaaatgcatatttatttttataaatatttattatgtatgtataaatggtacaaaaaatatttattatattatatatataaagagataataaaaaaataatcttttaatataaaaaccttctgtaatgatccaaactgctatatgtttaggcccaacctaaattagagaggtaagtgtatttatatcatgtaaaaatctataagaacagtagggagttgttaagctataaaagattccaaatcaaaagatgtcatttaccaataaaatatgcttcttttttcacacccttttggacccgttgcacctttaaaaaaattgagattgttctctttgagaagagaatcaattaatatttaaattattttaccagaaaaagataaaattatagtaaatataaactgaaaagaatatatgtggaccacaaacaaacacaaatttacattgtatcaaattaatacccaacattgtgtcaaaaaaataaaattaatacccaacatatataatgaaaaaagtaaagaacaaaaaactaaactaacctaacaaagcaaattgttataaatgcttatctaaatgccaaaaatcgtcttttgcatataccattatttcagtcgaattttcttatatgataattttctttattgaaaactaaaaattataagcacagacaatgataagagaatactgagactaaaaaagtatttggttggtggggtcatggttgttccaacaccaaattagaaagaaaatttcaatatagtgaaagtagtctagagcaatagctcttcttagctttaattaataatgaaactctttgttattagaaaactatgtagctcatcatcataagtctatttcataatcaattagaaaaataaagttttaggtaattaattacgtcaataaaaaagtttgctacttaaattttaattatataaaagacttgcatgtgatgacatacattagtctacctctcaagtctttatcatgtcttcccattaattttggctttatattgactataatgtagtgtttatattatatcttactataaataaatagttatcagttgactggtaatgttattcaaataattatgtatttggttagtttgtatctcacttaatacaaaaaataaaattgcaaaatcggttttttttatagatttcaatcaagttaaatgtatgcaaaaaaacatatatatagtgtcttaaacaaaaaataaagatgaaaacttaattaatgtttactttgaaacttgggttcattcaattataattattattattatttatttttatataaaatcatatcaaatgtattcaattagtaaaatcagtttggtaattctttcaaaaaaaaaaaaaaatcagtttggtaatcactataatataaactgcacaatttacttacagatgattaatgtaaaataaatatatacgtttattttttaaagagtgttaccgtcaaccttttattacaattttttaattaattttcatgttcgaaaatacatattggaatttttttttcatggcggtattcattataatgtaattttttgaaaaaaaaattgaataatttaccgtatcaaaaatatatttaaaattttttaaacacgcttgataaattaaaatatcagaaattttaaatcggtattgtaactattcaaaaaattttaaaattttacaaaaataatactattattattataatgaatacggttataaaaaaaaataaaaaaatatttcacatatgatttaaaatagagtagttgacttagaattgtaataagaagttataattttcactccatcaaaacttataaggtttattcaattaattaaaactaattaattggctttcatgaagtcagatttaataatacaatatttactatagttgccattacagtatctcttttctctaaaatagtcatacgtattatatataaagtcctcctcttcagtcgttacctgctcatgactatgtccatcaccaaaccaatctctcctcctttctcgtgaggcccagttcatcaccatcatcgacctctgttttctctctctgccgcctccaaagcttttatcctatctgggattttttttatttatatttattatttttatatacatgataaccgccattaatgggcaatctatgtgcttgcctcgcacccaaatcagtgaagaaaaaacccacgaagcgcctccaaaacccgccgccgcatgccaattcgagcaaccgatgggcccggatccgatcctcccggaaggagaagctcgacgacggtttgcttcgtgaacaagctctcgccgccgcgatcctctttcagcagcaccacagccaaaatgggtctctaccttttgaccgttcctcttcgcttcggtacccgaattctaactccaagaagaacagtaacaccttgcccagaagttcaagctcccgagctcggtccctcactgaccctctgctgcagccgcaacagcttgttaaccaggttcgagtttatgggcttttgtttacttctatttttgtttgtttgaaaatggttatggaagtaaaacatcaaatttgtacttgggttgggtatatctcaaatattagcttttgagtcccttcttatatgtttgttatgactttgatagtatacataattgttttgcttggcttttagtttggtgagagatttttacatattgaaacttgatccctttttattaaaaggaaaggaaataattaatgatttaaagtttcataatgtggcgctttagagtttctttccacatttttttttggtcttattgactttgtcggtttgtgctcatgaattctagattcttgatgtggtaactttgtgccatattctcattgattcattgataaataatgatttcaaagtttgatttttgatggcatctgtgtcttctaaacacgactacaaaccgtggttatggacacagagtgacacctatataatagtacatgtagctctgtttggctgtgtattttatcctttttttttttataagctattagaacaatgtagattggatacgagggtgattatcaaatctagaagtctgttctatctttattagttacatttacggactgcaccctcttcatttaaggtggccatataaaataaatgtttagtcgttggtaagctctttcaaaattgaagagttggtgggctccaatcatttatgaaattatgttatttttccttgccaggccccaatacccacctcaaactcaaagagaacaaaaagtcatacttgaagtagtatagcttcattatttttatgtttgcccttgatgggtgcaagaatgcagtttaggcgcatttgtagatttattaagtatacatacataaataataatatgtaagtagtttggtttaaatgatgtgaaaattaacccgaattggtaaacatatatccctgaagtggaaggatagatgtataacaattctgtatgagtagagattcatggtcctaatttggttcatgatactttggcaaacagaaataggtggatgtctctgcaatctgcattaaatagaggtggccttcaacaattaagttttaaacttgcatgttaagttctgaactagtatcttgcacaaaatttgtcacatttttggactatcattaaatttgtacagtgattgatttgattcaatcttattacatttggacatttttaccagatgcagatacatacaatttacagcatatgaagctgctgagatttatttctattagatgttcaaaattatccgtagaggatacaactacaagttaaaatttgtattttttttttctttttgctcaggctttctttcttgtattatttcatctagatgttagtttcacaattctgtttattctttcatagttcaatgtggcttatacctttattaaatgctagtacatgttattggctcaagcatctttccttcaaaattatctctgcctattcattggcttcctagaatcctgacgatcctcttttgtggtatcaggatgtaaagcatgatgatctagaaaccagccattttgtccttgttcatggaggtggctttggtgcttggtgttggtataaaactattgctctcttagaagaatgcagttttaaagtcactgccatagacttgactggctctggaattcattcatctgatgcaaatagcattacaaacctttcacaatatgtgaagccacttactgattttcttgaaaaacttgctgagggagagaaggtatttcctagacatttgatttgtctaatctactcacatgtcgtctttggttaaaaaaatgctttactactagatactttatgtgattgcacatattgtatatttctggcctttttataatgacagtggtttctagctgggtctagctagatgtatattgatgtagaaatttgtttggacaaattgtgcaggtgatcttggtgggacatgattttggtggtgcgtgcattgcatatgctatggagctatttcctcttaaaatttcgaaggctgtttttcttgcggcagcaatgttgaaaaatggacaaagtactctagatatgttctcccaacaggttacactctttatatcttatcgtttgtgcttattcgatattaatttttgatgtttgatctgcccggatactcattgtacttgggctactcaccccttcctaccccccattccaaacccacacattcctgatactaagactactttctttcatatccatgtttctttgcttggtttggagtatccatggagtttctgagtaaaatcgtttctctgttcaaatgtacatagatgtagattgtagaacatggcaatccattttggagtgacccacttgtgaatttgtaatttctataaagaaagtgtgcagtgcatgtaaatatggtttatgactaaagcttaagacactgcaggctggttcagatgatctaatgcgccaggcccaggtatttttgtatgcaaatggaaatgatcaccctccaactgctattgatctagataagtcactgctgaaggatttgctatttaaccaaagtccttccaaggtatgactgtttatctcttttcttaccacattgaagagatttaagtaataaattatgagaaggcattgtatcagcactttaatatctttcctaaatacaaacactctttacattttattactttttctgacttcacttttgcttctcccgatcaaggatgtcgcattggcatccgtttcaatgaggccaattccatttgcaccagccttggagaagctctctctttctgacaagaaatacgggacagtgaggcggttttacatagaaactccagaagacaatgccatatccataacacaccagcagagcatgataagtgcagaccctccagaacgagtcttccgcctgaaaggcgccgatcactcaccatttttctcaaagccccaagctcttcacaagatcctgatagagatctcaaagttaagtttaacagcttgaaaaagacgacaggccaatccggttagatggttagagctccgctgaaattcattaatagcagcactgcaggaatcatttactggtgctttgcaagttccaaacaagatggaccacaagttaaaaacttataaatgtgcataggaatcgaaattgccaatgtagtgcttctatataacatgttccggattatgttcttcccatttttattgacaaggggttttttattcttcacccttgattcacaatttatatattttatgccctgaaatcaagatctttccaataatagcaacttaatcaaggtgttccctgttttttctatccagcaatgaacaccattcttgaagcaaaatgatgataaggaaaacccactaaaaaaagcgtgcaacagcagagttatataggcagaaactttacgtgtgtatgtgttaacatatgaaagaaaaagctgccaaaaatcctgtgtttggttgagaaagtttggttgcttttacatttgggtctctctctgtctgtacaaatacatctcagtgtgttgttatactcatctctatacttttcattgccgcagagttcagcaacaatcttatctcaacgcccaagcaaaccctgtcttaagatttctcaattgcatcgtctcgttgctttcttaatcagatatttgggacttttgggactttttttttttccgcaaagtgggacttttggaacttaaaaccaaatattttactgtctttttctcaagaaattttgttagtttccctaggctggttgggagaaaaaataaaatgtaggtaaatttgtttaaaaaaaagtaaatgaaatatttattaataggtaaatgggatagttcattaagaaaagataatgttgatagagcaaaaccaatcaacaataacataccaagttgaaacaataaaaacgaagaaaagtctaataaagtagaagctattttgtgtcaaaaaaaaattagaagctatcaagcaaccaacgagtgcaaaaagattaggtttctattctaaatgagaatatgatagatttaattttccaatgactatcaaccattttttaataatactcagtattcaaaaaatataaataaaatagcttgtttggaacgccgtattaggtcgtattgtattgtattatgttgaattatattttatataatatttttatgtaaaactatatgtggtgttaatttttatggacacctaaata

SEQ ID NO: 16890 - DNA, 7342 bp, Cannabis sativa
  modified_base (6007)..(6022): a, c, t, g, unknown or other
  modified_base (6050)..(6071): a, c, t, g, unknown or other
gatcggctactagacgccatgatgagaatcaaacaaaaacactttgacacaaaataacaaaactctataagaatagagacaaatcacatgtcagatgacatgactttagtatatattgtttcaaaccgaaaaccataaggaaaagaatgctaattgctacgtcaacattaattttgacacaattaggtttgtaattgaataataagtcttacacactcattattattatagtctcatagaataaggatattgatctaatttaaatctcactatttttcttacaatacattgagtttcatattttaagtctaatttaatttatatattcgcaatttacgaattgaattgaattagatttaattaaattggatattttataaacttgtaaattaaattatgtaagattattttacaaattctaatatttcaaattaagttacatatattcgatccttttacacataccttcattctatactcattaagtattcttcttcttcttgattttcctttgcagaatggacgacgttaaagacaaggtcaaaggcttcatgaaaaaagtcaacagctctatttcttcttcatcttctggtaaattcaagggccaaggtagggttcttggatcatcctcttcttcctctacttcaactccttccaatcccattccttctcgccttttgaacactcctcaatcgggttctggttctaattccaattccaattccaagcctttacctcccaaaactcagatttccaatccaaaaccagacccttcacctcaaaaacccaagacttccaatgggttcgaccctttcgagtctttggtcacttctgggaagagatgtagaaatgggttttctccacaggtcttcaaatgcccgatttgtgatcaagtttatgggtctgaggaagaggtttccgaacacgttgatacctgtgttaatggcggtgagagtggtaatactgctttggaatcgggatcggtcgatattgggattgattcatcgagaaatgaattggaggctcgcgttggagggtttctttcggcgaagccttcagctgggtcgattgaaattattctaaagttgttgaagaatatagttaaagaaccggagaacgcaaagtttaggaagattcgaatgggtaatcctaagataagggaagcgattggggatgttgtgggaggggttgaattgttggaggctgtgggattttctttgaaggaagaagatggggagatgtgggcatcaatggaggttgttcctttggaggatggaattggtttgattaagtatgctgtgaatttacttgaaccgccaaaagaagaacagcagaagatgaccagttcttcatctgttgattctggtaatttagaggaaaaagttgagccaaagaagattgatagacaggtatgttcatatttgataatctctgcattactgttctgtgttcttgaattgctttgtatgtagaaattctttgtttggtaaaattttgatagtgcatagggatgttatgatcagcttacaggaaatttctgcatgaatctaataagtgaaattcgccaaatgtaaaatactaaatttgtaaaataatctcacttaatttactctttacgaccatgattgtcaaattggttagtgtaaatctatggttgttttgccactataatagctgtttatggttgtacagtataatttgtagttgtttctgcgaccataaaaaattattttgttaataaaatttgttttaaaattattttgttaataaaaaatttgataaaaggctatttttacaaaacactcatctaataaagtgtttgtcttttttggatgagatttgctattaggcaccctagtaacaccacgaggttgcaccttgcagattgttagcggttttttcataataattattcaattaaaatatgtaaactttgatacttaattatactaataatggtatgacatgatgaaattatgttcaaggagctgtagccctgtaacttgttttttgtaacttgacatgtaatgaatgaaattgttctgcaaaaagccaactagatttttatcttaatttctttattgtacaaagtgtcaccggccctgattaattcattgttgtgtttattcaaaaaccgaagcttacttctaatcacttgaaattatactttttgaaaccaaaaatttgtatgggagttttgatttttcttagcaaggaaggcatgatgatcataagctcttaacctctagtttgtatagggcatgtagatgtagggacaatactgcaatttatttcgcgaaaactaattagatgtgaaacgagattgtttagacaggactaattatttgcaatattagctgttcatatacattaaattacatagaaaatagatatgtaatttgaaaaacagaaaaagaaatgtactgaaagaaagttggctgctattatttggtctagactagtgttgtataagaagctaggcatttgaatattttagggtacttttaacatatgcaagcttaggttagttgattagatttagaaaattggctgctattatttggtgtagattattgctttataagaagctatgtatttgaatattttagggtactacttttaacatatgaaagcttaggttagttgattaatttgcttggttggaaaattgcaaaagctgtctaaaggtctttccgtgatggttaggtcaatttggatataggtttagtagccaaacattggcaagtgccacaaataagcaacgtcatcgttgtggacgtcgtaattctgacactgttgcaaagcagtaggagaggaaaacatcaatgaataacaggtgtgattacagtaattgtgataattaaagtattgcaaggtttctgcctgtggtaggggctttttagtttcgatatggtgcggacaagctgcaccaatgcttatgaatgtaatgatgagaatagctaattagtagaagaagcggttttgataaaatgatgagaatagctttgttttgtacagtattgggatctttaaccaatgtttctacggttacttttatcttgccggcttatcacaggaaaagctcaacttcttatatagtttttttttcgtcttaaatgtatttcatgtttttctgtaaagggtctttactggctattgtactctatcatgattttacctccattagtatcaatgaagtatcatctttgacctacaactaattcttgttttgtgtagaccaaggtgttcttttctgtctccgagaacttagcagctaaaatagagctaccggattctttctataaaatgtcaattgaagaggtgagaagagaagctgaaatgagaaggaaaaagcttgcagattctcagcttttgatccctaggtcactcaaggaaaagcaagcaaaagctgctagaaaaaggtatacaaaaactgtcatccgtgtccaatttcccgacggtgtagtgctccaagctattttctctccatttgagccaacaagttccctctatgaggttagtcattccctctcctttatacaatgactataaacattgtatatttatttataagttgggaccaaataaacttttgaatggaaagatgtctaatgtggtaacattgccaaaaatggaagttaggtgttttttcgttagaacacggttggcaagttgaacaaaaatcccttattgtctccactcttaagttcaacacaataagaaaaaggggaaaacatgcttgcttataaaagggttgctaggcttgctcattttaggcaagagttttgacccttcggggaacttgttcggcctgataaggaaacgaataaatcacattttagaaacaaaaatctatgatctagtgccagtttggtgttctttgtgtaatgcaaatgatttcatatagttatttaaagtgtctcatatttaatttctctattatcttcagtttgtcagctcagctctgaaagaacccagtttggaattccatctgttaaatccggtaaatatcaaacggcgagtaatcccttgctttcccacagaaggtgggaaacaaacaacactagaggaagaggatttggtcccttcagctcttatcaaattcagaccgagcgaaacagactccgttgttttcacaggactgcgcaatgaactcttagaaattagcgaaccacttttaccggattcagctgtttcttcaacgtgagcttgaattcgggtaacatcttttactcaaactgtcttgagaatcttcatgtttctctcattggtgttgtaacttagttaaaaatcatatattgattttttttttccacaacttataattgattcaatgtacaattatattagcttttgccctttgattgaagcctaaaggcttaatttcttcattttatctttgtaaagaaatttggattggaattgatttttctttttctctttcttcttcatttacaatttttgtagatgttgtaaccctatgtatcttatgttttaatttttatacacttaatttgctaattatttttcctggtggcaatacttaacttcaatctattaatttaaggcgttaattagaccaataaaaatatatcatgtttggcttttaacgattaaaatataaataacatttcaaatttgtaaatgagagtgaagttatgaaaatattattacaaaaaagaaattgtaacataaaaactttgttcacaaatttgtgatggaaaaaatattaaaaagtgtggttagtggtcacaatcttaattatatttcatttgaacacaatgggcaaacacactattttctaaagaataaggattgagacttgagagcataaacatgtgtttccatttcactttcttttgtttggccttttcttctctctctttttttttaattttgattgagatttttttttgactcttgtaagtttgaaaggtagctaagctaagtattgttaacctctcttggcaatagtaacacaaactaacatatcacgtggagaaataatccaaatcctttttgagatctctgaatcaccacaatttgagtatataaaatggtcccccatatatttggcatctcatttttttatgggtccaataaattcaacttcatccaatttgtgtacaactttctacttactacttattattcaagtgtgagatgaagaaaaattcatccaaaaaaaatccaggagagatttgttgatgcaattaggggaaacttttaattttatttgcttatattataaggttaataatatttggattttatgttttgtaaaagttgttaattagattttttgttttgttaaatgacaaaatgaaccttgtgtttttcaaaataatttaaataggacccttaacttaatttttgacaatttttttattcatataaccaacttgaagacaattactaacacgaacaaatgtaataaacgtaactagttttgtcataatacatttagattgggttattgttagttttattttgatagaaaatcaattcagggtatttagtattattttgaaaaataaaaggtcaattttaccatttactaaaacaaatagtctaaaatgaaatttacataatattataaagttagtatttttaagagagataatattaaagaaagaataggggaagatatttcctaatttttcattagagacttttagcaaaaaaaaaaaattaataataataataagttttaagttttcttgaaaaaataggtctcaattattttgtttgaattcatatatgagaaaattaaattctttagaatttttttttgcttaattagttaaatccaaggtttaaacaaaagggctactagaagaataaattaaaatctacatctttttaattcttaaaatcatagtcacacaaacaaaagtatatattactaaatcttcttgaaagttaatatatagtcacaaacaagagtgaacaacaagtcttgattcttaaatcatagtgtatttccccaaataataataataataannnnnnnnnnnnnnnnaataataataaatattattattattatnnnnnnnnnnnnnnnnnnnnnnattattattattattattaactagaaaattaaaactaaaataaaggttgaagtgagctaaaatgtgatgttgtgttgtgatttttaaaacttaaaagttaaaaagaatgtaaagtttctttaattagtaaaattcttgaacaattaaaaagacaagaggtagcccatatctatatgtatatatatggccataaccaatataatgttatctctctagttgtgatttttctggacccatatttgattctgttttggtttgaaggatcaccttatggatagattcaagattttcatttatttatttgtttattcagagattatttaaataatcattttaaaatacaacataaacatttatatatataggtatagcataggttttaaacaattactaaggatttcttttatatataaattggttaagagaaaaaaacatgaaattggtaaatatatatgtgcaatataaaatttcatttattttacttatgattttttgccatgtattatggttttgaacttttcagctaattaaaaaagtgtttaaactgggtcttgtctcttgacatgtttggtatgttagtctgctattgtctttgtgtctgtgaaatataatcttcatcccttatggcctcaagatcgatggataatccgacgttagaagaacagtttgcaaacacttcactattggaagaaccggaaggtatattgtcctatggggaggaatgtgatgatctttccgatattgatgagcgatggtgcttggtgggtcgttttcttacaaaccgtacggttgattctagcaatgcaacataaaatggcgtcactatggcaaccgggcagaggggtatatgttaaggaattagatccaaatctcttcctttttcaattttatcatgaagtggatatcgaaagagtaatagaaggaagcccgtggacttttgatcgtgtgcctcttatattcgagcgtctgaaaactggtgagaatcctagggtggtgcctctcaaccgcttggtgttctgggtacaactacatgaaatgacatcgggctttaagtcggctagagtggttcgtgacattgccaattatattggggaatttgtggaagccgatcctaataatttctccggggtgtggcgggattatcttcgggtacgagttagagttcgggtagataagcctctaaaaataagaatgaaactggaaagggttggaggtacgtcttgctacgcacagttcaagtttgaggatctctcaactttctgcttcatatg

SEQ ID NO: 16891 - DNA, 2060 bp, Cannabis sativa
atcttccaacatcctttgagttattcaaatgtttttcagattcagccgtacaattttcaattggttccatctattatgagctaagtcgaaaaaataaatacctgacatttatgaatgagtgtcctgatgtcagtctgccactttccccttggcccgaaagcaatgtatttgttaactaatttatgattttggtaatactaaaattctgtatcttccacaatgtaggtacaaaaagcttctatctagtgttgacttgaccaaagattttttctatagctacacatatcccataatgcaaagtttacaaaagaatgtgttgtcatctggcgaggatggaatgccttatgataatatgtttgtatggaattcttatctgacacaatctattcggtcaagatgcaataattccatttggacaatagcattagttcatgggcattttgagcaggtactctactctctacttttctttactttttgggtttaaagtacatttgatgccttagaaccaatgctgttatgctgttgacattttctaaattacaataatataatctgaatatgatatttgtcctcatcatcattaacagatcaggctatcagtctttggtagggacttcagtgtttctttggtggctagacgctctcggcattttgcagggacacggtgtgttcttctattgtgtaaaatattagatgttttcataggtgcaaagaaagcttttttctcataggttgttgatcttccatctttatatatatgtcatataggttctaagattaatttagtcaatatgttgatctcttaaaaaatatgttgtctttcaactacttttgagggaatcaatcgtatcatgtttgttaggaggcctcgtggccctcatggccatgggaagtgtcaccacgtcccccctggtcatggagagaaagttggccccccattggttatggtcattcaaactcaatggctcttccatttgtcagggactccaatgttattggagttttagaacaaagcacaaggtgtttatgctctaacaaaaggtggcagttcagttaaaatttgtgagagaacaagattgtttggttacgagatagctataactatagatgctgctgtatgggtgtataaaaccatgagagaactgcagaagaaaatggaacagcagaggcataacttcaagaaatctttctgaaacaatcagttgtttttttggaaaccttccaaaatgccaggggagtttttcccaaagtttcagtgctgaagtgaaataagatgaagatggttgtcatcctagaggaaagacatgcaatgggatggaaggactttgtatacttgaggatagacatgcaaagggatggaatgactttgtatactgcttgaacggactagtagggaagaagaaagggaggactcatgacaacaagctgggtcaaaaagaagagatggaaggaagaagagagaacaattatcaatcatgggccaacgtggtgaagcaatagatgaagccacgagtaaataagttggaaggaggaaacaaagaaacaagacaaataagaggaagtggaagggagaaaagaattccagatagccatgggattaaaagcgatgctaagttaggaagataagacttcttgccggaaattaatgtctattcgattagtagactgaagcaaccaaatttttatgagtacctgcgagcaaaactgaattcgaaagattggagaatggctgtgattatgatgagggacaatagcaacattccttggagtgttatttttaacaactgtcaagagaactgggaaagaaactggaggttagccaaatgtttgatgatagaataataatttggcgtaacatgaagataaatcaaatgaaagttctaggaactaataatacagtggtatcattcgttcattggtcttgggaaaatcaattaaatgacctcaaggttgattgtagagggtcatggatcggtgtcaaaggactttcctttgaacttatgaaacatgaaaactctgaggaaaattggagttttgtatggggactattggatgtt

SEQ ID NO: 16892 - DNA, 8160 bp, Cannabis sativa
aattcacttataaatgaatttcgcaatatgctaaagagacattccatgtattttaattttaattattagtttaataatatattttaaaatatttattacttaaagtttactataattttggccccccttaacatatactcctggctccgcccttaacatatactcctggctccgcccctgcctgacaatactcacttggtgagactcaaagtttttctatttgtgtatcaattttctgagatgatgatgattgtatcagtgatctaatattgcttaatcttgatgttaccatgagcctctagttatactagagaagaatattataatcccattattaaacattggtgataatgaatgatttaatcggactatggtcctcctaatttttttttccacattgagtttccacgaaaaaattttggtgtctcacttttatgtctgttttgtgtattttctattgcttgtggtactttgcttgatattttatattgtttattgtgatgtttgataagtatcacatttttaacatacaaagaggaaaagtattgtgattaattgcaatagattttcccaacaagtggtatcagagtcgtatctcaaaattaatcatgtgaatgaatcatcagaatgccaaataaaagagacgagcctcgataatttcacgataggatttgtggatgtgctctggtagacaagacggtgtgctttggaatagatggcttgagaaaagagcaagaactctcgaggtagagtggatgtatagagaatcgtttgaggggagacaagatggtcttttgtttgaggagaaattttttgggtgtgcagctaagtcccacgttgtctaaaaataaaaaatatcatgggtatataaaaatgtacaatatttccattaaatgagatcttttggaaatgtgcctaaaaacaaatttagtgaaaatacaaattgctaagagagataacattagatttggaaaaattgataaattagtagttgatacttaatttaacccaaatttccaattactatttcatatgtttccaagtttaatcatttatttcacatcaattttgttaaaaattaaaaaattgatcaaattagggaatttttttcatagttttttgatataatcttataataccgcgttgagtagtgttttttttgaataaaattttatgaaaggtgtataagtaaaattgttttgaatgtaaagcggtcacaattggaaataaagtgaaaaagtaggataaaagagcaaaagttcggaatatcactaacaaaactcgggtttgatacttatgtgaagtgtgtgtgtaacttggtgcaaatttcgttttgttgttcgaaaaagccccttcgccaaagacagaaactcatagagaagaaaagaaaacagagagagagagagagagaaaacccatctgttctccctcgcgaggcgtgaccttcaaacttctcaacccttgcggaccagatgagagagctgtaacgctctgaaacggcacaatcttttacctctacgaagaaaatggctctgaagctcgagcagcaactcaaggagttgggatccaaactcgagacccttccgcctaccaaagacgctcttgtcaagctcttaaaggttcgcatttttttcattaatttgaaaatttgcttcgttttcacggttttcagcgagtaaatttgaaaaatttgttcttcttcgttgagaattcatgccctcatgcggtagttatttcagttatattttttcttcctgctgttcctttgaaaacttattggaaacgaattaaggaaggtgtttgcaagttacgtttctttgctacgagtttttctaaatttatttgctttttttaaatactagtgaaatactgtaattttcagctccattgtgtaacagaagtagttgaattagggtttagtaaggaatttttttgtttttatagcgttaaactttgaaatttctgaagatataagtttttaattcaatttaattctgtgaggttggggcgggagtgtttcgcgagtttagggatttgaattttgtgaaattggatgtttggtcaaaatttattcgaactaggattgtatatttggtacttttcacattgccaattttgcatgtttaatttttctctagaaaaagaaaaacatttttgaaacacgtctatacgtgaataccaaaattttatgattttagattagaaattttaagttctgatgttaaaattgtggtttcgcattgcattagttaaaattttcaggataatactttcatttcacttctagtgtttcacataaatgtagagtttaacacagaaaattgtgttagtgattttctttgaatttcttataaatgttagaaagaccgtaaaaatgaattggtttcatgatatatacagcaatgatgtttaaacttgtgagacattcgtgtttcctctgtaaagctaggatcttggattgatttttggctactcctaaagttttgccttttattttattttggactgcagcaagctgcaacatgcctgtctgagttggatcaatcaccatctgcatccatcttagagtcgatgcagcctttcatcaatgaagttgttaaacctgagctgcttaagcatcaagatagggatgtgaaacttttagttgctacaagcatatgtgagataacacgaattacagcacctgaagctccttacagcgatgatgttctaaaggtgcttttttcattggctatcaatcatgcatttagtgactaattatcatacatatggttttcaaatattgcctattgtaagctggatccttttgcaggatatctttcaattgattgttggtacttttggtggattacgtgacacaagtggtccatcatttggtagaagggttgtcattttggagactcttgcaaaatatagatcatgcgttgtaatgttggatcttgaatgcgatgatctggtgaatgaaatgttcagtacatttttggctgttgccaggtttgtttcattgcaatattgatttgtctcagttatttgttccgatagctatttgaaacttattcctgcaaaaacttctggttcacatccttcttagtaattgtttatgtatgacatattatacaggcccattgtttggtcatttgatattttttcccctccccttttgtgaagcaagcttaataagttgtttatatatttgtaagttgaaatgttgcaagaatactactttagaatgactgaagtagaccatgtaaaagaggtctaatagataagatctgttgaaatggatgcttctatgtttcctttgaattgggatatctgttgctggctttatcaaatggattaattgtaacacaattttgacctttctctcaatcttaataattgctttaattataagttatttcatcttcttgtgtatgcagtgatgatcatccagacagtgttatttcatcaatggagacaattatggttgttctattagaggagagtgaggatgttcgagatgatcttttgtttattatattatctgtgttgggccgtggtaaaaatgtgagcatgtcttctctactctagcataaataatttatgtatgattgacatactactggtactgatatgtcgtgtagccatttactgaggttttccagccttttttctcttcttcaattaacttagtaaactttcaattccaggatgttagtatggctgcaaggaagcttgctatgaatgttatagaaaaatgtgcagtaaaacttgaagctggaatcaagcagttccttatatcatcaatgtcgggagatagtaaatcagtgaagtgtcagattgatcaccatgaagttatttatgacgtataccgttgtgcaccacagatcttaactggagttgccccatacttaactggagaactactggtaatccagtggtttgcatttctttcttctttttcgtacagatggaattttatgatttgtttgtggtcgcagaatctcttgtgttgattatagtttctattttccatatgttagaagaatgtgtgcaattaaagtttctcttattctgaattagagtttgtcagtagaaagcaaatcaccttgttttatctccgggctaacattgctcttgggatgacttatatgctgtcataaatcttcagcaagcatgttcatatctttgtatcagccattggagaattttgaaattttggccaatagtttctcagtgaaatttttcaaaatttgcagactgaccagctagatactcgcctaaaggcggttggcttagttggagacctgtttgcactacttggctctgttatctctgaagcttttcagccaatcttttcagaatttttgaagaggttgacagacagaaatgttacagtgagaatgtctgtcgttgaacatgtgaagagttgtctactgtcaaatacttccaggactgaagcacctgaaataatttgtaagtgcattgaattgctgcaatgtaaaattcacctgtgtacacccatcctgatgtattattgggtttttatttcctagctgccctctgtgaccgactcttagactttgatgaaaatgtaaggaagcaagttgttgccgttatttgtgacgtagcctgctatgctttaagttccactctacttgaaacagtgaaacttgttgctgaacgtcttcgagacaaatctgtaaatatgctttccccttttcatctatacttgttatcatctgaatttcaaaatctccatctgacagattcatattacttttttccctccttactctacagttgcttgttaaaaagtataccttggagaggctggccgagatttacagggtctgttgcatgattagtactgaatctgcagatgcttcaattaagtctgatgagtttgattggatacctggaaagattttaagatgtttctatgacaaagatttcaggtaaagcctaaggtttcagagttcacaggatcaacattactcaactctcttcttttttgaattattgtgttgtggtacataaatatcaacattgataggtagatgtttatccattttattttttaaaatacaactgtgaaattaatttgctcaggaacttttagtgatctttggttataatgaatcttcagaagtaatcatggaagtatttaccattgtctctgcattttctaatttttaaattattagaattcatatttttaattaattgaaactgcagatctgatacaattgagtctgttatttgtgattcgctgttcccaactgagttttcgataaaagataaagttcggcattgggcaagagtcttttcaggatttgataaagttgaggtgaaggctcttgagaagataatggagcagaagcaaaggtattgtaaattctagtttcacctggctgcgacttggataaaccgcacagacttcttgtttgactcttgatgaaatgcaaactaatttccagggggttcatttttggattgcaggttacagcaagagatgcagaggtatctgtctctcaggcagatgtatcaggttagcaaaatgttaaagttgaaaaatagggattaattgtggaaatgaaatgaacaatggaattttaacaatgatcaaatgcaggatggtgatggtcctgagatccaaaaaaaagttctgttttgcttccgtgtaatgtcacgttcgtttgctgatcctgccaaggctgaagagaattttcagattcttgatcagttgaaagatgctaaaatctggaagattcttactagtcttgttgatccgaatactagctttcatcaagcttgtacttatcgggtgagaatgatctattgatgatgcaactttttaagagtacattacactcagccattcaattagctagtagtaaggtcttcaatgtgaggtccttgaccatttagaatgatattgatgaatgcttttagatttcagaattgcatacttattaaaagaaaaaatcttttaccaaaatctgactgactaccaagtgatttcttttcactgctgtatcattcttgtcttgttggtcggtcctttttattcacatgttgccatgcaaaagtgtctaccactgtcatgaacaccttttcccagaaatctctcaacaaccctcagctttttatatctgtttccgacctctgaaaactggaatgtgaactcttgtatagaattttatcaattgagagactggagtaggtaccaagtcctacaatcaccaccaacagagtgattgtttgattattttttttttttcaaaaaaagatagttaagattggaatttggtttgtaatttcaagtagtttcacattttcaaaaattgaaggggtgccaagtccatttctatctcttgaatccgctttctacttttcattggaagatattgaaagacccatatgctgtagctattaatgacttttgttgttttcatatttaatttcaggaagaattacttaggattcttggcgagcagcatcggttatatgatttccttagcactctttctgtgaagatttcttatctacttttcaacaaggaacatgtgaaggaacttcttctggaggttgctgctcaaaaattggcagggaattcattatatacatcatcgtgtatgaatatactggtggtaagagtatatccttcatgtgtttcaagttatttttttctccctttagaaatgttcacaatatttgcttgtagtatttcataatatcgttcatgcatatcatatgttagttgtgtactcgtctttttcctcaatatgttttctctgtgtgaaatgtttcctctgtccactgatcagcaactaatgtgccatcttttttcttttttctaattgttatcctatgttgggttgtttatgtttgttgtgtgttaaaatatattaaaacagttcaacttggaattttattttctttattttcattaattttatttataccagtagaactttttggtgaaattatctgtaaaatttaagtcttacatatggttctcaagtgttcaaaatattctatgactatttttcagattcttgcacgcttcagcccaatgctactgagtggggcagaagaagaattaataagctttcttaaagatggtgatgaaattataacagaaggtgttttgcatatcttggcaaaggctggtggtattatccgcgaacaactagccgtatcgacaaggtgcaattcgaaaggatgtcttgcatgctcatggattaatatatattaacttagtatagtgcttatatgttactatttacttgcagttccatagatcttttgttagagaggctatgtttagaagggagtcgaaggcaggcaaaatatgctgtacatgcccttgcagcgattacaaaggatgatggacttaagtcactttctgttctttacaaggtgtattttattttaaatattatactttttatatattttttgcgtctataattatatcatcacttttacttggttttaacttcctttgtccacgattagtattaacatttgtaagacatggtgtttttcaatgttcagaggcttgtgggcatgctggaggagaagactcatttgccttctgtgctgcaatccctgggttgcatagctcagactgcgatgcctgtttttgagaccagagagagtgaaattgaagaatttataataaataagattttaaaatgcaataacgtatgactgcttagttttattggacttactatatctccatgtatgatgttcttataaatagatctcattcattctcttgctgcactcttgcagaagacagaaggtggaacatcttgggatgaaagaagcgagctatgtttgttaaaggttgaaagtttggctgttttaaatggttgaacataaaaaagtcaacatagacatggctttgcactgtaaccctctattgtgaggttatcttttcatgaagtttattatcgtattacacctttatattttttctcctcattttggctacagatatatggtattaaaacactggtcaaaagctacttgcctgttaaagatgcaaatgttcggcctggcattgatggtctcctcgaaattttgaggaatatacttttatttggagaaatgtcaaaagatataggatcaaggtacttatatgactaaatcccctcttttttt

SEQ ID NO: 16893 - DNA, 4108 bp, Cannabis sativa
atatcataaaaattgtcatattttacaaatattagttattatttgtttagaaaaacaattttaaccaaatgtaagcataaaaaatcaaatttcccaagcggtattgataccactcttcgaagcatagctgtgtctgcctgtgtggcctgtggtggcactgttctttcttacccgcattttaatctttttgcaaacaccactctctcagggttcttttacgggtactgctatgcttttctctatctctcgaacccaacgttgtgtatttcgtttatatcttttacgaatgaaagttgggatttttacgtatattgattacaaattcattttcacacctttgtctgattttaggtgctggacctcgaatgggtcctttaccgctaaccattgaggccaaaagctctacactggtttctgcaggtaactcatttcttattttttttgtttttcttttatgggttgaagttgaataatatgcatgacatggtgtattgtataattgttagtagtaattcttatggaatacaataatgcctaatcaactatggtattctgagttcagctttatttattttttattttttgcatattaaaaagaatgaatgcaaatgtagtagtatcgtaacgtgcttatattttcttaaataaaagtttagtaagctcaaaccggcatcccaaatgcccaactttaacttctcagaagttgaggtaatgttggctcattctatatttgatatgcccagctggtactttctacttattttttttcttttcttttttgctggtattcttatgttccttgggtaaatctactgcattcttatgttttgaactgaccttaaacctttctgggcatctgaagaaaccaaatatttctgttatattgctcccatctgtgttgaatgatactttatattgggaattggaatggttcctgatctattaacaacaatgatattatgaatcgctttaaggaactccttagcccttagattgagctctgaagtaaggatttttcctttcgagggatgcgcctattcgacatgttcatattaagttaagggatgtggttattcgacatgttaagattaagttatggtagttgttgatttcagcttactgatctctcacactcttagatttttttttttctctcttctcttgtgtggcttttaacataacgaaggaataagaaagccataaggaacgtaaggtgaaaaatttaatatagctttgatggctatagaataatctcaaggggactgaaaacagaaaattttatgcagatttaagaaggaaacaagtggtccttcttccttatcttttttgtcactggttttttcatgaccaaagttcagcttctaaaaatagcctacaaacataacatggcacagcagaatttccccaatgccttgcaagttctcaaatgcagtcccaaatgctaactattgatttgtattcctttctttttagtactttatgtattgtagacatttgctctatctttgaccaaatgatgtgattttgcagatccatgccacaagagcgggcaaaacttgtcacttaaaagaaagaagatttttggagctgctagcatggaagcacaaaagccgtttgactttttccgtactttatttggtaggctacaattactttaattgaagatcccatagagaatataattttggtgttcaaattccttatatattactctcacatattaaatcgtggttaatgaacctcaatttgtgctcttactcttcaagttgttgatcatgctgaaaaaattaatttgaactctaaatgatgacatatccatgctactattccaaactctatctctctttcatgtgaaaatgtctgttttgtcattacgattgtttatcatgtagactttggatatgtattcctgaatcaatggaaagttagctaccgacaggaatgcacaattaggttttgcatagctagaaattgcagatttccatattactactccaatttagcttgtgatgagtggcttttctaagttcctcggcgacggtttaggaaagagtgctaattttggctggatttaatgagtccctggcctctttttttcaaaaagctgatgtcaatttgaaggaaattatgagctcattgaagatagatatatacttctgcgctggaaaggaatattttttcgactaactgagatcaaggaatgtattttttttttttcatttttttatatctctaaataatggagaatcacaacaagcgtctacgatattgtttagttatggccttttagataggggaatgacatttaagtctatacctatagagagtacaggagagtggatatccctttgttataccatcgatatctctgagcatgtctccttaacatactgatatgcttgttttggctaatctggtggattttgcagaggggaccatagcaggagggacagctggtgttgttgttgaaactgctttataccctattgataccataaagacacggctgcaggcaggttaaatatgaatttcaacatttgaaatgaaacataatgtcccatgaggggctatttggttcagtcaaacttgtaatgtcaatttattgatgcagaattccacgttgtttactcagactacttttaaccttttttttttttcttttactttttcttcttctttttctttttgttttctttcaattttttataatttgtgtttgcaattttttgatgatgactctaattgtcatcaattttattacaggctgttcgtggtggaggtaaaatagtttggaagggtctttattctggattggctggtaatcttgctggtgtcttaccgtaagtactttgaactgaattcacgcatgtggacatacttgtttaagaatttgatatgtgttttgtctgttatgtctcatttgtttgataataattactttactcttttggcttttcttttctattttgcaaatatatttgttgcacttataagaagatataatttccgtatatacagggcttctgcaatctttgtaggtgtttatgaacctacgaagcagaaactattgcggatggttcctgaaaatctttctgctgtagctcacctggtaagagagttatgctaatactttggtcattggtgagtttaataaaatgttgtatacctcactataatgatttatattgacccatagagtattggagtacgttcctccagaaaaaattaactgaagtacatattcacaaatgtatatgtagtagcatatctagctctctagataatattatgtataatatatgctcttgggcctagtttgatatgtgggataggataaatttagattgcattatgaaaaataacgagaaatagctttagattagtgaattgatcatttgcaatcaataaggatgagaaaagaaaatggatacaaagttacaactttttttttttacagatagtgatgatgtatatgaagaggaagattgtgtaggattaaactatcttgagttcctcaatgagattaaagtactctacgctaggtggattaatgttctaatatgtaatttaattcaataacaaaaacatgagagaataattgtccaattctatcctatcatattctactctccgaaaagtgaccgggtataagctatcttcagtaaaggcttacttttttttttggcatgattgttgggttactgtttttgagtgatatcttatttggtgggcaatctaatgcagactgcaggtgctatagggggactagctgcttccctcattcgtgttccaacagaggtatcttgtttggtttttcatgtttaagaaaatacaaatttttttacctgaccaattctactttcgttataacctaggttgttaagcaaaggatgcaaactgggcaatttgcttcagcccctaatgctgttcgccttattgtttctaaggagggttttaaaggactctacgcagtaagtggttccccagctttagtgacattctttctttgttaaaaaggaaaatcattgtaatctctcttgttggaaaagctgatctttctaatttgtttttatatttataggttgagctacttttcttattattgttg

SEQ ID NO: 16894 - DNA, 2369 bp, Cannabis sativa
taaatccagtgtgaattcgagtccctgagttttcactaaatcctaatactatttggggtcaaattcttcattcacataaaacatcagtaagttcgctaataatgctcgaaaacaaggccaaaccgagcagcatatgacattccctaaatacctctaaagctagaaaaataacttgtatgaatctgtaatatttactgagaatcatgcacctcaattcttccttgcacaaacctttcaaatgttattaataaaaatttagcatctagtattaatatcaaatcaagttatcaagttgaagccatctcaacaatatactgcaattcctatactcactgctatactccaacacctcctcaaataactacaattccatatctttcaggcaaaaaatacaacatttatttccatgttagcatctaaagttcaatcaaattgaaagcaaggtttgtaagtagttggtagttaagtcacttcttctaagtttcaacactttaattagcttttgtgcctataggggaaatttactaaattaacaatgttaaatagtaaaatttgcaaaaataatcactctcaatttactctatgcgaccatcatggtcccccagtgtaatagtgaccatacatgtttatttgctaataattttttttataaagactacaacaacagaaagagaaacacaaactaaaactattgacactcataactctcactatactgcctaagttttaagatcaagaccaaacaaggcacaaaacacatataattaaccagaaaataccttttaaagaactgtataaaaccaaacaattcaatggtataagaatcaaatgcagcccaaaaaagaacataccgctcaattaaaccaaagacctaatacatcacattctatttctatctacccaaaaactcataacatatatataacaacagaaagagaaacacaaactaaaactcttgatactcattactctcactacactgcctaagttacaagaacaaagaccaaacaaggcacccatgattagccagaaactatccaataaagaaccttagaaaaccaaacaacccaatggtataataaacaaatacagcccaaaaaagaacataacactcagttaaaccaaagaggtcttctattgccatctaccccaaagatagcttatacagatatagtaatgctacatcaggaaacacataatatataattagattccccaaatccaaaaatgcattattcaaattaccaagccagcataatctgataacataaatgtaaaaagtaaaccaaaaaaaaaatcaaatctttactttcatttctcaattctcagccagttttggaatcagtcttagctttctcagccttggcaccacctttagcctccacactcttgggttcaccaccagaacaacacccaccaccatgaccaccatggtgatgatgaccatgaccgtgaccatggctatgactatgaacatgttgatgggttttcttccccttaagttctttcctcatatcataagcatcttctccatcagcataatacttagcctcaatatcatgaatcttataccctaaagtctcagtatacaaattaaaagcagctctattactcttcctaacatgaagagaaacatactcagctccaaatacctgttccatggcgttttgagctgcactcatgagctttgtcgcgagccctaatttgcgatgggttcggagtacggcgagcgaggttatgtggccgtggcactcgttgctctcttcttccatcttggcgagaacgtatccaacgattcttccattgtagtcttcggctacgtagaggagttgcggccatgagaggatgtggtagaggtagtacttcatctggtaattctctggaaggcagaataagttgcaggcttgcatagctagaagatcgtctattgtggctttgcgtatgcacaccatggttggattttggattggggattttagggtttctctggtttttagggttttgagggaatttgattgatttggttctctagggaagtagagaagaagaagaagaaagcaattgagtgagacgaaatagagacgagactctatggtgggccttgaataaggaaatttgggcttttttatgggccctgagctctatttattgggctttctgttggacttaatagaaaaattacaaaaatactgaaatttaggttaacttttataacaatattattaaaaaaaagtctattatgtttttacagaatcctgaataatttttttttttactgaattttttttcttacagactattctaaaaaagaccattgtttacttataatttatatttaccattcatgggaatatggtaaaatagcattg

SEQ ID NO: 16895 - DNA, 2979 bp, Cannabis sativa
  modified_base (612)..(630): a, c, t, g, unknown or other
agtggcgtactcgtgtataagagccattattcagtgggtgtaagggcccaataaaagtttgaagcggggacgttacagtatgtgatgaccaaattgataaagttcagtcttttaattaattaataatatgttaatgtataataattttgaatcgatgtattaacacagtattcaatgattttatttatatgtaatgtatacatacatttatatatttatatattatgtgtacacaaaaaattgtatataataatatatattatataattgtacatatttatttcatactcattttattaatttattttacatataaatgtataaattacgtaataatataatatataatttcatggttaataattgatgctatatatatgtaaaattttacaaatattgtgataattaagttactaatataataatatgcaacaagatcaacattcaatcccttaaaaaaaaaaaaaattataagaaagatatacagttatacaacttagaaaaatatatcattaattctttaagcgaaatatattatagttatggcagaatcaagaatttgattaagcaagccaagtaaagggaattcattaattattattattattattnnnnnnnnnnnnnnnnnnnttattattattattatttactcttttttttttaaaaaaggctgccgacttaaaaaatttatgttgtcataaaacaataatttatttatattttcaaattgttttgggaccataaacccccaaacaaaaacatgatgaaatgccacatgtgacactttagactctctgaaaatgatatattttatatatgcatgcacattcattaattatatttatgaatttctcctaggagacaagagggtgtgatttgggcagctttgagggatttgaaatgacataatattgaaaatttatatatatataataaagccaaatagacaaaatatattagcagaacgtacagattaacttttgttggtatatatatttatgcaaaacaaagttgaaaattttgaaccaatgtccaattttggagaaaaaaaacttcacatggggttggcttaaaacagtcaattatatatgtcccaaaaaaaaaagtttaaaacttggagtcattcttcaacacctatacatataataaatgcttgccttcaaacttgactatgatcaaattatatggttttttggatctctttggtatattatttggttatgtagtcaactattttgttgcttttttttgttggtgtgtaaataaagttggaattggattgatgtctatttttggagaagggcaatagataatattggttatataagtacttgtgagtttgtgatgagtttggtaaagactattggtatatatatatatatatatatatatatagtagtctcatttggtaaaaggtgagagttcatgaaaaaatattgagggatacttaaaagtgcccaataccctatgagataacccaatacaaaatttgttatattttaaatttttatatgtaaaatgttaattttgatgtaaaaaaaatggttttctgaaaattgaaagctccatagatagacatttggtaggaaagagtttagtgctgtaaatacggactgaattttttgacacgacataaaatcagtacgagtacaattagattcgaaaaaaatatgagtttcaagcacgatacgacataacataatatattggcacaatactacataaaatatgtgattaaacacaatacggcacgagaagcatgaatgacatgacacgtaagcatgaatagactagcctgaaaaacacgacatgcgacaagctcaaaaagcacggcacaaaacattaaaaaatcccataatttaataattataataataatatatatttgtcaattataaataggagaagtatctcacataacattttttaatctttttttttttcatttttacaatctgagtacgtgggttgcaatttaagttgctttgtatattttcgtataaatacaacaaaaaaatactttaaaatgtataaataaaaaaatctcttataaataagttaaaataataataaaacttaaatataatattaaaatattataattttatatttaagactattaaaatatggaaatctaaaactacatattaatttatttattgaatgtgatataaaaaatttaatatttataaataaatatttaaattctaatagttttattattttttatatgattttttgtaaaatattattgaaaaattaaatgaatataattaaaactataaaatatacatataatttagtaagtaattcattaattgtaaaaaaaaaatatagaaaagtaaacacgaattcgagtctgatatgaaaatgggttggccttttaagaaaaatagcccgataagagcaaaacacgacacgaatctgatcacgacacgaaaatattgagcttaccctttgaaaatgttggcacaacacggtccatattttcttaagacatgatcgcacgacacaactcatattttgaaaagtacaaataaaaaaaatggattgaaccatcacgacacccatgaatttatagcacaaggaaggataagtaaagagatagagaagagtggataggaggggagggagggagatgatcgatctgtttgtttagtatgcacttgcaggagggattgatggtaagaaaggaaatagatgaggatagtaattaaatcctcaaaaatctctccattgaagcatggaaggattcgcactctccttcatcatttttaaaattaccattatacccctttaaaatatgattaaaaaacaattgcaaggacaaaagtataaatttacaaataaataaggagagttctatttgcacctcctaaaatgataaatactgctcattattaaaaaaatataaattcaaataatttttaaaaattactcttaatatttattatcaaaaaaatataaattcaaataatt

SEQ ID NO: 16896 - DNA, 5279 bp, Cannabis sativa
  modified_base (33)..(66): a, c, t, g, unknown or other
tttttcatagaaataacaagaaaactacataannnnnnnnnnnnnnnnnnnnnnnnnnnnnnnnnnaaaataacatacaaataacaataaattaacaagaatacagcataaaaagaccatattttttttgtaaataaaatcaaaaaaatcgtaaaaatatttaaaataccgtaaatatgtatttttgtaatttttttttattattatttttgtgtatttgtaaaataatttcattaaaaaacgggtcatggtttgggtatgggtggttgaaaagcccacccaatgaaacatggtgtagtacagtaacagtaatagagtagtattgtccagtggtattagaagtggtgagctgggtttgtctttgtcgcattatgccttgttttggttttaattgaggcacgtgttgtccttttctctgagctgatttcaggctttggcaaagtacatttggccatcatgcatgtgctcagaaaaataggaatacaactaatcaaatcaattgtttcaagtatttgggcctgacattttctgttcctcattaaaatcaattgtaataatgaaaaactgtttggtaagaacccagatatgaaacatgagttttatagatcaactaaattgacaactttggaaactagtagtacaatcaaattaattagacacaaaaacaaactataaagtagttgtagctacatacaaacacttctaacctctccaaaaaaaaaacaattctggccttggtcactcttgaattaacttaactcatttgattttaaggacaaaagcagcagcttatacatattacttttttccctttcttttttttgatattttgttttggttttttcttcattttttacagatgcattcaagaaagctatcaacaacaatcacatacatttttgcaatttgatttcaaagctaggtgactcaaccatttgggagggagaagtggtatacaagaaaagagtaaaatgtggtttggtttggtttgatcacctagggccagacagctccattgcttctaccacaagtgaagattcttctataaaatctgaatatctttgtggtgggtgttcacatgatcggattctaggcgtctcaaccttctgagaggcctcccatttctcggccaaaccatcgccttccaacattttcaaaacctcggacatcttcggccggtatgaaggattgaactgagtgcataacagtgcaacttgaaccatttcctccaattcaatcctatcgaaatttcctttaagatccttgtccaccattaagtttaattttccttcttgatgcagtttctttacctgcaaaagtgcatggatgacaatgtaagttaatgctataaatacattttgcatacagttcctatgtaagtttgtagcatttaatgatatgcaattatggcattttcaccattggatcttttctgaccattaaccttaacttcacatttattaaagacaagaaaagacattaaattttgtattcttgaaagggagaaaaagtgtacccaatcaagcataacgcctttctgtttcgcttgtcgtccaaaatccaaggccttttgaccagtgattagctccagaagtaaaatcccaaagccgaaaacatcagtcttttctgatgactggcccgttgagagatactcaggagcaatatgcccaacagtgccacgcacagctgtggtcacatgagaatctctatgatccaaaagttttgccaacccgaaatctccaacaactgcttcgtagtcttcatcgagcaaaatgttggctgctttgacatcgcggtggataattttgggatcacattgttcatgcaaataaactaacccccttgccgtacctaaagctattcttttccgtctcgcccagtctaaagccggccggccatgaatgtgatctgatgagaaaacataaaacaaactattaatgctaaaagcttaacaaaaacaaggagtgtaggacatgagataagaggttaacaaaacaaacctcttaatctagaggcaacacttccattagacatataaggataaacgaggaggcgttcattttcagttgagcagaatccacaaagcctgagaagatttcgatgtacagccaaacttatcatctcaacttctgtctgaaattggatttcaccaccagcagtgttatagtcttttagccttttaactgctacaacagtcccatcattcaagattcccttgtacacgattccaaaaccacctcttcctagaatgttcttcgagttgaaatggtcagttgctcctcgcagctccttaaatgtataccttcttaaatggcccaaacatacttctggatcatattgttctgcacaaacaaaaaacagaacaactcagagaatgaatacttttagagaaaatgaaaaaagaatgcatagaacaagaacaagaacaagaacaagaatactaaccattaacatcgaagaaaatctgctggttgtgcctatatcgccaccatacaatcaaaactaacaatagcaagatgataaatgtagcaccaaaacttgcaccagctattatagccactcgatgacgcttccccacagagcccgattgagctaatgaaacacaatcaaaaagccaatttatgtcatcaaaagtacaaagggcatgtgagtggaaaaatatacactgtaactacaagatatgcaccttctagagcatcaggcgggaatgataatggttccggaaagctggcagaacagttccccgcagtctttggaccacaaagtaaaggattacctataatcctacaattcaaaacaatacacattacttgaatgtttttgcagttgcaagttaaagacattaaattaagagaatagcttacttgaaggttcttgcagatatctttggcaatgaaccactcaaattgttgaaagaaaggtccctaaacacatacataaaatggcagtcatgaatacgaatgttatgatgaaaacaagtaagaatttatccatatcagaaaaaaatacaacagatcaaaaggtatagatacatacacaagagtaagaccttcaacagtagatagagactcagggcaaggtcctgtaaggctattgttattcaaccgcctgactcggtagaaagggaagcaaagaagtgaaagaattagaacccctgatgtaaaaagcttcaaccatatactgatcaaaaaaagcatatatgttagctgtataaggttttggatcttacaaataattcaagttccttaagttccccaaagaatcaggtattccaccagtgagagtattgttggacaggtcaagtgtctgaagcttctctagtttaccaactgtagcaggaattgaacccgaaatcgcattgttttgaagcaaactacacacattgaagaagaaggtaactaagttatgatgaggctcaatccaaaccaaatgattaagtaatttacaaaacaatggtgaagaaaacttacacagattgcaaattggtgagatttccgatccaaggtgatagagtaccggacaagctctgactaggcagtcccctaattagaaaataaccctctactgagaaatgagttttaaactgaaaagacattaattacaaaaagatcttgtgtttatttctgactggtcaaattctgttttagcaactatgaaactgagcaaaatacttacaaagcagacacataaccatctggggagcaagtaaccatcctccagctacaaggatccacagaattgatatcccagctctccagaacattatgtgggtcataaagactgttctttatagcaaccaaagctacaactgttgagataattcagaaggaagataaaattaacacgcatgaaaaaaaaggacaactttggctcaatttttatgcttcaactaattgttgagcataattgaaagagaagaagaagcataagaaaatggaagggtccaaatgaaactaaccttcatagtttataccagttggagaaagagttgcagaagaggcttcaaccaatgctaaaatcagtatccccactttccacaaaacgaaactacttttcttcatttccttttctctgttaagtaactttattttcttttagcaacaaccagtacccaatgatgaaaaccaccataaccaataaccacattatccatactcacataagatcaaacttacacattgccttatcaaagccaataaaaattgcctccaaataaaaaatcccagaaaaagcaaaacccaactttggcaaaaatagcaagaactcagttttggctttactttctcttttccttcaaacaactaaagccatcaacttgttgataaatttcataaaacgagagatacccagatgccaaaaccactattccaagaagaaccgagctggaaaaacagggaattcgaatcaaaccaagtcaaatgggcaccatacgagctcagacaaagagcaaaaaggtgagaattttctcgagaaacaagcaacaaaaaaccttaagcctgaaattctgagatcctagagatctgaaaatgcagaaaacttattcaaatagtttatgggcgatccccacaaattccattatagaatggggttgctggctttttcctttttactctcttgctctgttcttcctttccttcctcctttagttaagattctacttcacattatcttctttctcaatcaaactctcacactcacacacgctcatgacacaaaatggtaaaaagaaaaactaaaaaaataaaaaagagagagaaatcccaaacacacaaaggccaaaacaaaatgccaaacttggtcacagatacagatgcagccagacccagttacgaaaaattattttgctttttacacaactataaaaaagtgaaaaaaataataataataataattttgtttgatatttaaaaaaaaaaaaaagaattgattggaccaaaggagatgcgtgggattgaacagagaccatcatcaaaaagaacaatgggatgtcttatgtctctttgttaaagcaaagcagctaagttattggcaggtcacgtgcttgccttgtcttggcctctgtttgcttttttagctctctctatctcttttcaatcttaaatttattatataaaaaataaaataataatcactttctgtgaagctttatgcagaagttggccccctcccgctaaaatgcgcctaactttaaaaaaaaaaaattattctcttttccctcttatttttttactaaagatgttcaatcattttgtgtttgtctaaaaaaaaaaaaaaaaaaa

SEQ ID NO: 16897 - DNA, 4901 bp, Cannabis sativa
gttgttcatatataaaaagaaaaaatattgtgttaaaattagtatttttgtaatatataatacggtgcggtttgaattgtgattattaaatttaaaattgtaaattgtatctaattgtaccacacagtgcagtttagcaaaaatgtaaatcgtaactgtaacacaaaatatttcaaattatattttttgtgcagtgtagtatgatacatatagtttgtacggtattagcggtttgattaacacccttaggttcatcttttggatgtgaaaattaaaaaaacggtggatatttaacaacacaaataataggtgtctaaatttgacttcaaaacaaaatattaaagaaagaaacgtagcctttaattaggccactaaataaaataaaatggataataatcagctcattatcattattaatttattatcttattattttttattttttttaaaaaagtcgtactcttcttttctttcttctccctaaataagtaagagaacggtcaaaaccacacatttacgtaaatttatccaagtgagagggtcaaataggtcatttcccaaaaagcaaagaagaaaaagaatcttactgttgttattcgtgtaaacgcatgaaaaaaaccaaccgttatcggcgatagtgcgttgaagaatcaagtcatttcaatttaccaaattgcccctcaatactcattgcatttaccaatttgtccccggatactcatttgaatttaccaaattgcccctgttcccttccaccccatcttcctctctctttctccggttgctccctcctcctacagtctctctctctctctctctctctctctcttggtagtttctctctctttctctctatatcttggtgtaataaaggtccacaaggccatgtttggcggtgagagagatctgactaatggtatgaacaacaccatggatgagagctctgtaagtaagctgacgcgtttttcttctgagagaaacaagaacaacaacccagatagaaaaatgggtattttcgacaagggaatgggttttctcagagaatcggagatgggttcttctgatgggtttcagtcaagagctttctctaaattcggtaactcaggatcacaagagctgactctaagctatctctgtgatttcaacactcatagtaatgctaataataacagttcttctaaacaggcttttctcgagaaagaattttccgggaaaaatctgttgaattcgtttgataaaggtggtggtgggagtagtagtagtcatactaattacaaaggtaaagaagtcgtcgttgtttctgaaaactcaatccaaggtgacaaatgggtcgagagagattttctcaatttgaattcgaaacgagaaatggaagtagaagaagaacaacaacatgaagaagaagaagatgataatggtgttgagagagagaatcgtgaaaaaaggccgaagcttgagactcttaatctttctctagctttacctgaggtatctctttcgctcacagcttcaaatgctttacaaaatggcggtgataatcataaccacaacccgactcgatccaggcctacccgaagctttcaatctcttactcaaaccacttactccaacgattacaccaacgcttctctttcttactctcattctcaccctttttctcacaaccccagttgctctcttactcgaaattcgactgagaattatgagtattcggttgggaaagatgatcaaatttggaactgtggggaagggactaatgggtctgttcatagtcggtttaagcctgttggtgatggagttgcttggaataatcatggcggcggcggtggtggtgggctttatgcattgatgcaaggtaataatcgaggaaaggactcttgtaataacaacagtagtttgcataagactactagttctgataataataataataatcactcgtttttcccatctgagcttcctgcgaggctaaggatggagactcaatctggggattctagaggaaaagctgcttctgagagtttgagaggttttgagggtgttgatggtggtgggagaccaaggaaggtgtctagacctgagagaattattagggaaattgtgaatgagtctgtccctttaatggctcaaacaattcaggaactttcagatgaaacactcttgtcaacgaaggaatacttgaggaatcttatctccatggttgataaaaaagatgagcttgaaaatctacagaacaggctcaagagaaggtctgatctcactaaggaaactttgtctaagtgccaaaaggatcagttggaaattttggttgctgtaaagtttggtcttgggagctttttgtctgtcaaaaaccgccttccaccggtcgagttggtagagattttcttgtctgtaagatgtaagaatgtgaattgcaagagtttattgcctgttgatgattgtgactgcaaaatatgttctgagaataaagggttttgcagctcatgtatgtgtcctgtgtgctttaaatttgactatgctagcaatacttgtagttgggttggttgtgatgtttgttctcattggtgtcatgcctcttgtggcattcaaaggaatcttatcaaaccaggtccaagcttgaaaggtccttctgggactactgagatgcaatttcattgcatttgttgtgatcatgcttctgaaatgtttggttttgttaaggatgtgtttctctgttgtgccaaggattggggtcttgaaaactttgtcaaggagcttgattgtgttaggaagattttcaggggaagtgatgatttcaaaggcaaggagttacacaataaggctgaggagatcatttctaaattgggaaataaattgatgtctccaaccgatgcctgcggttccattactcaattcttcaagtgtaagtctcaaattttctgtcttttttctgtatttcatttctttcaaattgaaatgtcacttgtttttaaagcataactcagatttagtaattagtattacataggtgatgaaatacattgttacttataagaataaagaagtggggaagtcattaagcataatttttcctttttgatggtttcatcatgtagttggggctggaggaatggaaatgataggagaaagttaatacattaaagggtattttgagtgtgcctagcacccttttatgtattaatatcgctattgtttcaatttagggtcgggtttcatataatttaatgtaataatttttagggagtataactagctaaggttacatgtctagagatgttagttatgtccaatagtaatttaactttgcttaattaacactactaaatatttaaggaccctaataaggggcactcgaccttttaatgatgatttttttctcgaaagctgtgcaaggaagcacattgtagatagaaaatcctccatttttcttttgaagaaaaagagaggttattcttggattctattttctcttaacattattagataaagcctcaagtgttggacatgccccctttgagtctctttctcttttgctcatcaagaattaaaatgcatctttgtattttgtatgtatctgaaaaaagtgaacttaaccatgtaatgtttcttgttaaaatttggatttatggaaacattctgatatggctgaatctgacactgaatgtttttctaatcacagacacagataacatgtcggaatattcgtcttctgttataaccacaaaagaattgtcttcaaagactcaaagctctgtccgaaaagagactactcctattcctcaatccacatctctagcagcaaagtatgcaccttacaacatgagttctagtttacaacgtgatgtaatatcaaacgatgtccgtctcagtgaccacaaatcttcaatcataagctctgacgatgactttagattcggctccatatctaaaccagatggtttcgacagcttagaaagcatagtgcgagtcaaagaggcagaagctaggatgttccagagtaaagcagatgaagcacgaagggacgctgaggaataccatcgaatgatcagggcaaccaccgagaagttagaaggagaacacgccgagaagctctcaaaactgtgcttgcaagagacagaagataggcgaaggaagaaactcgatgaactgaaagttttggagaactcgcattgtgattattacaacatgaagatcagaatgcaagctgaaattgctgggttgttggagagaatggaggccacaaagcagcaatgggtgtaatttatttatttattttttcctttaattatggttctaattgttgtgtactgtgtagtttgttaatgtcattttgattttggagggagttgtgtaacaagctctgctcaagtaagaaacaaccttaagttattgctctacaatggaacatttctcttactatgaagttttgttctggtaaaacggttgatgggtacacaaaagtctgatcaaaaagggctttcatttatttattttagaataagtagcatttgcaactccaatggagaaatctaaatttagtgttaaatcattatttcaatattattttttttttttaaattctaactacaacactaaaaattacactaaaaagtatatttttttattattattttatttaattaataaattagattattatataattatttgatttttcaaaacgattatttaattattaaaaagtacaaaaaagaaaaaaaaaataataaaatgcagttgtctatagtgctcactattattagtggtttacttttggtggcgtttggttggaggtaataaaatggaatggaatggaaaggaaataattttcattctattcctttgttcggttgcattttatggcacgtttactatatcgtaatcagaatcggaataaatta

SEQ ID NO: 16898 - DNA, 4357 bp, Cannabis sativa
atacattgttgctcggacaagtctggggtgcactgtacgagtgcgtaaatggttaaaaaccctggagccttcgcatttccggcggcgtacttacgaagatagcctccagaagcggcttcgcttttcaaaccatctaataaagtgctaagattatcaaaatgctctttaacgttagaagacgacacgtttttgttgttgaacaaagcgtaacttggggtaatctctggacttcccaacaaggacctattcgagtaacgtaacatgcagtgttcgtacacacataatgcctccttctggttcgggcagatgtctttgagcagttgcgtggagttgttgaggcaactccggcagaaatcgggtgtgatgtctccgcggcagagtccaactgcgtaaacttggtctgagcctttgccgtaggagagattgtaaaagccgtaaccgttgtcgttttgggatgtgggaagtgtggtgaggaggcgattgaggtttgcttggtaggtactattgagggtgtagttacctttgctgttttgacaagaacggtatacgaatcttgacggttgggctgtggcttgttgagcaactagaaggaatatattacacacaagaacagagatcagtaaagacattatcgccatgtgtagcgtttttattggtctggtcgatatgtcttgctatagtaaatgaagcctgtactaaaagtttccaacttgagattcatatagtttattttattagcttaattatattaataattatctgtaaattacggactctcttttcctggtacttgcatttctcattattttagtgatctattttcaattgataaaattaaaattaaatcacaacatatatatttcataatatgtcaaacttgaaaattgataaaattagtataataaaatattgttcttactattatatatttgaacacggtgccgggttgacttagttttgagtaacaatgaatcaatgatatatattttgactgattggaatggaacggggatattactttgaaagttgcttaatatgtagctttttttatatatatataatttatttttgaagatatattatgatagtacgagagattgtgacgggagtatatttataaaattataatgacaaacttttttttaaaggatcaattgaagaactttgaataataattgaaatgaaatgaaataaacaaagacataacaatatcttatcttattgtgaaattaaattaaataactttttcctttaaataagttaacttaaacaattttaagtttatataattataaaatttaaactcattaaaaattcaaaacatatatgctataattattttaagaggatttttaattatttgcatttaattaaaaatttataaaatgcactccatttcaataatttttattttgtataaaatatatatctttaattaatactactttttttttcttccttctcatattttaaaataatgctcatataaaataaaaacaaaatatattttaaagattaagaatttttttttacatttttacatttttgtcataaaagaatatgaaaataaaattaataagtattatcattaattgaagaaaatgtgaaaatataattcaaaaaatattaaaagtaattttttaaaaataatttaaatttatttttttaatatggaatgtatttataattttgtgtcgtggaattaataaaactttttttttgttaattaggtttatctcctttattttctattatattttctgttctaaattttcacagtgttctttggacaccttcccacaaagatcttatttccaataaaaatagtgtcgattcttaaatagtactaacaaaaaaatggtcaaaaaatagagttatctattttttttttgttaaactaatacaattatagtgtttatgattggagttactcttaaaggggaatattaaacaataaaaacttaatttgaagaggattattattaaaaaactgacaaaaaaaaaaaaaattggattgatgacctactttgagtaataaataattaattgttagtgtaataatattcaggtgattacttaactttacataaaattataggagctcccgatatttttattttatctttttaaaatataacattattttttttattttatctcaaattttatataacactgtatattaacgtctctaaagtataattaatccagttattatttttagtaactttactataattaagtaaattattagtatataagaatcaaggaagccttgagttggataaaagtaaaaattggatagatgtagttgtggaaactgattatcttaatgatgtatgaacgatatcaattctaataaggctatggtttctttatatatggtattgttattcaaaattgtaaggcacacttattagaaccttctttaattttaatttcttttgtaagcaatccgtgaataaagttgcttatgtgttatgttcatataattgattgtacttttagagttggacttctttgccagctgaaattttatccttaatttagaataatgacataaattaatgaaatttcttctttatagcattaacaataccactataattctattttttttttcaaatttaatatattttatttatttaaaatatataatattaatattttaactatatatccacatataaaaaaataagtgttaaaatctaaaatatatctagaataatgaaaatatctactctaagaggggtgtgtcgacttagtgccacccgtgacatacgttctcaaatttctccggaagaagacgaagtcatggaagaaaaagaaaaagagaagcaatgcacgagttatggaccaccacgttaaatttagtgaaacctatatttataattttacaagtattcttattaaatagtattcaagatagattgtttaacaatattttttaaatgttattttattaaattatataaaatccaatattaaaattatcttaatagctgtaacatttgtcgttattaatagaccctactctatctatcggcatacggaaatactttgaaaagtcatgattcgatcaaaattattgatattaatgatatatgatatccttggtaagaaaacaaaaaatatataaatatatataatatcaatttaacttaaaataaagaacattattattgggtattggttgtaactaatacttctagacatattgcattttaagttgtgataatctttaaaagttattacattaaattatataagatttaatatttagtttgacttgtaaccagagttagcttaaacattttggagccttgtgtaaaattttaaaattgggcttttttttaaaaaaaaaaaaaatcgtgtgcattaaaactacaattctattaatagttatttttttataaaatttgttcataaattttcaattataaattttttataaaataggccttttcttaaaaaaaaaaaaattgggccttaaaaaaataggagccttgtacaatggtccaagctgcccaatgcttgagccggccctacctataacgatattgacatataagaaggtgctaaatattactaatactatttaacatttctctaaaataaattatcatagcttaaaataaaaatttacgctcaagatattaatagatataccaaaatttttattattattattttatcaaaattcttttttaaatgaaaattttattcaattccaccttaacaatattagaaatatcaaaatagagattatactttgaataaagacgatcagcatataaacgagacgctctagtcatatagtgagcaaattttaatttgaatcacaattttaaaaataaaacaatatttttaattatagggtaaattccattttggaccatgtattttgcaaaagttataaattggacccatattttgtaaaatgacaaaatagaccctatattttttaaaatggtacaaataaaaccattttagaaaatacatggtccattttattatttaacaaaataaaaggtccaatctataacttttacaaaacacaaagtctaaactggtatttaatctttatcatataaccaaatttaatatataaataaatttattgaaaaaattatctacaaagtactaacaaaactaaaatttaaaataaaagcaaaaaattattttcataaataatgctatatttttaacaaataaacttatctttgtttaccatgagtgcaaacaattttctttacaaaatttaacttaagaaatacatttttgtgcatactttaggtacaaccatgctcagttactcatattgaaagtaaacatatcatcatattatcgaggaaag

SEQ ID NO: 16899 - DNA, 6684 bp, Cannabis sativa
tttgccaacacatgacaagtaaattctattttaccagcgcaatactaacttttgccagtacaaaaatgtgctggcaaatgtgatatttcttgtagtgtacttaaaagctattacattaaattatatagaaactgatacttagttggactaatattaacatataggagagtgctaggcagtaaaaactactggtgcgctttagcatttctctttattaaattagcattaaattcagctattcattttgatgatgaatcattaattatcagaacaaaaacttattacatatgattaaaaataacaaaaagaaaaagaaaagttattactaatactgttgaatttttgtggatatgtataggaagtagctctaggtaggccataaatataataattggtaaaatgagaattaataataataagaattaattaattggggaggaataagaggacatgtgcatgaattaattaatgtagacgatgatgagataaatacctagctaggttttaggctctttaatatagttaatattaaaaattagagcaatactaaaaggcacccgtagtgcttagtactttcatacgtggtaatattgttattagtccaattaaatatcgagtcccatgtaatttaatataataatttttaagaagtattgtccacgcaagataatatgtcttaaaggtgctataggcaccactgctgtttaatagcaatgtcttaaaaaaaattaataagcatatattaactaagaactaaatgaaagaaaggcataagtgggtctcattttttcaaagagaaaagctaaagcgtattcacattactattctgcgatgtaggattattattggtaaaatttaatattgaactttatttatttaatttattttaataaaattaaagagagtcactaagaatgaaagcttttttttttttatatacatttatgtacaaaataaatatatataatttgcatgcgtgtgtgttgaatgcatatgcagtagtagtagtactgcaattaaacaaacatgcattcaattatttctctcggaattagtatatatatatgtgatgatgatgattcatggttgaaatgaaataagaagaacgcatggaattatgatgagagcaaatgatgcacgatgtgtagtactttttaagtatttaagacacgtcaactactactactacgtatagtcattagtttttagaaaattgctaaaagatattattagtctagtagtctctttagtatcatattgttattagtataattaagtatcgagtctcatgtaacttaaaaaataattttcaagtaatatatagctaagagaaatgctaaaaagtaccagtggtgcctaacaccctcctatatgtgttaatatcgttattggttgatcaactaagtatcaagtctcacataatttaatataatagcttttagggagtatcgctagccaatcgcaacgtgacatgtcgagaaggtactaaacactactagtgcctaataacaaggttctaatggccaaccaataattatagcacttcgctcataaaaagttttggacaataatgatatccaataataatgttcttagttttagtgtgtgtttgttgttaattattaattacgagagtgtgtacgtgtgaatatacattcattttggagtccagggtacgttgaccaacaaattaattaaaaaatatatatatatatattgattagaaagaaagtttgaaaattctcatgaaaattaaaggggagagagagagagagatgcatgcagtgcagaatcaacccccggcccatctaatatattgtaatcattgcattccataaattcattgcctttaaagcaaaatcagatgctttccaattaatgctctacctaccctattaacatatcgatacccttatattattatacaattaatttgatttaatttgtatttttgattatgatcagtacgtatacactatttatttatttatagttcggactatactatactcgatccatcaatcgtaagtatgagtagtcgatccgatcgtaattaataatatctatcatcaaatagtaaaagtcaaactcaaattcaaacaaattaaaatgtacaaattatatataataaaaaagtaaaatgtgtgagtatagaaatcttacatggcatagaaatattttatttgaaatgtataactagtgtaagtttgaaatatgggttgggattccgaggagtatccaattttgtgcgcatgggttagaactcacacactggaccaccatacgcgcgtcgccgccgccaccgacccaagccgaattggattggcgcgggtgaggtgtcacttaatttttaaagaaaaattatttaattaagtaaagatttattatttatttatttattaattaattttaacacatgatcagaagtagtaaaacgtgatcagtcaatgatccgttttttactccaacgatccaattcctccacgaacgataacattaccgttttcttaccatttatttttggatcgacttctatataagtcgtatcagaacaacagaagagcacatctttttcaacattaattttttttttctttcttccttacgatttttctcaaagcaaactttagggtgtaacagagcgatatagttcggtgcaaaaaatatcatacgtatacaaagactgttttatcctagggacgtcgtggttgctagactgtcgtgcacacttcgggtagagccgcgaaatgtcttaaagaaagcgacattatctgcgactcagccagattattctatcggtaattcgttccaatttcattacttttaatttcggtctaacatgtattagattagatattgtggttgttgttgtttttctctatatatataggtagcaattagaatagaagtaattaataagttgtaatttcattagaaagagaagagagcattaatgagagatgagagagaagagaagagaagagaagtgatgattatataaagccaaatatgtctgagagtctggacctacatacatgcaattcaactgtgtcttctgcttctgcttattctggtggggtactatacataaagaataaaacaattaatatatatttattatttatatatatgcaaaacctattattacttaataaataaattataatgtattgagaaacaaacacacaaacaaataaggatatttgatctatcaactctaatatatatatatatatatattctcatcatctcatcattattatagtaataataatatagtatagatcaaaatacttgtagtataagtgaaaatgaaaatgatgatatatgatgatgatgatgatgatgatgatgatgagttatatatatatatatgatcggcgtctccttaggctttgcttttgggggaatttctctccttcttgttcgccgactactattactatactactcactactcactactcactactcactactactttgtctctctcgtcttatctatatcaattcacactctaacctcccttacataatatatatattatatatatactcctgagtcctgacctctctctctctctctctctctctttctctctctaatagtacatatatgttaatattagttatggtataattaaatcgcatgtgtatgtagtccagtcgtgacattaattaattaaatcactttgctagcatcaatttatatatataaaattaattaataataaatttaattaatttgtattatatatatggagaggggttaattagcgttgcgtgttaattggatcatcactctctttacatgcattttatgattatgatattggtgatgagcatcgagcatgatcatgagacttttcccttcccccctttttcttttcttttttatttcccaaagaaagaccttttctgcgtgaccccttaatttagtcttccactttttatatacgtacctatataaatataataaatattatttataatattccatctcagatgatatcataatatataaactaataataaaacaaaaggaataattagatgtacatctacagtatacatatagtagtactactactgtagcacctacatagtggtagagatgaccaatatatatatatcagaagagagagagagatcgtacgtactactatatagtatttatatatatatatatgtagttgtgtacaacaaacaaagtgcatactaattaatttgaaacatcagaaaaggttgtagatatcgactgatcaaacagtagtgcaatttctggaagatcgaaaaaaaattactaattaatataataacttatttattatatatatattgtataaaagtaataaattaatatattaatagttataatgtaatacgtaatgtaataataaagcaaaagaaagtttgaccgatgaaatcgatgcaacccgcacggatagctagcttcaaaacaagatcacttatttgtatgtactgctaattatattattaattaatatatagaaattccttttttcttatttcatatagttttcatgcatatatattgtacacactctctctctctatatatacatgtgtatttatatttatgatcaacttccaaggcagggatatatgatatggagtatggatcgatccagaggatgaggatgagaatatataatttatccagaagaatagaatgaatattattgcagcactatatcaatatactacatcctccacagtaagagtcagacactactataccctatatctatctatattttaattatatcaattatataacaagatctagtgattttttcaaatatagtaatgttttttttattttttaaataaaagtaaaatcttaattatattgttattagtatatatatatatgattcaatagtgagagtagtatggttcatcccaatatggattaagagaatatgatgaaagtgtgggggttgtgaaaagtcacattatatacttatatatataaattaaattaaatgtaagtatgtgtaggtagggggagggtgagatgactaggtaggggtatttattatatattttatatattaataattttatcgtaaagagtgaagttaataagttagtgaaaagtcatatctctttttttctttttcttgatattcttgttctctttttctttttctttttcttttacacgagatccaatccaaaactctagtctctaccaccacactacacacaccaggccaagcctcctaaaactcaaaactcaaaactcaaaaccagtactactactgctactaccactacgtacacacacacctatatagctatctaggcaaatataatcactacatatcaatttacaggtatatatataccccggccccccttaattttctctcttgctctccttgttctcgatcgatcgggatatttaattacgtacctaattaatttattaattccatgatctctaccaattaacatattaatttctaaggtatacatctcctcaagtatctctctgatgaggtgatactactatatacctactcttataatttaaatttgtttccttttgtagtagtattgtatatatataggtgttaccacatatatatatatatagatcttttaaacaggcgaaagaaagaaacaaacaaaaagatcttcaaatcctcccagatctgtctcctaataatttgtatatggatagtatataatttgagaaattattctgtgttgccaaccccattatttggtatttatatacttaattcttcgattgcaacattatccttttatatagtaaaatgggccgaatcttccatcatcaattctcattctcatttctttcttcttcttcttctatgcataatatatatttgtgaaataatggtgaattatatatatatatagttgacgcttttaaaccaaaattatttggtataaattgtgcatatatatttgtgtgtattttaattaataataaactgaatatattaatattggtggatgcgtgcgtgattttcatggttgtgtcacatcaaagatatatatatatcatcatcaaaacagtttccatataacaaaaatgtacattcaattttggatctccattcaatcataatcagtcacactcttttctttttattaattatttaatttcttatattatatatatatgtaaattctctcttttctttcttcttattaatcttgcagagcctagctagctagcagaaatcgaagaataatccattcaaaaattaacagaataatatatattatatggcatcatcatcttcttcttcatcatcaaattcgccttgcgcggcctgtaagtttctgaggcgaaaatgccaaccggagtgcgtgttcgcaccctactttccgccggaccaacctcagaaattcgcaaacgtacacaaagtgttcggcgcaagcaacgtcactaagcttctcaatgagctcctccccagccagagagaggatgccgtcaattcacttgcttatgaagccgacatgaggctccgagaccccgtctacggctgcgttggagtcatctctctcctccaacaccagctccgtcaactccaaatggatctcacctgcgccaaatcagagctctccaagtaccaaaacctcggaatcaccggacacggcctcatcgcggctgcagccgct

SEQ ID NO: 16900 - DNA, 4078 bp, Cannabis sativa
taggatgttatgttaatcaaaaaacatactacatacttggtggtagcaaatctagatcctggtaaaataatatccaacagtttctaggtgcaatggactagtgttgaggctcaacaaactaccaaaggcataagagagaaaatctggctcaattgatacacgaagcatttctagctgacagtaggatggtgctagggagagtaccatccattaaaggaagcattcctcgtgtgccaaatggccatgtcgacaccaatgctcagggtgaaaccctgaacataaggaatgttatagctaccgatctcggtagcactgccaccgctccttgagcaattaccactaatgtcctaattggggaagcgaaccctcaaggagagttcgaaaggactcagaccataagtgagcgacccccaccttcggaagcaaacccttaaaaggagactgaaggcctcagactagaagtgagtgagcccttaatgaggaagaaaacccttagcgagagttcgactggcatcaaactaggggtgggcaacccctataggccttgcacctttggtggagtgagtctattaggactctacttggagcaatccaaattgtaggaaaactagatcaccacagagagctacctctcattggtctgttgattctaagcaacctcgtgaccctacatagggaaacagatctttagtagaacgagtaaggtccactcaaagaatgaaccatgataatgatttgttcaaaatctagagggtaaggaacaacaaaccacttcacacccagaactatttcttggataatgaaggtgctttgtgttaatacattgcccaaggacccaacgggacgaaataagaatactttctgcaggtgcatggagaagagttgaactggagtaattagtttgactccctctacatttgcaatttttaagaagaaaatttcgaaggaaatagttgttgcaacaccaggagtgactacgctagaagtgatctcttgagagatgtctctgtcatcatctagcagaaatgctcaaggttgccacccaggccgcctggtcagaagacggtcaacaaggccaatgtctttgattgccttaggaaacataaagaactaatgaatgatctcagccaaaagcagttggtggaagcgggagcttctagtgctgactcttatgtacaagttgctaaaactcaaattgtatgcataccaccacctgcgtagttggtagagtcaaatgtgagactctggtagccttagtccaggatatggctaagttaaagccaaaagagtatgagatagatagagaatggtgatcacccttctttgtccaaatcaaagccttggaaatttctccaagtataaaaatctagcatggcacctgtacactggtaaaaaagacccactgtctaacatacataactttgaggtgtaaattgacatttagtatgtgtaaagggatgcacggtgttagatatttccagccacattgtttggaatagctcagagatggtatctaaagctaacccttggatatagattcctagagtgagcttgtagaggccttctacatttagtttgccctctcaaaaattagacaaagaatcccttaaggattatatccatagatttttggacgtccctgctaagaaaaaacttcttaacaaagatgcaaaggtcatggccttagcaactgggctcaaggagatgagtcttctgtggtcggaccttagactgaaatcaagtctacactttgcatgagtttctagatagagttgatggctttatcaaactcgaggaagttgtatcttgagctaaaagcttgaagactctcttgctcctgagactcaagcgtagagggaaatgggaaaggagcaaagcctgaggggaaaagaggaaacaatggtaaaactagcaagtcttccagagccaagaggcccaagatgggggataagatcttttaggattatgaaccctaatttaccacttattccattcttttagatcatagggaagaattttttctggccactcaatttacagtgccatataagaaatcgtggcccttaaaaaggaaatagaaaagcgtgatatgaacaagttatgtcagtttcataatgattatggtcatgataccaattagtgtaatcagttgtgtgaagacgtcgagtttttcatccaccaaatgcacgctaccctccaatcatatgtacaaccaacatcccctctagagcctatcgcacctctccaacctgcaaccattgcgggatgattaaatgtgattgtttgaggcccgcatctagctagaaactcaaggaatgcattagagaggtatgcaaggttgatacaccatgagccttgtgttgacatattggatgtttaggagagacctctcaaggcccaacacttcgagtgtgatcttatcacatttgaagagttagacactgctcatgtccaatatcctcagaatgaccccttggtggtagaggtacaaatttccaacatgattgtagcaagggtaatagatgacggtggagagtcatccaaaatcatggtcaaacaaatttggagcaaatcagtttgtccctgaaagacctagtgccatgcgagcagctaatgtatgcttcagtagagaagttatttctccatgtggtaaaatcaagttgcccctaaccgtgggaaaatccccacatgataacactataatggaaactttcatagtggtcgatacaaaatctgaatataatgtggttcttgggaggccttctctctatgacctcaaagccatctaatcaatttttcacttgcccattaagttctcaatctcgataggcattgaacacttgctaggcaaccaacgtgtgcctcgtgagtgttataacactttgctagctgtggctaataagacctcattggctacaaaatgagttgataaaaagaagatctctgaggcgttggatctcgctaagaacaagatgaagatcgcacctgcaaatgcctaacggtgcacccaaggtagggaagatatcaacctctactatggggataatgatttaggagttggtccaactgaggaactagaaaagatccctctcaccaaagtgaagcctaccaaggttgtcaagattggtagaaatctggggacaaccttgagaacacttctaatggcatgtctctaacaaaaccatgatgtattttcttggttgcataagcacatgactgaaattgatgctgcaatcatttctcatgcctttaacattgataaaaataacttcaagcctgtgcagcaaaaacatgggctctttgataaagaatactccaaagttctcaaaggaagaagttgatttttttttttttggaaaacagttttattatggaagctttttatccaaattggaagtccaaacctctcctggtacccaaatggaatggtaagtggaggacatgtgttgaattcatttacctaaataaagtttgcaccaaggattattttcctttgccctatattgatcaattatggacacaacgacaggccatgaacttctcacattcatggatgccgattcgagatataaccaaataagcatgcatccgccagacaaagagcacactagtttttgtacagaggttggactgtacttttacaaagtgatgccctttggccttaaaaaggcaggtgcaacatatcaaagactactgaaatgtatgttttaagatttagttgggaataatatgaaggtctatgttgattatatgttggttaaatctcgaaacccaaaaaaaacatattgcttactgttatcccaatttttgcccacatgacgtggaatgtccacgtcatcaagatcaatgccacgtgcaacttgtcaacaagatgtccaagtcatctacacaacacttcagctaacgggaagtagggggttggctgaccacccctggtcgaccctatggcaagcattggctagcaagcctccaactattgtagggctggctagcatgcacctggtaggtatttggttcaaagcattcatccggggacagtagtttacttgcaccttggataagtgctatgtcctttcca

SEQ ID NO: 16901 - DNA, 11947 bp, Cannabis sativa
  modified_base (4752)..(4763): a, c, t, g, unknown or other
  modified_base (11765)..(11767): a, c, t, g, unknown or other
aacatgtcacatatattaaaaaaataaaaattttctacaatgtacactctctcaattcttatttgtttcggtatttgagagaatttttaagtttattttttttatgctcatatatactatgtagttatttaagacaccttgtaaaattttgagaaattcaaaaaaaaaaattacacgccaaaaatatgatttaaagaatctgttgcacgtgtgattcttttattttatacgccagactatttgaacactgtcttttatattgtaaattatttttacagtatgtcttaaataactagaatgtatatgactaaaaaaaatagactaaaaaattctcttaaataccgaaacaaataaagaatgcatcagtgtactctactttacttcacttgttttaatttttacattaatttctatattctttaagatgtatcaattttttatagttggtgtctccattatactttttaggttaatataaattatgtgttagactaatatacttaagtagaaaataaatgtatatattgaataacatactcatacaaataagtatattttaatgaaatataatataacaatattttttattaacaaataaaaaatgagatatttttcaatttatcataaatttctttatatgccatacaaagaataattatattatataattagatttttctacaaaaccatctaatgctattatgctacaaaaccttaaaaaaaatgttatatgtgttattgaaatttttcaaaataacaataattataataaaattaaatagtaatattattgtacgaaattaatttttgcacgttcttcacgaaattaaaagttttggtactatggtcacctaccactcccacaaccacaatacatacccctacttgagctatgatgggctagactcgtacttaggattcatccaaattcacggttaaaactttaagcaaaaatttatcatattactgtcaaacggaattttttataaaaaatttatcttcttaaaaataaccgtaaaacaacaaaattaaattattaaaacaattatgaaacaactcaaactcaaaaacaactgtggtacaactaactgtaactgtaaaaacttaacacagtacacagtataagacttacacagtatttttgaaaaaaaatttggtatacagtaaaaaagtaaaaagattgaatatttatgtatgtagtgtaaaaatcccaaaatttatatggtgtacttttttgcattagaaaaaataatatttttataaaattttgtaaaaaacctaataatactcacattttactttcacacaatttcttggacttattattactcagagccgcgttgccacaacgcgtgcaaattttaaataatattggataattttaaaaataagggtactagcaaataattattaattaattataaaaataaaaaaaaaaattatggttgcatatgttgtagttattcaatactatttgtatgttttcaaaaaaaaaatcgagtagtttataatatcaaaaataagatttacatatttaattgtatacatgaatttttttcttatatgtgtggtaagtaactgtttaaatcttcttttcagtactaaattattttataattttcaaaaaaatttacaaataatcctaaatagctaaaacgtacataattataaaaaattaaattaaaaaacatttgaataccaaaataaataaaagaggtaccaaattcaccctttaaagggttactatatatatataggtgaagataataaatatggatctacaatcttggaaccccaatataagtaccacaccctctttattttgggaaaacttataaaaatactggaatttaagttaatttttataaaaatactagcacacagaattttttttaaaaatactatatttttataaaataacagtgaaacaactaaaaaactaccgtagaacaacagtgaaaacttatcacactgcacagtataaaacttacacagtatttttgaaaaaaaattccgcccgatagtaaaaaagtaaaaaagttgaaaatttcagtatgtggtgtaaataacccttactttgatcacttttgaaaaataaataataataataataataataataattgtaaaaactcatttactaggggtgtggccaagtagctgttggtatttatggtatttaaaaaaaattataatcttttattttttttatttgtgtattaatatatttattttatataacgcaattcttaatttaacagtaaaaataaaattatgtatgtattttatataaagaaatttatatttaaatttaaaatacttaaaatattataaatatttttaattttattagtttaatattgaattaaaataaaagataattctattcaatcggtcaatttaccatgatatttcatttgaattttattgtacatataaaatacgtacatataatcacatccaaataacatactaatatagctgcaatagttaaaaaaaaatcgatcaaaatctcaaatcttatttcagaaattagaaaaaaatacagtatctaattaaaaaaattaaacatgtattgcacttaacatcacttaattaaacttaattaaaaaagaatagtaattatatgtgcattgcacataacataaatctagtatatatatattttataattatagtaatcatttcatttattttttttaaaaaaattaaataatttatagtgttaaaaattaaattcaaagagcatatttttttaatgagtataataactattttgagttcccttgtaaatctttagaatttcttaaaaattagtggacatgtttagtataattcatatatatgatcctaaaattaatagttatttttttcaatcatttgtgtactaatatatttattttatatttttcttcttttcaaatcttgaagaaaacattttttatttaaaagaaaaacttaaaattaattaaactaacttaataattacatagagtactgaaagttctgtcatcataaattttaatataaaagaaaagaaaagaaaaattcatcacaactacattttcaaaaatattaattacttatacatgtatatacacaaacaagtacacatattttatttacaagtacatatctataaatgatctttttgctttaattaatttgagcaatattataagtattaatatcactaaagtggtgctgaagtcataagtggttgagatacattggtttccttctatcaatatcaatatgtactatattttttatagttccataaatgatactctcataattaagtttattagagtgtgttcaatttaattttagttgagaaaatttattcatcacaaggtttagggcttaggccgactagatttggaggaaattacattgtatatccactttattttatttattttaatttttacttcaatttttatatttttttagatatactcatttttatggataatgtctccattagacccgttaagttatgtaaattatatgctagactttagtagagagtgagagtatattagacaatccactccaaagtgggtatattttaataaaaaaataatatgagagtatttttaattaatggataaaaaaagaatgtatttttcaacttatcccctagatttgtgtttagggctcacttagtccaaagaacaaaaaaaaaaacttcctccttttaaaattatatatattgttttgttgattttgagaaatactacattttttttcataatataggcccaaaaataatttttttatagcctactaaatttcaagatcgaccgtgctagtggcggaccaggatttaaagtgagggggacataattttttttttttgtaaggtaagagcaaaagtaaacttaaaaagaaaaaaaaaatactcttgatacttctatcctatatgtattgcacatgcatatacatctttatagtattatatttataaatatcttttattacaaatatacatcgtaattaattaaaatgtatttatatgttttttttgatgttttttttcaaggagtgtgaattcacctttagttcgtataagaggtgactgcaaaatttagtgtgctatatttaatttactattttgaattgtacttcaatattattattaataattatttaaacactttcttctcctaaccaaaaaccagtcttatgtggatcatctcttgatcacattcccatgttgatcaatatcattattttttagaggtgacaatttatattcatgtacacttcgttcgtgttgagactcatgtattataagtgtatgcttgacccaaacataatttatttaataattgtatcaaaaaaaaataaaaccaaacaagattataaattaatgcatattgtttaaaagtactaattaataatattttgtattaattattaaatcaaaatatataaaatttagggtagatatcattttagatcctgtgttttgcaaaagttatcaattagactctctgttttgttaaatgaaaaaatagaccttatattttctaaaattgtacaagcaagatcttgaactgatattttgtcaaaataaaacttaataataatttgatttagagatgttgtgacaaaactagttatattttctgtatctgttcgtgttagaaattgttttaaagttggttatatttaaaaataaaattattaaaaattgagatcagggtcctatttttaccattttagaaaatataagatctattnnnnnnnnnnnnaaaacagagagtccaattaataacttttgtaaaacataagattcaaaatagtatttactcgattttaaattataaaaatagcaataataggaatatattattttgtaatctctttgttattgtctcttgttaattagaatgaattagctataccaaatcaattaatttaatagattttcagagaaattattccaaagtaaatcttagacaattaataaccattaatttgaaccctaaaacaaaattaataatactgttaatttaatactatactttgttaatataaaatttaaaaatcattatatatacaatatgctgcccactactatttgagattacttattataaagttgcaaatggattttttattttatttttacttttatgaagtaaacagttctaaatatgtaacgttcccgctttaagtttttattaggtcctacacgagtacgttactctggctgctttatggactgatgactgaccctacagaccaacatgagtgtttctaacgtgctatgtcctcactcacacacttcctgggaaaacttcacaggaggtcacctatcatgaaattaccccaggtcaagcacacttaattgtagggttctttcgtgatgggctaccagaaaacaagatgcatcttgttgatataagtagtaccaatcaatccatttaagccctattcaattgtgtagtcctatacctacacagtctcagaatcatcccgcttgacctttccaggcggtgtgagattggacaacttaccctgtatttctccttacgaatcacgagactactaactgtcacaaaatatttcgttaatatataacatttttttaaaaaaatgtttcgttaataaattgaggttgattatattttaggttagaggatcataattattaactgttaaatcaacacaatcataatttaataagagtaatttgtgatataaatatataagtttaactttcaatgattacaaataaatacttaagttaaatgttgagtcagccacatgacgattcctaattgatcacgatcattaaatttttatttattatttaaaaatttatttaaatatactaataaaaaaatatatataagtattgacttgacacttaataataagatttattttagaaatataacttaaatatttgtactgtaaaaaattaaacttaagtatttatctaaaactaaaaattaaatttaagtatttacaccacaaattactcacctaataattatgtataaaacaatgaatataaagatgcaaacacataattttattaagtcaaaaacataagataacttttgaagcaaaccaacttcataaattgaaatacaaaaattaccaatttcaagaaatacattcaactctctaaataattattcaaataatattggtatacacacctcgtagaaaatcacaaacacacatacatatatatatatatatatatatgaaattattcaaattataatttttcaaaacattatgggaatcaaaacactccacatgtgtgtttttcttccccccaaaaaataaatataaaaaccctaacaagatagaattactattaatataatattataattgttttctttttcttataatttttatttttaggtatcaaactcaatcttgatgctaccaattgagacttttccaacaccaagcttaggaatcaaagtaacaacaacatgttcatcatcttcagcatccaaatcttccaacaagtcattgagtcccaacataagacaagtcttgagcttatggcccttgtgcttatgtggcacgctgacgtagctacccgcgaactcactcttgtcgggtccacttggcaagtcatcttcatcgttgatgtaaacatcgaacttgattgctacatctctatcgaactcaatcccatcaatcaccaaaatttcattagcctcatccttctccttcttgctccttttcgcctttttaggcctcgccactaaaattttaaccggcttgtccaaagtcaagggaaaacttaacgtggtttgaaacatgttattgtctgtggctgcctgggccataggcacaccaactcgtcccaacgctcgtttgactcgacttagtctagatctgcgtggcgttgggcgagtgttcaaccatggaatgtccactttttgataattgtacccgagttttctactgtccaaacaatctctcacctatttaaataaaaaaaattaaaatatattagccttctcttaattacatgcaatttcatttttgcttgtattaatttttctttcttcataatcataaaatattgaaatttaaacttcaaataaaaccaaatataaaccaaagctagtgtgaaattaaacaagaatatttttttatttaaaaaaggaatgtagggtttattgtatatattttattttgaaaatctaagagattaaaataatcaattatttttttattattactttattatatatttaatagaatacttttgaaaatcagccattatttttctaataatttacttattaatttaataattgaagtcaaaccattggttattttggagaaaactgtaatctttattcaactattcattttgaaaacaatgcaagttattaccaagaccttcaattttaaaaaactaacataagtagtacaaaaataatggttggtacatgtgatagagttttaataattgaataaaaggattatttcacaaatataccaaaataattacaaaaattacaaaaatacagttaaaatgaattttaaatatttttatgattttatttatagaaaatacggtcttttaatgtatttttatactgtactcttcttgattttttgttatttgtatgttattttttttgttgttttgatattattttttatgtaatttttttattattttggtgttatttttatataatactgtaaaaatatatatatacaaaaaatcttttaacgtaaaaatataaaagatttacaaaaaataatgtattatgtaattatcccaaacaaatactatatttaatgtgattttatatataaataataataataaaaaaaaactatgtgcactatatgtagtaaaaaaataatagtactttataaattcaatatatatataagaattatttgtctcaccttgacacgaaccaattgagcattttcatcataaaaaagaaaagcagcatcaagccaatctcgatcggtaaaatcttgtcttcttccccccaaagttttccaaacactccacattctatcaacgttagaatggtgagcaaagaataaggggtctctaccagccgagtaaaaatttcccatgttctcaaagttgggttgggtctgatctccagaccaaatatgaacaggcccatgaggaatattttccaatgagcctgctccagggtcggtggggtccccggctcgataaggcatgcccataaagagtcgaggacttgtaccgttagaaaccatctgacggtacatgatagcaagattactcgagatttgagcttcattcgttgatgccacgtcaacaccgttatagtcaaggtccatgagggttggtggttggtgaggtttgcttctcaatggatcatataatgaagaattcgggtttgtgtaaatcgagggtaactgcattcctggtggggaatcccaattccagaaaggcatagcaaaattggggtccccaatcagctttcccaagattctttcgtagaaatataagtaccaacgatggaatggaaaaaatagccaagaattatggacttgtatatcgagatttgggaaacctacttgctcgtacgctccatcgcaataggcacaatgaatgttggcttgttgtgtaaaatttcttggatcatcagctggtagagctctcatgagctctaccgctttgttgaatttttccaagtaagctttatcaactgcgtgtgcagctggtcttattctgatcttgcctgatttaggtaatttgtagtctatgatggtagaagtgaatggtgggcaacaatttactgggttggccccagctggtaagtcagcctgaccacacttggaaaggtctggcggggctatagggtctgcaaatgcaaatggatcgcgtccaccctgtaaccctgccataccatacaaccctcccaagcccaggagaatatttctcctgttagggttttgttcgttgttattgttgtttgtgctagctttgcatgaaaatttacgtggaattttcgaagggttaaaacgtcggtttttgagatttgggatttgggtattcttttgaagaaaaagagatgaacaagagctagtgagagaagccattggtggctctctcttgattatgaattttcttttgatcaattagagtttgttaattgggattagaatgaagattagaatgaggattggatttgttttataatgatacgttaagtgaacatttcttattaattaattcctatattattagttaattaatattagctcacccaatacaaattgatcaactatagaaaaaataataatgactactgtacttttgatcacgtggttgataattttgatgatttgattaattaactaatattcatttcaacattaaggaattaatattatatatttatacacatttttatatggtttatcagtatatcttatatagtatatttttaagaattttttatttatagtatttacagaaattatatatttttttatatatataaataattgtgtgatacaattaatattttatttgctttcaaaaaatttaaagcaatatactatgtattaattgaaatagaattaaaagatatttagttacatgaatatttatttttcttttatatttacacgtgtattttgaattttattttgatatcgtaaattattaaaaataattaaaaatgaatatagtagagtactactatataactataatttaccactctatatagaatatatatattgtatatatcaacgtataattaatcatggttaaatttttttaaaacaattaatcataataaattatatttttagagactagttttatttaatataatatatatatatatataaggaattttttcatacaattttaatttttagaatcgtaaaatttcctttggaaaaaatgtattctgattaaaattcagtttttttgggtagtgggagtagtactatgctacctaatattctctctagataacttaatatttttagtttttgtagtcttcctaggaaattttgatcctccaataaattattaattaagttaattaattaatgtttgtacgcaatatggttggaaaattcctcttgacaaaaatgtttaaatgtgtgattatttatgaatagtatagagtagaggtgatactactttgaatctcgtgttttgaaaagttactgatcagtttatttatttattaaattataagtcagattctatatttttaagcattgttataggacagcagtagtacccagcaatttctataattaagtagcgctctacaattagttagcgatattatctaaaagttattttcttaaattatatagaaccggatagttaattacaccaataacagtatgacattgaagagggtgttaggtaccaataatactttttagtaattctcttttaaaaattaaaaaaaaaatagtacacttaatttaattttcgataatttttttttttacgtataaccaatttagagataatttctaacaatgcaaaaaatgaaaaaaaatatatatatatatgtaattagtcttattataacacctttagatcgagttatttatattacttattaaattaaaatatataaaacccgatattaaattacacctatatataacaatatacgacaattttatagaattatatttttgttaacaaagagatgaagtcttggttattgtcttttgttaattagaatggattagttataccaaatcattaattaattaatagatttgcaaagaaattccaaagtaaatcttagtttagcttagctagcaccattaatttgaaccccaaaaagaaattattaataataatgttaattaatttaatattactacttgttaattaatataaaatattaaattattatagaatatgcagcccactatactcattgtcaataacaatattatatattgacttatacatatataaaaatattaatgcatatttattaaaaaaaataaataaaattaatttactttatttatttaatttattttgtatataaagctgtaattggatttttcttattcttttttcctaatgaaagttctacggacctataaataaataattatatgtttacatgtaaaccattaaaattaatttatttatttttctgacataataattaattaattagtttctagttatgtttttttaattagaatattaactgctctcactctagatttggtgaacataattatatatatataatatattatgtacaaattaatagagaattttatctttgctacgtatatatttttttttttttttgagataattgctacgtatatatgatcattaacaaaatggtcatttgattttgttttattgttttttttatagaatcttcaaaaaataaaataaagaaatatttgaacaaaaatatgccatagccgccaggtttatcttaattaattaattttaataatttcaaaagcaaaaaagctcaaacattttctaatccatgcatgttctaattaatatatgccctttaattatatttttattttattgtaaattgattttaaaataatgcatgtaatagtatgaatttaatcccctattaaatgaatttgaactaatttcagttttaaaagacatgaattaattctacatatatttttatatgaattgattcagctatttgtcaagattgttgttctttaaaaaaatatgaaaaaaaaaaaaaaacagaaaaatgtaataataataataatannnataataataataataatctatatttatgtataattttgttttataatgaattttacatatatacatatatatatatatattctattttaagattttctacaataaatatatgtatgagtgactattcaatggttacatttttattgtaaccatatggttatatttttctttgacctgtaa

SEQ ID NO: 16902 - DNA, 4141 bp, Cannabis sativa
atcttttcatcttgtactaattgaattcttctatgtaaataacaaaaaagccaactgtttagttgagcttcttttggcatttcaattctttctttcttctggttttacctctggttttgtaccttttacttgccaatgttcaaagtctcacatggtatcaatcgccattgatctctgtcactaatggcctcgaccgatcacacctctgactctggtgttcatgccgatcctcctgccacaagttttgctgccactccaagatcgactgccatggttgcgccgacttggaatcctttctcccattcttatactgttccttgatgatatactgtttaccgatgttcctcctccaatgcaattagttacaggagctcccaatgctgaatacaatcaatggaagaaaagagatcaactgcttctctcctggctcagatcgtctatgaccgaaggcgttcttgctgctgttgctaacttcaccacatcttactctatttggaaagccttagagcagagagagattctcgagtcaatcttgcgctcgccttctgcaacttaaaggtcagttctctcatataaggaaaggatctttatccatttatgactttgtagataaagtgcagacattggcagattctatagcaattgcaggataaaaaatggaggaacaagatgttatcttgcaattgttaaatggccttggtcccgattatgactctgtgttatttggaatcacttctcgaagtgatttcttgagtcttgaagaagttcaagcccttctcatggctcatgagaatcgtcttgaacaacatagtgcccttactgatctcaacattcagatgcaagccaatctcacacaaggagccccaagaaatggtccctttaagccatcttcctacaatggtcgaggtcattttcaagaaagttcaaatcgaccaactggctgaggtttcagcaagaatttttcctcctcccgattatttgtcaagtgtgtcttaaaagtggtcatactgcagctgtttgccactacaggtttgacaagaattggataacccccaaatctggaaatcatcaacatcgtgcctttcttgctgaatgtgatcaagaacatgatccatcttggtacacgcccgatgtcttgcctgattttggagacgattctggatggtttgtagacacggaactactaaccatgtcacgaacaccaccaccaatctcgatactacagctccctaccatggtgctgagacaatcgctgttggaaatggtaagaagttgcatatttctcatataggtgctgccacttaacattctcataattcctctcctttacatttagaatctgtccttaaggttccatctatgacaaaaagtttagttagtgtatccaaattaactaatgacaataatatttttcttgaattcataaaaattggtgctttattaaggacaaggacagtggcaaggtcctattgaaagggagacttaaagatgggctttacctccttgaagacaagtcatcatcaccctttgattcagccgtacagtgtcatcttgcttacacaactcctaatgtccatagtgtttctgtttcaacttcttgtactgatcattgtgatcatgtaataaacacttgtaatgactttactatcaataaaacatctattgattccaattgcgtttctgcttctcctgctattttcaattcttttattatcaatgatgttaatgcttgacgtaacaaattagaacatcctgctactagtaccttagccaaattacttcctcaattacctcacacaggttctttaaaagatctcatcttttgtgctacctgtgttcaaggaaagagtcacactcttcccttccctacttctactagtagagctccccaacctcttgcccttatacatactgatgtatgggggcctcctcatgctctatctaaagaaggatataggtactatgttcatttcctagatgattacagtaggtacacatggatttttccacttacccaaaaatcccaagcctttgatgtttttataaaatgaaatagtcaagtggaaaaaaaatttaatttgcccataaaatctgtccaagctgattggggtggtgagtataggccatttaaaagatacttagaagatcaaggtgttcatttccaacacccttgtcctcacacacatgagcaaaatgggagggctgaaagaaaaccacaggcacatcaatgaaactgcgcttactattttggctcaatttggtttggatcttacttattggtggtatgcttttagtacaactattttcacaattaacaggttacctaccaagatacttgattttcattctccatatgaggtgttatttggcagcaaacctgaatatggaattcttaaaccttttggttgtgcatgctacccacatttgagactatacaatcagcataagcttgatttgagatccaaacaatgccttttttttttgggtattcatctcatcacaaaggctatatttgtgagagttcagaaggcagaatttatgtggctcgaaatgtggtggttaatgagaagttctttctagctaaagctactggtaacacctctcaatcaccacaagtacaggtatgttcttccacttctattcctatggctacattcaatactacacctgttactacatcttctaatacatctttttctgttgctgctactactgaggctccacactcagcatcagcacctcaggttcctactgctacccaaaccacaaacactacaatttcacctcacaatatagctcttcccgatcctcctcagcagccaaatcagtctcaaaatacccctccaaaccagttaattaccgaacctacaccacagatacttactcaaaatactgatccaacaaaccaattacaccagccagcacctacacctcccacaacaactcctttgactattccaacaacagctcttcccacacctgttgctgatatacaacagcccctaagaacacactccatgagaactagatctcaaagtggtattaggaaacctaaagcatacttggccacaaagcaccctcttcaagagtccttactgcctactgaaccaagaactctgaaagaagctctcaacaatccccctggtttgctgctatgtcaatggagtttcatgcacttacaaaacaaggcacttggactcttgtgccttatgctctacacatgaatgtcatagacaataaatgggtacatagaataaaacttaatgcagatggctcattggacagattcaaatcaaggttagttgcaaaaggttatcttcaaactcctggtatagattatgaagatacattcagccctgttattaaaccaaccacagtgagaattgtcttaagtcttcctgttagtgctcattggcctgtcaaacaactcgatgtgagcaatgctttccttcatggcacacttcaggaaactgtttacatgcagcaacctaatggctttattgaccctacaaagcctactcatgtttgtcaattgcacaaagcaatatatggtttaaaacaggctccacgggcatggaatgacaagctcaaaaatactttgtatcaatggggttttcaactctcaaagtctgataattctctttttgtctatggcacgggtacatctctggtttatctattagtatatgtggatgatatacttataactggcccaaataccacactcatctctcaaataatttctgatctaaacaaagtcttttctctcaaatacttggggccaatccactatttccttagtgtggaaatataccgtgacacaacaggaatgtatctatcacaaacaaaatacataactgacctactcacaaggctgcatatggagggtgcgaagagttgcccgaatcccaccaacactgctatgaaacttagtcttactgatggtgaacctttccaggatataactctctatcgcagcatcttaggtgccatgcaatacctgagtttgacaaggccagatgtggcttttatcattaataaactgttggtattatatttatccaggatcttagatctatttgcaagtatgttgatttaacaacctaatattgaacttctaaaacgatgaactaaacacata

SEQ ID NO: 16903 - DNA, 6427 bp, Cannabis sativa
agtaaatagttaactgtattttataaatcaattcaaataaagtatttaatttattaccatataaaaataattctcacatatagtacaaaagcgaaggaatgaaataaatattaaaaaaaaaacaaaaaataactaacaaaactaactaatttccctaactaatcctaataggagctcaacttaatagtatgaaaaattcataaggtaaaaacactaattattcaatttactttaaacgtagaagtagtacaacctaatagataataagattaataattaatcaccaaaacatgacaaatgatattatataaattgtaatctatctattattttaagagtaatgataaatacacttttaatttgtatacttaaattacgtattatgatgtatatttaatttaacttatcataaggacgtgtttgggagtcataagagcgtgccttgtcgtgttatactgtatataattatattcaaaagggacaccaatataactgcaataactaaaaaaacattcttgacaattaaaatttcaaattctatttaaaaaattaaataaaaaatacattacttaattaaaaaaaataacatatatatatatatattgcacttaacatcacctaattaaatttaattaaaaaaacttaaaggtacattaacatcaacatattttcttgttaagggtagatattcgattagattaattaatgatacaggtgttcgtattagaagcaattcaaacaaactccataatacatttagatctaatttaaatgtgtgtaaaaggaaaatccaaaatatagctaagtaggattttactagagtaatttaataattactaactactaattgtaattacttctcaactttctcttaaactgccgacaaggatgattctttaatgtatatttgaaggtaattaggttgtcttcacctttcattagagttgctgtaattaattataaggtttattaataataataataaaaatgacgtgttaataacggcataatttgaataattatgaaagttatatgattttggttttgatttttatcaactttatttttcaccttctggccctacaagtaaccaaattgtccattgccacaaagggtttgaaaagtacttaatttgatgattgaatgttgatctctttggttccgccatgctcatattcatttattaaaaaacattacaatttccttttttttttgtcccgatcaaagttttatctcattgattgctctagtactgcctttggaacttttagtccatatatatatatatcctttaactttatgacacccagaatgaaagagcagttgatataaatcactgtagaaaagaataatgatacataagatttctagatgaaaacttatataaataaacatatgtagtacaaaatgacttctctagagggccaccaatccttgttcatttacaatactttaaacaagtatcaatttccattggtgagtttgtcaatagaaccccatcatagtgatgtctaattatgtccaatttgatgatattactttatttactttttttctttccaatgaatatttggagagtgttttagtctgtcccatcaccactataattctccagaaactgttgtttggacatatataaatatatgtagcagtagtaaatgatcatcaaatgtgccgccttgaacttctagaagataaatatgttatatgctggctacaatgaataataaaagttcaatatccaacttttaccgtagggaaattaaaggggtacaaaatctgtaaataacgactaacaaactaacaattcgttcacaattgatcaccacatcactccataattggattagttctaaaatttcaaaaatctaaatttgatattagtcggtatcgacggtacgtcatattaacagattgattataaaaagaaaaaaaaaagaattatacagataaaaaacactataaaattttgaaacaaattaagtgtaacataatgagagtacagtgtctttagcattggttacagtaagtacaaaatgatatcataatgcaaaattcataaaataacaaggtatataatatagcgtaagttgctgtctttctccttcaactctattttgacaatcattaaattaatttgaggtaattaatagtgaaacataaataaatttacgagactcttttgcttcaaatagatgttataataagtcaatgatctgttgcaccatttctttctttccctttttcacatgattcaccttctgttaacttcacaaagaaaattataaaaactatattctcatgcaaaaataaatatataaataaatacataaataattaacatttaaggcaaaaagatatcctcactttttcttgaattgcaatccacttattaaactcttttttttttttcgttcgccaatatattgaaaataataagaaacttatatataacacagtcttatatatatatatatgtataaacataaggggaacgtgtgaaataagtatattcttgatcaggacaagcaaaatcaagctgagtaataactttcttttactttaaataataattatgtcaaaaaatcaactacaacatattcaagttgattatttaatttgttttatgtatattcaaaactagcattttacttagtactaataccttgtttgttttaaatctaatggttattggtgaatttcgacaatttgtattattattattaattaataacgatcgataagagtttcttctgttaatacacactaacatatgccaagttaataatacagaaaaagaagttggttaattgggaccactcttcaaaattaataaagagacggttaagtaaaaataaatttatataatatatattttaataagagagatatgttgagaaagctccaaatctcttcttttctcaacttttatcatttcagaatattttatggttgtacattttaattttgttgtatactcaatatatatatatatataatttggcaaataaaaaaggcttaaaatgtggatgttatggtgaatttaatgaaaaggaaaatgagggtagtggtatacattgtatatgtaactatatgatctggtttaatatatatgtgtatatatagtatctatatatttatataaatgttgtggagcgtgcattattaattgaattatggttcattatcttattctttatcttcaactacacgtgtgacagaaggagagagagaagaaagattatgtgaagtggaagcaattaatatgttggcttcgttataaaacaaacttacatatttgtatatatatattattaattatttaagtatatatatacaaataagatttgaattttctctacaaataagttattgatgtacgatccatgcttattttatgtaattatatatctatatacctatattgtttgtaaaaaaataaaatccagctccgtggattttttatcaccaaaaatattagagaatcttattatttgttgtttttaataaccttttttaacaatcaatattaattaaaaataatctgagtataatacattttaaaaaaaatatatcatttatttaaattaattcatctatcctgagttttgtgtgcggcctatctaataaagattttctcataacaaaaaacaagtagtacaccatattaaattataaactctacttactgcaaaaaaaaaaatagtataataattcaatttaatacttcaaaagaggattcaacttgtgaaattttcgtcaactttcataaaacaaaattagagcatataacaaattaataataaacattaacataacaaagagtaatattgattttaaaattaaaatttaatatttagattttaatgattaataatcacactaagtaaagttttatttaattttaatcacgacaaaaaaaaaaaataacatgaaaagctattactaatataattttaatcacaacctatcatctaaactataaagtgttaaaatttatgatgactaaattaataaaatacatgtactcactaaaaaattgtgttttttttttttttagagaaatttcaattataactagtaatcgttagaaaataggatttgtgatttttgttgccatacatattagatataagaatcaattcaattattgatctgaatgtatatatatgtttaaagttatttagaattaatttatgctatacaatacatatattcatatatatatatgtattatgaatgacggagagaagagagataataaagaataataataataaatatatcttgtgaatgaagaaatataagggggattattgttttgtttctttgagaatcaagggggattattgttaatgttaatgggaagtagaagtttagtttaatttaataagagaagaaaaagacaaaggtcatggagtcaaagacaagacgaccaccaatctctctcataccccgatcaggtccctctccaaaccgttttctactcagacccatcaaccaacccctcttctctcttctctctctttcctatattctaagcaaaccccacaaccgtcaccatcatcattatcatcatcattcccacaacctcaagtttctctcttttaatttttctctataaagacctacttaccacatttttacatcaacccctctaacacccacacccacacccacactaccactacttctctgatctctttcttcttcttagttttattttctagctatagtaatatctctgctggaggatgagaaagccagacccatcatcatcttctagtaataacaataacaataacactaataataacaataagctgagaaaagggctatggtcccctgaagaagatgataagttgatgaattacatgctgaacaatgggcaagggtgctggagcgatgtggctagaaacgctgggcttcagcgctgtgggaagagctgtcgtcttcgttggatcaattacttaaggcctgacctcaaacgtggtgctttttcccctcaagaagaagagctcatcatccatttgcactctcttcttggcaacaggttattaatttattaattaaatcaatctgtacttatatatcctatttttatttctcatgtacttttacttctatatatatcgtatttttatttctcatttgtgttacattatattatatatttagaatctaatatatacacaaagtctactggcacaatatactagctaataattaactttggttattcatactgatgatgatgaaaaattgaaaactaatatggtcaattatgttttcttattattatactgtagtttttttctttttcttttatgtgtggtctcgtgtctagttttgatttgctgcagagtcctttttttttattcatttttctatgtgtgaatttcttgatggattttctaccaactttttgatgaaatgacaggtatagactatagagttagaattagcgtgtcttcttgcatgtacatatgtattcgttatggtttttttgaatgaaaaatatatgcatgtttcattgttaattaccaaaaatatacatagtaagatagctctctctcacacacactacagggagagaaagatgagggaatacgttattaactcctatcgaaagtaattaataaagcaaatatttaattatttatagttaagactaatactaccaatcatctctttagtaaaatagataattaataaatactcccgatcatctttaccgacagatatatatatatatatatgtattccataaaactaaagtcaatatatatatgtacttactttttcctttatattttccttttttgagtatacaaatatgaaatatatgtacacgtacaagtatttttatgggaactacttctcagatatatatgaacatgtactacacctatcatctacacacatcacatatatatatataaaaatatgtacataccttcagttctcttatacattaatacagtagttaacctcatgaaatgtatatataaatatatatatatatcaatgtaataaaacatgaaaatgacatcggtcttctatatatgtttatggtgctgatatatcagcccttgagttgaagacactcaagcccctaacttttcattcaagtatttaaatatatatatctataaaatatgtaatctttttccatgcaatattttttatttaggcgtcagacaaaagactagtactattaacttgatcaaataattccatttcaacccgacaagtacgtagtctaatatatacctctattattagtgtttaagtccaacttgtctggcggccaaaaagaaaatcttaatcttacgatgaattatatacatatataacatgtgtctacatcatcaccgatccccactttgagtttaacacactccacacacaaacatatatatatata

SEQ ID NO: 16904 - DNA, 5597 bp, Cannabis sativa
  modified_base (5558)..(5572): a, c, t, g, unknown or other
tttttttttttttttttggtgggtaaaaagcttgaggacccgtttgcagttggtgttgtaccgttgagtttcttcacaataacttggttatttcgatctgggtttgtggaaatcgacttggcattggtcatgggtattgttctgatttagcttttttgttctggaattgggtcaaaagagaagagcttcaccatgtcttggaagaacagaggagtagagtcagcttcaaagggtgtggtgtctcggaaatggactcttttgctttgtattggatgcttttgcgttgggatgctcttctctgacaggtaacttttcccctgtaaagcttgaaacactcctttgctcttccaatcaattgttaagcagcctagaaaatttgggattgttcactctctaatgtacaagaaaaatattttgattctttgcataaaggatctgtgggttttagagaagatattgacctattgtctatcgagtataggttttagctgtttaggagtgccatgagtaatttgggtacttgtagtttgaccatgaagctggttttacggaagcttttctcactgtcttactcctctatttcctgttctttatggaccttactgtacaatcaaatatagttttgagtttatggttgatcttaaatttgcacagaatagtcctaaactattaaagtttagctggacttgggaacttttatggcgttgatgtttaaattcagttacacctctaatttagatgcaatagaaatgtagttccaaatttttaacacctgtataattttgttttggaagctttaaatttctctggtttctttatttttatgctagttctgtttttctttttgctggcttctccattttccaagcacatgaatatcgaaagtgttataaaatataccatcacatttatcagaatgatcattacgaatttacgatgatttcattctgtggccttgctttggtttcttcttttttatgcttatattttctcctatggaatttgaatacgatctctcattcttttctttttaactctttatgtgttatgtcttctccaaaacaaagaactcagtgccctgtgtttgccttactgagtaagctatttggtttgtagaatgtcaatactacctgaggcgaaaagcatatcaaggacaagggtggatgatgaaatgcagaagttggtttcaggttgtgatcccaaaattgtgagtattttatttttattgcttggtttttaagtgtgttattcttcattgttgtgctctgacatggtcatggttagtaacttcctgatttgtttatgttttgcttacttgaagaatggagaacatgaagccaaggacatttatggagaagttacaaggactcatgatgctatacagtaggccaactattgtactaccaatatttatatttctactaaaacgctcagatgtaaattatttatgttactttcaaactgcagaaccctggataagacaatttcaaatttagagatggaattagcagcagcaagggcagctcaggaatcaatcctcaatggctcacctgtggatgacaacctaagattatctgaatcaataaagaggagaaaatatttgatggtcgttgggatcaatactgctttcagtagccggaaatgaagagattctgtccgtgcaacttggatgcctcaaggcatgtggactttaaatatctatatattcacacttagaagcatgcatgtttagtacactgaatgattttaatattattacttttctgaagaatctttttattttgtaattaggtgacaagagaaagaagcttgaggatgaaaagggcataataatgcggtttgtgataggtcataggtaagtacttcgtgagagctaaaacctacttcagttaatgcattctcgaatttcattgtaactttcttttttcaaatttttcctactttagaacatacaacttatactacgtggttagaacttgtattgtttctccttttacctgtcacatgacaaacctcacaactttgaaatatagcattgttctagtgtagaattgtcactttctaatcctgtacttatcttttttctgttggtagtgctacatcaggtggtatccttgataaagctgttgaagcagaggatcaaaagcatggtgattttttgagattggtaaaaccatttttcttctaatatgcttaagtaacatatattttatcttcgaactacaaccttaaacaagtcatctttaaatctttatttgtattatggttttagagtaaatataattaaaaatcaactaaccatgcgaatgttttgcacaaatcatggaaacaggagcatgtggaaggttatctagagttgtcagccaagacaaagacatactttgcaacggctgttgctttatgggatgcagacttctatgtcaaagttgatgatgatgtacatgtaaatataggtattagatatgatatgtcataccttcctcatggtgctccagtgaatgcttgtacttttcatcatctttccccattttttccttcactaattcatttttggtaaatttacagcaacacttggtgcaactttggctacacatagggacaaatccagagtctacattggctgtatgaaatctgggccggtcctagctcaaaagtgagataatgctatgtgctcttaaagttacctgtttcagatcatagcatgaatcatacttttacttactttccctttctttttcataatcagaggagtaagatatcatgaacccgaacattggaagttcggcgaggatggtaacaagtatttccgtcatgcgactggccagctatatgctgtctcaaaagacttggctacgtacatatcaattaaccagtaagttgtcagtctgctgcaagttgattttctttttcttttcattccgtctcttaacaattctattactttttctccttgttatggatcatctaggcatgtgctacacagatatgcaaatgaggatgtttctctgggatcatggtttataggattggacgtggagcatattgacgaccgaagattatgctgtggaacaccacctggtaatctcatattttcacttcgtgatttataaattataaaattttgagttctaaggaaatttgatgagaattaactccctgattgactcatcttttaactaactatttgatgttgttaaatggaagatagaaaaacaaaatctcttgtgctgtagaaatgaaacaacataagttttttactcaaactatatatgtgtgtttaagtaaataaaataaaataaggggacagtcctattataatttaataattttaaatataatattttgtgctcttctacctttttttctaccctctccaatcaaccccttgtttttaaccttttgtttttgtctcgcgtatatattctttccctcgttcttttttttttctctgttattttgatggagagaaaattaaagtggaaagtaaaagggagaaaaaagtgagttgttgtggtttatgaagcggaacaaatgtaaaaatattgagttatttataagaaacatgagtaactccacttatcactagaacctccatgattcttgtcatgaaccaaattcctaggggctcaagattggtgagaaaaaaaaagtctatcttcaagattggaacaagttttaattttaaagtagaatcccatgattcttgtcatggttgaagaaaaatggagatggtgataaaagtccgaaaaataaaaataagattgaacaaaacagatatttcactgaagaaaaataaataaataaaaaaaatttccttttattgtccatatttttagtatctcttacattattttttgtcttgtatttatctttttcctagtttttttttttcctgtctcaccgtcttcacttttgagctatgaagaggatgtttttgcatttgcttctttaaaatatttgcacacaacactcacaagaggggaaaacatgaaaatgaaattatgaacaatgggcattggcttgttgcatgtgtaaaaataagatcattactaatttgaccaactctaatcttaccacagattgtgagtggaaggctcaagcaggcaacgtctgtgttgcttcctttgactggagctgcagtgggatttgcaaatcggtggagaggatgaaggaggtacaccgaagatgcggggaaggcgagaatgccttgtggagtgcagaattttaaagtgaagcccttctgtctcctcctgtacaacaaaggaagaaggatcgcctatgctgctccttctaccggtggaacttgttttgtaacatgtccgtacagatacatgtttttttggtaacaacttacaagtgtaaaatgagagctaaaacaagcttgaaattgttgatgtttctttggggatttccgctccagtttagatgagaacacacaaaaaggaactccacaaaacaaaaagagtgtattgtagtgagaagaaaaaaaaaattattctttttttcaagtgtttgggaagagacattttgttagtgtgccctggcatgactgatgaaggtccacaaacacaataagtgccaccatttgcgtgccatttgttccttaattttaaatataaaaagaaaagcagataaaacctttttgtagggtttagagttattttcagtcttgttgtttttcaggtttattgtataactaaatgatgatttatcattatacaatatgtcgattttagttacaattaccattttttttattggtctcatgtataatgacatattccttcccgacaataaaagggggaattatcaagaataccaaatattgacttgttattttttcggggataatagcggtaaagctatttaaattttatatttttaatacttaactacgaaattgatattttagaggtaaaattacctaagttttcatttcgttttgctctgtatccctccgttcaaaaattacaattaagtgtcacagtgaactgtttacgtgtacacacttgtataagtgaaatttttagtggcttatgtaatattaattattaaaattttataaaaataatttaaaaattatgaaaataaaaaattatgaaaaaattatttattttatttttgctctctctttttcctttttcttttcttcttcttagctgaaaaaatcctaacacccagccgcctaccccatgatcaaatcttctctgacccccctctcatacacactctctcacagtgcacaacgccagccttctccgaccaccccatgccagatcggccacagaactaaacctcacgacccagaaaatttcgaccccgatttgccctcttctctctctccttcgatctttctctcgtccttttaagtgtttttttttttgttcagttcgaagaagaagaagaataaaggaaaatgaaaataaaagggaagagctagagacctcaggatctcgattcccactttgagaatgacttctagaccaccggtggtccccacagtggtactcaccggactggcactgtgaacgacgagggtgttggaaatattttaccannnnnnnnnnnnnnnaccaagtatgttttattaacatcct

SEQ ID NO: 16905 - DNA, 5840 bp, Cannabis sativa
taaaatgttttacataaagtggcaattatgattcccaatagttcgattaatgatggaaatacagataggaaagagaataatgaaggcctaaactatttataacaatttctagctatcatccataactttccaataaatctatacagtatactattgaccttcaacattcattatagacaaattcattttattcaccaaagatttatatgtaaatatctagtccatacacccatttcaattgctcaatacattctcacagaaagcttacaatttaaaaagtctggatatatgacgaggaaaacaaaaagtggcttcaagccaaaattgcagaaagttctaaaattatacttaccaataccaacacgtgttccaacagtcaactctgagaaatcaatattccattcattgtaaggtaatagaggttggttattaaacaacgaagactgaagaactctattccatgttgagaccaattcctcatttactacataaccagagtgcccacttctgttggaattttgacttctataatcatggggagatgagggcagtgacattgccttctgagaaccaattgtgtcctgaaatatagaagaaagaaaattcttcactgatatctatcatgtcatgaagatacttagcatgaagtggcatgtaaagaaattagcattcaggaaaaaagctagaatgcttaaatcagtagcttatcaaaatttaaatataaagaacttcaaaaaaaaaaaaaaattgccctgcataaatcaatatgatgtcatgaagatacttgcagcatgaagtgacgtgaagagcaactaaccttcatgaaaaaagctaaaatgcttaaatcattagcttaccgaaatttcaaaatactgaattttaaacaaatttgccaagtaaaacaatattataacttttcattttccaataaaaaaacttaaaactacataaatatacatgtgaacatcaaaaacttcatttggctcatactaataactcaaattaacatagacagcatcacaaaccaaaattaaaaagtacatgttaatagttaatactgctcaactgattgcaaccaccctcccagattccttagcaagtgtgccaaacaaatctcagtatacatatacaaaatgaactagctattagcaatgatgataaatcagattttccacatcctgagcttatccactatacatataataattgaatagacatagaggaaaggcataagatagacttcttagcaagcgtgcccattatataggtttacacatacacacatgaaacaatcattaacatagagaacaaatcaaatatttccacgtactacaattttgcaaattaggctgtcttttgctaccaaagtaaaagaaacatacgttctgtagattagaaatatttctgtcatctgaaggatgtgaaaacgatccatcctcaccccgctctctcaaaatacgattttgcttcaatgtgtcattcatagcccgcacagccctttgatggttcaataaaatattattattctccacaattaaacaagattacaatatgtaaaaagtaaaataactcttgccaaatataattttaacatgcaacatatacctaaagattccaaatcacgaccaagacaaagacactactaaaacagaacacgttgtcaattattatagaataatttttacagttatccatagcagatgccaaagccctaattacgtatacaaatatgactattttgagaccataataactaaagtcaatctccaaccccaacaaaggaaaaaccctccacccttcaaatctttaaacccatcaatagcaacatacaaaacatgaggaagacagagatacttaaaaggctactccatcagtccattgtatgtgtaactaaatttcttttgacattatttcccacactaaatgctctccaatattagttacctgaatactacagaatcacaactgaacagaacagaaaaaggaaaaaaagatctatagcatatacttagtttattaaccaatcattattatttttccaaagaaaactctctagctcattaacctccttaaaatatctagaattgaggtagataaaaagaaaacagaagacttcctttttcgaaagagggagaggtaggacagaaaagagtggggatagagcaaaatccattttttggcaaaagggaaagcgggagggagatgaaagatagagggatgaggctgacttccaaatctgccaaaattaatccctcaaaaatatggaaggatgagattacaaaacaaaaaaaaaataataataataattactctctgaatagtttaaatatatattttatgataagtagtgcagtaattttctattgaaatattgtatccaacctttccactctcctcccaacatgaaacgacatagagaagaattattatcttctcaatccttcttaccaaacatagtgttgcaatgcaaaaaaaattagctgattcttcagtatcccttcatacatctctgcaaactattcctatccaacctttccactcttctcccaacatatgaaacaatgtagaaaaagagttactatcctctcaatccttcttaccaaacataatgctacagtgcaagaaaaattagctgattcttcagtatccatttatcgatctcctcaaactattcctatccaacctttccattgtcctcccaacattaaacaatgtaaagaatacttatcatcctctcaaccattcttcccaaacatagtgctacaggtacaagaaaaattagctgatttcttaagtcttcctttatccatctcctaaaattcctctccataacaaaatcaacaaagatcaattgcatgataaaaagctttctaagaatgaatttttaaattgattccctgtttatagaagaatttacaataatttcgccactcataaaatacaagaatgacatctgaaatctccttgactgctgtacaccttccttccaagattcaaattttgctcacctaaattaatcatccacttctgaccacctagcattcttcactttttatgaccactaacagcattgtcgtatcttaataatgttagtaaacaacctctcttgatcatgtccaactttcaatttgctattcttaccaaaaccatgttagtataacaatctatttcaattataatgcacttcttattcccattagtcatcccctacccccaccaataaaccaaagcaaacaaatgtcaagaagagactcttcagagaaacagataaaaggattattgaacctgaactaaataaaaatttgtgtagaaagaatgcaatcaatgcactttgtccaataaaaagccggaaaattcactattaaaaaaaataaatataactaagcataatgaaacaaacaccaacctcactatatcatcaccgatttctggtgtgatgctaatgcttctccttctaatcctacgagcctctgatgtcgatgcaccatctgacctgtaactacaatcaacaaaatgaagtttcagaaaacaaataatttatagcaaataccaaattcaatgatgaaataaagccccaagattaacattcctccaaatacctatacagaaaaagtgaatcagacaaaaaagaacctagttaatcacttcatgcttgtgtacctgctgctaaaaacgtagcatatataatagaatttaggagtataataatcgtaatgatatgtgcaccactttttaccccaaaacactaggtgtttggtttggtggaatgtaatagtcatggttataaaaatggaataatgatagtaacgagaattgattactatgtttggtttgttgttggaataaatatagaaattaaaattgacaaaattctctctccaccttaatttttatattttaaaagagagggtagtaaaatcattttagctttatttgatccttcatgatgtacttctcattacattagctatgtaataagcattcacgtatataatgtaattatcgttacaatgttatcccattacaacactaagtgaaccaaatattgtaatgggcagtttgattccattacaacacctataacaacaaaccaaacatgcatggcgaattttcaagaaattaaattgatttaagatgtgtcccactaaattaaaacacattgtcacataggcaagtaaaaagtgtgtacatatcattactagtatgataaactatcattgtaaaagatataacaggataaaaaacacagataaagaccttgatgcagacatgtcatcagcataatctcgaaatgattttctatcaccactaagcatggacctcccacgggctcgaaaagatggatgttctggactgcaaaattataaatagattaaagtcattccaaaggtaaatccatttcaataaataactgaaatgcatcttgataagtaacatttaacttctaaaatgcattatgatcccattttgtaaagacgaatcgcatataaaatccaaaattagaaaaaaccttgaactagcagtccgctgttctgcaatgaccttcctccgactacgccgccaaaatgtagttgcaatgttaggttcgctatgagataaactgctaaattgaagaaataacttcaataaggatcataatatgtactttcagggagtataaagttaagaagaatatagaaaggtaatcacaaaaatcattatacatgaaaatgtaaaggtaaagaatgaataatattactttaatttcctgtcaatagaggtagcagatcgcagcatcatatttcgcaatgacagacctggtacatttgaatcaagccttctttgaagttgagcattttcatctttttcagcactggtgacaaaacaataactaattgttatcaactttatgaagcaaagacaaatattgactagaatcatcagtttgaatgaagtgaatcacatgtaggttcaagatatgcaaccatctaacctatcaggatcaaccctatctgagaacccatatagaggactatttggttccattggtgaatcacaagagtcattttcagcagaatcactttccccagctgcagaaatatggctcatgaaaattgcctttgttgaccggcgcagaagctggcccggaaaccgcatgagatcaaccaagtattcaacagaattcaattcaactatgacagacatatgcttgtatgagtctgaatactcaacaaccccatcactaggcaaaccctgataaaaacataaccttcaaatattagctaaaattatcagcaattaatcacacagggcaaatttgttttcctcaaactgtagtcaaagttgcactgatacgtgataatacacaaaagccaataaaacaaggaaaaaaaaagtaataccccacctcaccaaacaaagtttaaactcaccacaatgatcgtactttcaagttctacagtatccgctaagactttaaataaaattgcccgaggacggcatgaaccatgctttatttgccccaacagctgcagaccacgattctcaaacatatgggaggtgtcttctagtgcagcttttgctggactttctaaatttggtcgtttatagaaatcagaaaccttcacataaaaacaagcaaaacagaattttaagtaattcttccttagtaagttttcagaaaaatgcaaaagcctaaagttatctgtctggattgagaaataaaagataaaactcagctataaccaacaaaagaaacctgatgagacaaatatattggcaagtaaagtaaacatgttgtacatttatgattcaaaaaaaattgtaacaatatcccacaaacataatgcgtctttgcacaa

SEQ ID NO: 16906 - DNA, 4548 bp, Cannabis sativa
  modified_base (27)..(32): a, c, t, g, unknown or other
  modified_base (3650)..(3691): a, c, t, g, unknown or other
tctggattacattgaaatagagttttnnnnnnggcataaaacccaacaatgacctactccccttttagttgtattaatatcgagggttaatactatccacatcactacagatgggatctgctctaacacccttagaaatacaaagtatgaatcaataatggcaaaactcaagtgttgatatgatgctcgtgtaagcgtgtgagagaggaagtgaggaagagagaatctgtcagacttagactatagcttagaggcaggtttcatgcttagattcaacttaggtttctaggctagggttaaggactttatatagcgggactaaaaccctatattactgtttaaatccctagatatttgcatagtttgttggataattataaaagactaaaatacccttgattctatatattattcagccattctgttagacttttagggcccaatttgtagcccatgagttgttttccacgtgtagaagtgcataggcaaccctgtaaagcacctcctggctagccaggcccctgtggagggcaggctggccgcccacggccaactcctgtgagagagctagtctatcacttgatgcctatttgagtgtcggggtctccgttttcttaggtactaaattcgcattcttattgattagttgtactgccacgtcgcactgattttatccatgtaagcatgccatgtcaagaggacaagaatccagataacaaagtttttggaaaattgtcttctaacacaaaatttataggaaaatggggagattgaattcattgatataaaataaaaaaaaatgatgaatataattaatgttaggaagagaagggataattagcgtaaaatgtaagagtattgggaaaaataaatatttttttagatggaaaagtattgaaaaaagtaagataaaaataatttaggaatgtttatttaggtgagaaagattgggagaagtaaaggagtttttatgtgcaaagtgttggagaaaaatatgtattttttgtatttgtgagtgtaatttttgaatagaatttaacaaaataatacctctatttttttcctcttaatttttcttcttaccaggggacacatggttgaggttggttgcatagggggctaacgggcgatggcacgatctagttcgttggtggaaggagttgatgtcgatggttgggaccacaaggagacaagtagcgagctgggtgcttccttcggggatcccacgcagtgttggcatgcagtagaaagggcagtgcaacctgcttttgtcagggtgtgctacacgcacacatgggagccgcacgtcagatgacagactacccagatggatgccttccactgtgcataagtgggccttgttttgcgccgatctgattttcttctgaaatttacattttttggctactttcttcaatatttctctacataatcctaattttctccaccaaatacacctaaaaattcataaaagtaaaataaaattaaaaataaataacgcacaacatattataacaaaataattatagaaacacacaaaaattataaaattacaataaaactaataacttcaaaaataattaaaaactcactaaatcaattaaaaactcaagaactaaactaatttagcttaataaaaatgttataaaataactctactcaataatgacaagagatcaagtttgagattgttctaagtatatgcttaatgaaggcaacctaaggcttactcaactatatacattcttatcataatatcttttacaagtttattggattggtacttgagttgtcatgcttaaggtaccaatgatgtgttagccatcaacaaactaacattttgacatataatatttggtttagtgatatggattggacaggctgcatgaatgataaagttcatttttaagcatttatatcaagattctaagaggaactattttgtaattaagtgtcatatgaacacataaaacctcctctctcgtacatgtcattataatggtatggagagttatatgtgattagtattctatggatatttgcagcttcctcatttgtagaggtagtgtgtgcgtaagatgatgacatatatttgtttgtacattctagttgtaatattttgtttttaagaattatgaatttactaaacttatgtgataaacatcaaaatcatatatttctctcaggacttagagagtcttgttattccattggtaaggatgatatgccacttgtagtgagaaagatgtgtagacctctattggtatcataacaagtacttacagacaacatctcactgactacactgagataacttactagaatatgtttacttaggatacatttcttgtttggattgttggaacccaaagatgatttttccagtgggagtcattattttaaaatatgttagacattttaaggatttctatttgttgttgaatacatgcatattttggataactctttgatgttgttgtccacacttattattgcgagctaatggcttagtctcggtgctatgttcaagtggatccagattagtagttatcatcatttttaataaatctcatatgtctcactatgtaccatatttgtatcttgtcaatacaatatgatacacaattagttttataaacgtttgtatttcttgagatttctctgtgttgacactattgcatagtgaaagcatatatatgtgtaattatattgtccaaatgtgagaatattaaaatattttatgtggactaacataattaagtgtatctcactcagtgtcaatattagcatataatgataattgtataatcataaatgcatggtattaccatcaagtaataatgggatagacataatgtactaacatgctcggggcccatagacacgctctaaaaaatatttttggacaatccattaggccaagacaattaattctctcacattaggcatgtaagcccaattacccataattcctcataaaaggggttattctcttgattggtgatgaaggtggaatgagtgtggctatggtgtagagagaatgaaagagtagtgttcactatacaagaactcacttatttttgtctatatgtgtagatcaaagaagtgtaatcaatatagtcatcggagaacaaaataaagaattgaggtatgttcattattatgaaaatgctctgtaattaaatgtttgatcttggatactgttaatcaatattgattgttaattattactgttgtcgtaatttgtggccaaactccttgaactatagagtttggcatgatcaacccccaagacttaaattttgggggtagaactccccaaactataaaattatttttactctctacttttctgttagtttttggctattaattaaatgacaaatagacctgtcattaagtagacaagtgtgcatgtggcatgattccattggtccacgtaatattaataatttataaatttttataaaataaataaaaaataatttagaaaataatttaaatttaaatattttttcctttttttcctttttttcctttttctttcttttttaccctttttccattttttctttttcttttcttcttttccttcttcttattcttcgtggaacaaacgcaggtgcccttttcttcttcttcttcttctnnnnnnnnnnnnnnnnnnnnnnnnnnnnnnnnnnnnnnnnnntcttcttcttcttcttcgtttccttcaccacctttttgtagttttctcctcaactctcacagacccaagacactccgaaactagtccgacaaataccctctcagctttgccaatgctctcatggcccgaagctctgccaaccctctcagctctgccaacatagcttgtccaccttaggctccacgacgatgccacccaggataagtctttggccttgttagtcacagcaaggaacagaattggagtctctgtgctctaggtctaaacataatcatttgatgaaatcttcgttgcaatcaacggttgatcgagatgtcagagcaagtcacgacgaggctagcgagaactaggttgaagaagatttggctccaatatttgtaattttatatccaaaattgattgtgagtttttgtttctatttaggggtttagatttgtgatttcagaatgaaatcgatttatatagttatccaattttagatttgtgatttgcgatttctattttaggggttttttcttatttttgttaatttagtttaataatggtggtgtttgtagcagtgcgatggtgttagtggtggaagcagtgatgtggcagtagtggtggtggtaacaattggttggtggtggtggtggcggtgatgtggcggcagtagtggtggtaatagtttggttgggggatagtgtaatggatgtagtggtaacactcagggcctgccctaggctaagggaggctagacccacttctattcggggcccaaatgaaaaaaaaaaacttttaataaatatatattttttaataatttttaaaaataccatttatttttgggtaaatggcggcaaaacccccaatacttt

SEQ ID NO: 16907 - DNA, 7683 bp, Cannabis sativa
ttaaatttatttcagaactggaagatcaaaattatttggggaagtcgaggcacatggatgacattgcagatagtccaacagacacgagtgcataagactcaaagaattatattgatggcaggactgcttgatttcaagattcttcattttgaggatgttgacaagagtcatagtgcccgataaaacataccctaaatttgagaagtttatgaaggcgcttagcgattctgagaaacggggcttaatttaactttatgaggaggaccattttcttggaagattgcttaatttttctattggcgtggctcttcatgaatatgctctattttttttttaatattttgcaggtctcttggaatagattggataaatgtctgtgggctggatagttatgtatttcaaggatgttctgctttcatctgcaatgaaccaatgcatggttgtagtgagcttcttttactaattgatgtatgttggaaataaacttaatcattttgacataatttgtgttacttaaaggatgttaagattttgctctttgcataagatgatctcattttttttccctgatttgctaaaaaatctttgctttagaaagaatgaatatctgatctaggcaagttaacacagaaaactcgaagaaaagcatgtttcatgttgtaataagctggacatgaatatctggtccggttatgtctgcatttttttcccacttccttttcattgttttttcttctatttgttttggttgagtatctgttgttggcttctttgatatggttgatatttggtccacttctgtgtacatttgatggagtgttgggcctgttatgtcccaaacacatgcaggttcatacatggtgtgatttctttggagctttgtgagattcattttggcagagttgatttttgttgtgatgtaaatgaaaggtatgcagtaacagatttaatagttttgcaaggagagcatgtgataatgctactgataagtaaatgtccaaggactaggttatgggggggtgttgttgattgtcttttcaaatgcatattagtaagtatgttgatagatgctgtaccttactcaatccgccatcttttttttttttcttttttcttttttttttggttttcctttttgtcttccctcctttcccagaaactttatcttggttaggtaacgccatgcgtaaagtcaagtgaaaatcaggttttgccgggagggattgcaccatgatgagtttgagcagacgggctgattcactttttgttcttttgcttaaatggatgttgattataaacaggtaacttttctcaaccattgagttgagttccatttctagatataaactcggtcatatcggggggttggtataactgtaccagatactagaaaatttctgtttgaaacaagtattatacttatatatagtttgggatgcttcttgcatcttttcagaattcgatttgcagtaaatttagagtggaaacacataaaagagtatcccttttgtcatggttaccaatctcctagatcaacagatataccttctgctgtgttttttttatcgaaactaggattaccgttgaatcctacaatactagaggacttaaatacccagaaaagactcgaacctttgacattgtgaccatttgagttaccttttgctgattaggctactagtgaagatagatagtgttctttgtcttccatgtcctattattgtacttggggtagtaatacatgcttagtaacatttttctctacttgacattaatatgtgtacccaaaatatgcaccgaaatattacttacagtttcttcaaccaatcacatttatctaaactaggacccgactgtttgaaaaaccacgtcatacattttgagtgcacatatcattactttctaacccgttttcttttttcttttttatgtttttttccccctttctttcatttatgtcttattttcttggtaggatgtttgatgatatgagaaaacgtcagtgaggctcttgaagtggacatattataaaatggccttctcttatttcctattcttttattagctttttcttttggcatttagatttattaattaacatcatcatagtgttttgctgttgttttttcattactgtttaataaattaaattatcaatggtttaataagattgcaaattttcttttctacttggaaaatttctttccaattctcccattgaaaggctgtataccaattttatttcacaaaattataccaattttattattacctgttatagtgtcaaaatttaaacattaacttttctttttgggtattgctcacatgtttttcctatatatagataatataaactatatttaattaagaaaaatccagtacatgtttgtttctctaatataaaaatgtacccctttgaagccatgtttttaactttttattgatttttcatttattttgtttaatttaatatgttattagttcaaagtaatgttcataagttaaggtgttacctttttaaggagatcaaacagtaaaagaatttttttaagaaggccaattacagattttccaaagaaatttggggattattctaagtaaataaaataaataaatagtaagattttttttttttttttttcaaaattttgaaggggccaccatctgtttctatggctccacaatcacatccctaacctatattcttggaactgtcttttaggtttggattgagctgggatctttttatattattattattattattattgaatttgaagtggattgatagtggcatgtttggttgttttatcgagaattgtaatgaaatgaaattacccccattagagtgtttgcttttaaaagtgatgaaatggtctcatagtcgtattatattaataataaataatactttgtttaaataaaataatatattatattaattattacgattaaattttttaatacaatgtaagttgaaaccacagtttaaaattttttttccttttaagtacatcgctttaagcaccttgcaatagagagattgacttatattcaggatgttccactcccacttagttaagaaggtttggttcatttcactatatttcttgaaccctaaatcccctaaggatttcggaaggcacattttgtcccacgctttgaggtagatctcgtggttttctttttcaaactcccaccaaaagtcacgcaccatactatcaattttggaggccattcgattaaacataatattatattaaaatatacttatacaatacaattcagcatatcaaatgagctcttaatgtaataaggattactttacagaatactaaataaaataaaggagttttaattgtacttcaaaaatttataaataataatctttattttatataaaaataaaaagatattttaatattatgataaaaacaattattttaaaaaaatatttgaattttttttttaaaaaaattaaaaattatacatgtttttaaaaaatatatatatgaatttttttttgtagaaatattgacattaattcaaaataatgtgagtttttttctaatatattaagaatgatttttaaaaattattttaagtttattttattattattatgtatattagggtatatatatcattttgtggggtgtaagtgcaaataaaacttcccataaagatgattctaatagttttttttttttttttttataataatatagaatctaagtagaataattttgttaatttatcactaatttcaataataaattaaacattataattaatttctattactatttttattccattaccaatatcgtttattacattccaactaaccaacatcacttggaataatgcttaggaatttaacaattaattttaaagttggaatgatgcttagaaaaagaaaaagaaattattattcaaaaaattgtttaaattggagtgaaattatatgtagcataagaaacatataataatgtgaaaataattatatatatcctagtggaatataccttattctatttctaaggaatcattatctaaaaaaaaatgataaacttgcatctaaaaattcatagaatatttttgtgttctattttgctaatattatatactgagaatataatcaataatattgctgttttttttttaacctagcaaacaagtggactccacaaaatatgtcaattatttttgttaaaaaaaaagacaaaaggattaaaatagaagtgagctagaatcacccaacatgtaaaagtaaaatagtaatattttttggtcccttctcacaaaatatgttcttaaagttaaagctatgattagttggtagagagagggaacaaagatattataaagattaaataaaagatgaaaaaaagatatatagtaataaagtaaatttgtttcaatcaataatatgtaaaagcaatttaataattacattttcagaagagaattatttgtggtataaatatttaagtttaatttttgacggtaacaatacttttatatttctagaatttccgtaggtacctggttgttaagtttcaagtcaatggccacatgacaattcttgattggtctttgccataaaaattttatttttatttaaaaattaattaaaatatactaatcaaaaactgacatgtggataatgacttgacacttaatgattgagtacttatagaaattttagaaatataacttaagtattattatcgttaaaaattaaatttaaatatttatctgcaaccgaaagttaaatttaaataattttttatcataaattattttaaagaagatgaactaattgagtttatatacatagccccattcaatatttcctatggatttttcttcttctctttcttttattctcttccatacatgatcaaaaaatatatattgagtatatatacatagcaaataaatatataaaaatcattaataaatatttaatttctataaaatttgatgcagtcttttatgtttgtctttattttcagtttaatttattagaagggttgcatgtttcagacctgaatcttctaagtcagtttctatgaaataataaatgatttatttcagattggatttttatttttccaacctgaaaaaataaataaaataaaaaaacctacactatgtgacatattttctcagcaatataaaaataaatattgaaatctttatctttattccttgcatgcattatttgggtatctaatattatattttaatatatgcttctactacctaaagggttctagtgatatatttcctatatgtttcgacatttagaagaatttttaggtctaattttttatatggtcgtttacgttgtaattatttgagatattttgtaaaattttaagaaattttttaaaaaaaattaacacaccaaaaatagagttcaaacatctatttttacacgctgataaaataaaagagtctctcgtgcaataaattgtttgaaccctatttttagtatgataaatttatctgaatctcttaaaattttacagtttatcttaaataattacaacgtagacgagcataaaaaaattaaactaaaaaattctctcaaataccgagtgcatcgatgaaccctttttaaagggtgtgtaattgtagaattgttttaatattttataggtctatattattatatttcaattcatattattatttttacttggagaaatatctatatgaaatttaaaattaaaagtatatgcattaaccaaaatgaaaaagaccctcgtacccatccaaacaagtaggagacaataattgaaaatagcatgatgatatttgatatgtttaattaaataaagtataatttaaatttgttttgttagctcctaaactaaaattaacttaataaatatatgcatggtttatcaagtccagcttaaatctttttattaatttattcatttgaaaaaaaataatgcatctatgatgattagttttatgaataattgtaatgaagaagaaaaatattctaattaaatgattcttgatcaagactttattttttgaagatgttagcaaacattaacttgtgacaaataaaaggatattatgtacttaaaaagatttttggcccttcacaagcacaaaggttcatctaatataaatattaggtgtgatacttagtattcataaattgtatttgtattgtattatgttgagacttagatattataataaatattaaactcaaacctaacttattttttaatcgtatcaaaaaattaaactcaaactccagtcatttataaacagattgacctgatcagacctatttatataaaaaaaatcatgtttgattttgataaacttattaatatattaataagagtttaacatgtttacaacccttttattacacatttatcaataatttaatatatttatatcttatttaacaaaataaataaataatatttacatgtcgtaaatataagtgtatagttttaaataaatcattatagtgtcatttttgttgttgttaggcaaatcaatttgaaaatgataaacctatttattctatatagattcaggttccgagctgtgttatgcgttttgtccattttttccaccattttaaatacattacaaaattttccaacaattagtcattattcattagtattaaactaatcaaatgtattttgtgattaattattaaatattcattgagttactttcaaagttgtacatatttttgtttttatgttatatgtaattaaaacaaaatgtgattggtatcaagaatttttatatattttatttgcctatttaaaataaacatgtttttttcccctagattttttataaatatttaaacatgttaaataaggtttgtcttgaacttaataaatacatattttttaaaaactaaggttgtatgaatctttatctttatgaattaatttaaggctgctaaatcaaaaccatgtccaatattgccatcaatattaacattattataatttataagagtattggacggccctagccaatgctctatttcacaagattaatgttctaagtatcaatattatagagttgtgaactaatttaaaaaattagggtttgtctcgtttttaaatttatagttatttttttctcagtgcaatttgattagggctgtgttttattattgcgatttgatttttgctactgtgattagtcttgtctctgtgatatgattttgagtgttttattagtcttgtctgtgtgacatggttttattttgtttttgtttcgttattggttctttgatgattcacattcaaattgctattagtggttgtgaataacaagttgtctgcaatggattgttagtagtgtagttacgtaccttgcacaatagtttagtactcaagctacaagtttggatgaatctgctgcaacagtttttactgaaactgaatatagatattcttatgattaactgtgatgatataatctttttaatctatttttctgtcaaaaaatccgagaattaaacgactgattatttcactcgtttttctagttctaatcatgatcgcgtctccaacaaaagcgatgacttaattagatttcaaactattattttaactaatcactattaataaaatttcacgatttattaaaaaaaccaaaaaaaaaaaa

SEQ ID NO: 16908 - DNA, 5675 bp, Cannabis sativa
gtgactcttttagttaaggtaggtgccgaaatgagttttaaaatccttaagacctttttgcccaattctctatatacgtatgagttttccgttaatattaaactcaaattagatggagtggaataaattaggtgataaaaaaaatgatctttgggtactaaggtgttctaactctaatggtcactctttaattaatactttgttgactacacgtgtcaaactattctcctctgttacaattaaaatcaaacttaaacaacacttaccacgttctctctatttttttatgttgatgattcatcaaatgaaaatttgaaaatttaatttaaatattttattgtgacaggggtgtattgtatatatacgttaaactccatggatttctcgctcaagaaatcgttgaagtcacaaggctcttatattaaacatacgaagaaaatctccgcaggtggaggtatccaaaccagtcacgaacaactgcctattctctcacatcaagacatagacattgtcgaagatcgacgtcacccccatattacgagccagatgaaggagagttctactactgaccggagtgaggtcattgtaaaaatcgacgaaggtggtgattccgccgctgccaccggtggcggtgacccttctaaaaatgctgcgaatgggaagtattggcgggaaactagctatgatgtgtggaaagacccggttggaggtggaggttgtgtgcaggacggcggcggagagagtactgatggtgggactagacagagttttaattttgttcaaggtaataagcagcaacatcagcaggggatggatgatcctccgtcgaagttgattgggcagtttttacataagcagagagcttcaggagacatgtcattagatatggatttggagatggaggagcttcgtagtaaccaccatgatcgggatttgtcgcctttggcagagtctccgatgaatgtttggcagtcaagggagttgaaggtgtcgtttgatcctccctcgatgtcgacggatgccttagatggatctcagggcactgagtcgatgcggcgacggtataaggagtcgccggacgacgaggggagtcgaggacaacatgagcaaccaaatcatgatgaggaagaggttgtgaggtgtacatcaaacgcatcgtttcagcgcgacatttcatttcaaagtgggtctagtttgttacgggtaaggacaaagtccaggcttttggacccgcccgatgaccctgatagacgatcggatcgggtttcaaagtctgggcagattcctaagtcgggtcagaaatccgggttggcaccgaagtcgggtcatgtgaaatctggtattttggggaaggctaatggggaggaggaagaagatgacccattttttgatgaggacatacccgatgaattcactaggtcgaatcttaatgccttaactctggttcaatgggctagtttggttttgaacattgcggcattggcttgtacgctttcagtcccacatttgagaaagaaaaacttgtggaagttgaagctatggaaatgggaggtcttggttgcggttctgatttgtgggaggttggtctcgggttggggaattcggattgtggtcttcttcattgaaaggaattttcttttacgtaaaagggttctgtattttgtttatggtattagaaaagctgttcagaattgtttatggctgggccttgttttgattgcttggcactttttgttcgacaagaaagttgagagagagactagaagtgtgggtctcaaatatgtgacgaaagtattggtttgtttcttggtgggtacattgctttggttggtgaagaccctcatagtaaaagttcttgcttcttcattccatgttagtaccttctttgatagaattcaggactcgcttttcaaccagtttgtgattgaaacgctttcgggtccaccgttgattgagatttgcaaagcagaggaagaggatgagaggctcgccgatgacgttcagaagctccagaatgctggggctactataccacctgaccttaaggatgcagctttctcatctgggtttcctcctccgagaacgagtcgagtcattgggagtggagggttgtcgaagccaaagaatagtgccaaactctctcgggtacttagcaaggattcagaggagggcataacaattgatcacttgcataagttgaatcccaagaatgtgtctgcctggaatatgaaaaggcttatgagaatggtgcgaaatggcgctcttactacgcttgatgagcagataatggattccactcatgatgatgagtctgctacgcagattcggagtgaagttgaagccaaggctgccgccaagaaaatatttcacaatgtagccaggcgaggctccaagtaagtttcttatttcattaacctttttttcatgtttttttgtatcaatttttgacatttgattctactcctttaatgttgcttggtttggtagtcacgttgttgaaagagaggacacctgaattggttcccatggttgaatcacctcactctagattgtagaatgtttctgaatttatgcaatcataaatgaattttctttctcacattctctcgtgtataaataatggattcatgcaattcaagttcagttgaattacatatttaaattatcaaaagaaaaatgctacacataattattattagacatctaaaaggatgtgatgcatgcaatatcgacagaaaataataataagcattttgtttcttagtgattcgatcgagtttcatacaattacaaatgattcgttatatatttcattcttttggcgtgtaaggtcattttctcaatttagaaatatcattttctcttgtcaactcaatctggtcatgtccttaatttcactttcacagactaatagctctctatagttaccttttgttacatcctcgtgaacccccctcaaggaattcacgtttgttttattgatctattatgtcgcacaagttaacaaccctccaaaagcttgaaagattcaaaccttttacaagacaacatgtcaataatctccctccaactccaacccactaaaactccctgttttatttttattctcacttcgttacaatggggagctcttttagttttgttgaatgaagagtgattttatgtgagctgattatatcaaataattcatttagcctttatttctttttccttttctaattaactattttctcatcctaacaaattttatgatttactattttattgccaggtttatctaccttgaggaatgcgtttcatgcgagaagatgaggctcacaagaccatgagtctctttgaaggggcagctgagacacagagaattagcaaatcttctttgaaaaactgggtggtaagaatgaaactctaacttcttatcttaatttctcattttattatgtttggctagaattaagcacacatgcacacaagaacttgcagatagcatggtattattaagttcattttctggtcaacgttgctgatatatatatattcttaataccaactttggtgttttaatgcaccaaatgagagcttgtattctattgtttagtatcaagcatttgttcaaaaagttactttttattcaggttaatgcattcagggaacggagagcacttgccttgacactaaatgacaccaaaactgctgtaaacaaacttcatcatatggtaaacataatagttgctatcgttataggagtcatatggcttcttctattaggaattgccacgaccaagtttctacttttcgtcagttcgcaactagtacttgtggcatttgtttttggaaacacttgcaagacagtttttgaagccatcgttttcttatttgtgatgcacccttttgatgttggagatcgatgtgaaatcgatggagttcaggtgacattttatcttgttaaaagtttatattttgtgctacctcccttgtattttcgtaggccttattgtgttttttttcctacaactttcagatggttgtagaagaaatgaacatcttaactacagtttttctaaggtatgacaacactaagataatattccccaatagtactcttgccacaaaggccatcaacaacttataccgtagtccagacacgggagacggtattgaattctgcatccacgtagctactccaccggataagattgcggctgtaaaacagagaataacacagtatgacaaacaattttgctctttacttttgattatttatgttataaagatatgcatttatgattataaacactcctttcttttactacttttgttacagttatgttgagagcaaggtggagcactggtatcctgcacaccaatgattataatgaaggaaattgaagaactaaacagggtaagaatggctgtttggttgtgccataaaatgaaccaccaagacatgggtgaaaggtattcaaggagatctcttttgatagaagagatggttaaggcattccgggaacttgacatgcaatatcgccttcttccaatcgacattaatgtcagcgccatgccaactatgacctctactcggcttcccaatagttggactgcaactacaagctgagaaaataaagaagactacctaacaataacttgataaccattgagccaaggaaagggattgagccccggaggcttaatgtgtaggacttgtgttgataatgaagaggactagaattttatgtagagaattgtgttgttttggttggttgagttttagagtttagaggaatcacaaattagtgacttctattgcaaagagaattttagctagtttgttttgtttactttttttttgggtgtcttgttagtttataaaataatatcaatttaacgattttgtataaatggatgcaaatttatatataataggaccaagaacttcaataacttgctccttaaaaatcaaattgatatgtttcctctcaaaagttgaattaattatttccaattggtgcttttttgcatgtacgtaaaaattagaatacaataaataaataaataaatgcaaaacacattttatttataaacataagtttttattaatttgagttcaacctatattatgaaaataattttttaattataattcttttgttttaagaaaattttgtaaagtcctcctaaaacccaacaatcaaaaaattttaaatctctccttcaaaaaaaaaaaaaaaaaaaaattaaatctccacaactaaatttgtattattgctctaaacttttttccttatattgattctaatcttagaaaaggaaataccgtatctaaacacttagttttttcgatcttgataatttctttgagttcttgaactctaatttgaaatctattaatctttctttaattttaagttgtgttatttgtcgctactaataatggatgaaggatctttaattttttctctaaaattcatgacacaagatcttgtgtgacccgatcgattcgatggttcaaattttgtgagatggcaagataagatcaagttctacttacagcattgaaagtttcctacatcttagataaagatttatcaattttagaaccataaaaggaagtagaatccatagcagttacaagcacaaggaagaaattcgaagaagatgaactcatatgtcgtgaacat

SEQ ID NO: 16909 - DNA, 9112 bp, Cannabis sativa
tagtcccatacttacacaatctcagaatcatcacatttgaccttccccaggcggtgtgagattgcacaacggtatttctccttacggatcacgggactactgactatcacacatatatttacacattttaaatgaaaaatattaagtactatctctcgttaattcttataaagatactgacgatgctgtgtaactaaaactgttataaatgcatgcatttaaaaaataataaatattagctatatttaaatcagtatttttcttactttgcggaaaagaaaattcagtatttatttatttttcgaagaaagcatcttttaataattagtattgaataagcgtaatattagatatacataagtatcagtttctacatatataagtactgctccctattaaattaattaattagattcgattgattttgacatgctcatcaaaacaaagaattgacttcttgattaataagtctatattagactcccacttaaaaagatgttttgataaatcatttctgattatatatatgtctgtagttatttactatcttttataaatttataattttttttaaaataatttatagtatcaaaataaagttataatatttggttaagtcttaatggtaatactagattggtctcacacgttattcttcttctttgttgtgtagagtttgattgtgtagctttggtttatgctttttaatagcgctctcccttttgtaatgagctagtttttttttttttaaaaattatttttgctaatttgctttttaattttcttgaggcattcctagtttatgtccgtttctcataaattagtagtgcatgtaattaggtgaatgataatttagctttgattgatgattatccttcttttatttttgatatgtaataaactttggttcttattaataaaaatttaattacaaaaaaaaaatatatatttggttaaatgccttcctatatttttttataccactcgtaaataactagttagaacttcattttcaatactatataatattctgttaaataactttaaacacaatcttaaagaattataaactaaaaagtttttctaagtatcaaaaaaaaaaaaaaaagaattgttagcgaataaacacttcttactattaacattttctaattttaactcattaattatatacctatatgtatacaatctcaacaattttgtcttattaaatttaagaactacaataataattacaacaatttatatatttcgtttgctttcgatggcaattaatatgattttataaattaagaacaatattaatcacacggtctatgatcagttgaattcaacttcatatataataataagtgtagctagccaagcacttaattaattattgtactagtagctgtctaaatatggtggtggaagaaggtttggcacatataccctaagcccatgtattgatgcaacaaaaaattattttctagggtcatatttgtaaatttgtataatatacaaagaataggggattattaagctaacgaggtttaatacgtacacagaaaacccaaatgattcaaaataaaatggatacttacatattaattaaaaaaattagagaaagagaaatgacatgcatgggggtataattaattaatgatcgatggatatagtgggattaattatcgatggatatagtgcgatagtgacccatgcaattaaaacaataatttactcgtttaactcttttatttgacaagactatcatcatataactcttttaactgaatgtaactatattaaattataaaacttttctagcttaaaagaatgtggagggaagcatgattcattgatcaaccattaagaatgaaagaatgaatacaaacagaggcggacccacgtagaggcgaggtggggcagtcgcccaccctgaaaaaaaatataataatttttggcaaccaaactttattaataactactaagaagatatatttaagtaaagtatgagccactatattaattaatctatgacaataagaaaaactagctagcataatgagtgaattacgaggataattttagctaagtcgtcatgctgaaatctatttacatcctcttctccatagcaattattctcaactatgagatttgatgaaggccagagattcctcaagactacttttcttaacggaaaaacttcacgaagcaaattatatggagctacctgaaggatacattgttctggggcaagaaaagaatgtttgaaaactgaacaggtttatttatgtacttaagcaagctttcttgtaacaccctactaatttaggcatactatcgtgatttagatttattgtgcactcctttgctattcaaagagtttaataaaaaaatatcaatactacatatataaatactttaatcttaaatatataaatactttacataattcggcatctcgttttaaagttacaaccgttttcaaaatactatagttacaataattgtcgcctagcgactatcaaaataaagcttgctgtcctgaagatttgaacactccaggtctaaccgtctcaatatagcttgagctcactactatttaacctttactttgcctttacctacacatataaataatatctatgagttaatagactcagtaagaaaagcacaaacataatataaacataaactatattttaactaggcgcccatacacctaattacaatcatattccgcatcccacgcgtagtaagtttgaaacatttgtacgaaaaagcgtagcatatatctgttgatatctcggtgcaactctatgtacacttcaccaatatcctgatatgataatctaatggctactggtatgcctagcatatatctactgatatcttggtgtaactttatgtacacctcaccgataccctgatatgttattctaatggcaactggcatgcacgctaaacatgtattcatatatgcaattattatactaatcttaccttgattctgaattcatgtgtaccgatctgagtggaaactactgctcgataattcacaagcccctaagtcacaacatacgtaaaccattgtataagtgatacactaaatcactttttgaggacataaattttaaattaaaagtttttctattgataaatggcgtagaaataccctaaatatcaagaaaacactaaaaaatgagatttcgagaaaaacactccaaaaaatggcatgccattttttcttggtgctaactgctaaaaatattaggctgactctggaaaaagtttaaagaacctcatttctcctagagttctacccaaatcatctataattgtttaaaacacgtaattaggccatataccacataattcaataggaatttacatcatcaaagcattgaaccaaaattttccattgaaggaccaagcttaagcttgtaaactcaaacttttctcgatcacaattacaaccatcaaacctaacataaaacaatatgaatagcttaataacaacaccagaaacaagtacttaagcatcactaacccgaacagctgctcaaaccaatctttgcatggtaacctagttcataaacttgaaaatcacaaagaggaaaggacttaccttggcttagccatcaaaaatcttgatttctagactaaacctcttccaaattttggtatgaaaaatggaaaacccctagtttttctttcttctttgtgggccgacaatgagagcaaaagaaggagataaaggtgtttggtttcttaattaatttggataagtccaataaaattttagctttaataataactaatacagcttaaaaatattaataataattcccacttacttaaactaaggccaacatgacaataacgtcattattttaccaagaagtaatataattaatcaggggtaacatagtctaaactataaccccaaaataacctgacattataaatgtctagcaatattgccctgctaattctaagatactataccatatctaagtgactcttagactgaacgtcgcattctactgttactgggtataaaatatgaaaaacataaaattttatatataatgtaattaatacacctataatttaaatgtatctccataattgcaataataatttaaagcatatttctgacaataaaccctaattatctgctaattctcaacgtaaagctaagcgatcattacaattattcccccgttaaaaggatttcatccttaaaatataacctgaataacttcggatactgagccctcatgtcagactctaatttccatgtggcttcctcaaccttcttcagagtactatgaccaatgctatggtcttattcttaaggaccttatcttttctgttaattatctgcactggttgctcctcatatgataaatttcgttggagatctagggtttcataactcagaacacgtgttagatccgagatgtttttttcttaacatagatatatgaaatatgttatgtgttgtagacaaagctggaggcaaggctagacggtaagctaccaatccgaccttctcaagaatttcaaaaggctccataaatctagggcataactttccccttttccaaaatatttaactcctttcattagagatatccataggaagacatgacctcctacctgaaattctatatttctgcgtttcgagtttgcataactcttctgcctactctaagaggcaagtattatttcttaatcttctctacagcctcattggtccgctgaaatggttctgaacatagatgtcttatttctctgatttcatcccagtgaattagagatctacatttcctaccataaaacatctcatatggagccatctctattgtactctgatagctattgttgtatgaaaactctataagtgagatacttactcaaggagccttcaaaatccatcacacatgctcgtaacatatcttctaatatctgaattatccttttggactaaccatctgtttgaggatgaaagttgtactgaactttagcttggagcttatggcacgctggatactttcccaaaacttaaaggtgaacttcgaatccctatccaaaaaatggacttcagagccccatgaagtcatactatttcttttacataatgtacttcatactgatctactgaatatgttgatttcataggaaggaggtgtgctgacttagtaaaccgatctacaactatccatatggaatcaaacacactcgtgattctgggtaatccaaccataaaatctatggtaacatcctcccactttcactcaggaagtgtcaaaggctgcaacaaccctacaggtctttgatgttcaaacataatctgttgacatgttaagcatttggtaacatattccaccacatccttcttcatacatcaccaccagtagtaggattttaaatcatggtatattttggtagtactgggatgtaatgaatagggagtggcatgagattcatcaagaatctcctttctaagctcaatactacttggactgcaaactcaggttttataaagtaacattccattactcgacattgtgaaatctttagcttggctagctaaaacttcttcttggatcttcactgattctagataaaccaattgagcatttttaatcctctctaacaagtctgattctagtgtcaaattgtacttgatttgatcatgtcatctgccaactaagatgagatcacaattgtgttgaatacttgctcgggacctttcctgcttagggcatctgccactgtattggccttcccaagatgatagagaatttcacaataataatctttaactaactccaacaaccgcctttatctcatatttaaatctttttgagtaaagaaatatttgagactcttgtggtcggtataaatttcacacttttctctgtagagatagtggcgccaaatcttcaatgcaaagaccacaacagtaagctctaaatcatgagttgggtatcactgctcatactccttcaactaaagagtagaataagaaataagccaatctacttacatcagaacgcatcccaaacacgaacttctcttgatctgacaataatgctaacacaggaattgtgatcaatcactgcattacctctgggaaacttacttcacacttgtccgtccatacaaactactgattctttttagttaattatgttaagggcagtgagatcttggaatacccttctacaaattggcggtaatacccagctaaacccaaaagacttctgacttcagtgattgttttcagtgttggccaatccctgatggatttgatatttccttgatcaaccatgatccctttcttactaaaaatgtgccctaaaaaggacactcaggatagccaaaattttcacttcttaaatttggcgtaaagcttaagttctctttgtcattacagaacaatctgtagatgctattcatgctccatttatgattgggagtacaacaggatatcattgataaatactacgacacatatattgaggaaatcctcgaataccctattcatcaggtctataaaagctgctagagcattggttagtccaaaagacataactaagaattcgtagaggccatacctagtatgaaaggcggtctttggaatgtcttcctctcagattctcaactgatgataaccggatcaaagatcaattttagagaagactatatttccctaaagttgatcgaacaaatcatagatcctaggtagaggttacttattcttgattgccaacttgtttagttctcagtagtcaatgcacatgtgaagcgatccatctttttttcttaacgaacaacaccggagctcccagtgtgacacactgggtcgggaaaccctaagtcaagcatctcttgaagttgtatcttcatttctctgagttcagcaggagccattctatagggcgccttagaaactggtttctttctaggtgtcaatcaattacaaaatctatttctcactgtgatggtaaccttagaagttcttccagaaatacattcaagaactcttgaaccactttgatatcttcaggctgaacagattcaggccgagcaatatttaacaccattgctagaaaccctaagcatccctcctgtaacaagtctctacctttcaacaccgagatcactgggattcaagaaccctgaattgatcccacaaatatgaacgattcttcaccctcaggtagaaagatcagcatcttccacttataacaaatactagcagcttacttggagaagaaatcctaataaagtataatatcaaaatttgctaaacttagttccactaagttagtgctcaacgccatatctcaatcctaattggcatatacctaatccaccttatggggataactaatacttcgctaggcagtaggattccaaacctatttcataaccgccacacggcctatccaatttgtcaattattctagtcgccacataggaatgtgtggctccaaaatcaaataaaatagagtaaaaagagttgttgactgaaagctgacctgtcaaaactaaaggactagcttcagcattggcctcagtaagggaaaacaccctagttagagcgggctttgcttctgtcttcagttcttctttctttaattgcgcgaagtctcttttgcttagttccatggcccacttcagttgtctccctaaggattccgatatctgtagcacctaccgaagagggtggtttgttagtactttgatggcgtgggcttgaaagtaaggtctcatctttctggaagcaattagtaagaaaaatgacattttttcaatcatgggatatctagactccacgcgcagcaatcttttgctcatgtaatagatgtgccccacttaatttgtttttggattaattaataattcaaaagataaatatttatttaaatttgaatttaaaatgttgttacagataatatgattgagatattcccttaaagtaattggaagattctctccaagtgattgagagagtttctcaagtagttaaaagattccttcaatcagatattagatatttagtttaaactaaatatttaaattctaataaacatctacgacaaaaatagttacagatatttatttaaagatttgaatattattattttaatatttgcattaataaatattttatttaattaaagctttattattattttataggattgaattaatatatacatataatttagaaaacctaaaattgttaatgaaaatattatcattattcactcaaagagaattattttttctcatgtgttgaaaaaaatcaagaacacattttttgttttatcttaattagcccacaccaatccttgtgtgtggtgtaagatctgaatgatcaaggtgtgagttcatcattattgatctaggatgcaacacacaaaaagattcaaggatacttttcctgatacacttgaagcggcaaatgattccctccgtctttttattttaggtttaatttatatacatatgactcaatgataatctcataattgcttccattgacatctgatttagtaccataaaaccaaaaatattgatgctccactacagatcggtcatgtcatggatagcacaccggttgccttcgtccatatggttgtcttctgacattaggaaatctgaaaaatggacaccaagcaatgagtacccaaattaaaaaagtggcatagtgaggatatgggagagtcctcccatataacttcttggagagatccttgctggaccctatatcgaggaataatacattctcagataatagaatcgggaacacattggaaagaaataaaagaaaatatgttgttgtgtgacaccaaaaggatcttggacagaatatgcaggtcacgacagtggccccagtgaacgtcgtcagaatcctcaaaatcgaaagttatgtaggaataagaaacttgaaaatccctagcattcttaatttcctaagcatgaaaaggtcctaatgtctttagttcattaaacatacagaggaaaataaacctccataaatggcgaagcatgaaacactgatcgatagaaaaataaaggcaaccagatctcccccccccccccc

SEQ ID NO: 16910 - DNA, 5500 bp, Cannabis sativa
tggacttttttaattttacatttttacaaactagtatttctttagaggaaaaatagcattatttattatactatatttccacaataaacaactttttctagaacaacctaaaaataatagtctttatgaaaaaaaaaaatccgtaaatatgtaaaaaaataatattctacaaaaaccgtaaaaatgttactttcaatgtagttttttttattgttttcgtattatttttataaaaaacgtaaaaatgtaaaaaaataaatttaaatgtaaaaatatactttatgtaattattccaataatctttgttacttcacggtggcccaaaatcccagaagcccaataaatctcgagtcagcttaggtaaaacccggcccattgatggcccaagaaaaagcccaatcaattgagtatttcttcttcccgccaaacccttattttctcccgctaaaaaaccccgcgaaatcctttcatatatataatctcatctttttcgacccaaaaaaaaaaaaaaaatctcagacacttgaaacccttctccaaaagcttagctgaaagcaacaatggagattaacccaatttcgaagaagaggaatacgcctttctcctccttgatcaacactgccgttggcttcttaaccagaagcaataacggactctccaataatggtgctcgcccaagtgagccagaagaagtaacacgcaagctaaaaagacccagatcggctctttctgatgattgtgacgacgtgatcttgaaagatctggttaaggatctccgatctaggagagttttctcgcctaattcggtgattattggtaggaaattggaagctgagttcgattgtgagtttttggatgagggtgatttgaagaaggtcaagaatgcggaagttgtacggattacttctgtggttgaagaaaagattgcgaatggaagttctgagattatcggctctgatttgaagaccaatgtggtaaggtttttgagtttcgcgtgaagtaattctatgttcttttttctcagtttttacttattttttgaggtttttggtgttatgttattgtaaaatttgaagggagattcgaatacggaagctgctcctgagaacggattggtgaaacccttgaatgggaattctcagaatatcgactctgattcaaagaccaaaatggtaagggttttgagttttgtgtgcaattttagtaatgcattgttttgtttttgtggattaatttgaagtttttttttttttttttttttttctgaattacttatttatgaagtttttggtgttaattttataatttgaagggagatttgaatacggaagttgtacggacaacttctcttgagaacggattggagaaacctataaatggaaattctcagattatccattctgatttaaagactaaagtggtaagggattttcgttttctgtgtaatttttgtaatgcattgtttattgtgtgaattaatttgataattttcatgatttttacttatttattaggcttttgatgttaacatgggtttagatttcagttagtcatgtgtgttttccgcaaaatctgatatgggtttggattatctttgatagattattaaaccatgttctcgacggaaagtgtttaaaactccaggctcggtcagctacgggagaatgttaccatatttgatggacattactaaagaggagtcatgtaagaccatttttttactctacggttttgttcactcttatggatttgagtacataatgctttagatgttgagtggtttaagttttttttatttttgtataggcgagcttcagattgatcagcgccctaaacttgagaagggttttgaagaaaagaaactgcaaattacacaggctccccaaagtgaagaaatttctaaagatattgctgaagaaatggaagtgtcagtggaaaagactgtgcctgattgtgcccttgagtcttgcgatttgggagtttcttgtaatggtcagaccttcaccaataaggattgtcatgtgccggttgtaaatgataatattattttgacatcttctgatgatcctaagctggaagatggagtcatcgaaactgatggaaacatttcgaacgttaattcatctcttactgttgaagtctctagttctggaacagataatgtacttggtcagtattctgaggatttaagacaacttgctaatgaaggggtagaaactcttgatgtggttcaagtttctaaggatcagaagctgactcagttgaatgatcaaagaggtagagatgatggtggggttgcaaatcaactcgggcatttgaaagaagaatctatgcagatgacacctccagatgctgatatttttggtaaaacagaagttcaaggaaacgtagctaatagagatgattgtaatcggcagagcaaggagaactgtcttaagaagctatctgaagaaataaaccatagaaatggcagtatggattataattcaagacagaactccaaatgcagaggggtaagaaatgtttggaacttaatttttgctcttgtagtttgttaagtttcacatttgtatgtttgttttaaggttttttttactgtaatcattacagcattgtatgttggatttgtttctttaaaccaggttttaaagccacgttcgcaattgaagctattcaagagtccaggttcattcagctacgggagaatgcttcctttcattatggatatcgctaaagataattctggtaacttcctttaccttatctgtacaacctctctctcaagaacataattgagtaatgtaattatgtaatgtaacctttcttatgatcccatttctagatgctttcggaaatggctattccacaaaaccagagaaagacttggaacagccatcaattgcttctgacaatgaaagaacacttccagctaaatcaagaggtttggaatgtaaagagaatcagaaagttgattctgatgctccaccactgaatgtacagccaacgattgcttctgacaatcaagaaaagcttttggataagtcaaatggtttggaatgtaaagagaataacaatgttgattctgctccttcatcactggcaatactaagttctgtcaatgattcatctaatgatgaaccaaatctgacacctcccatatgcagttctgttttgaatgtagatgagattatatcgaacgtactgagtgaaatcgaaacatcccctgaccatcaaagttcaccacaggatacaacaagccagcaagttgaatcatcatgcaccagtaattgttcgtcttcatcaagagatgaacttgaaatgtcaaactctaatcagttatcagtggttgaaaccgaatgtaactcaccgaagttgggtatggttgtaaaatcagtggagtcaaatagccctagctataacactccatcaccatatcaagttggactcaaaaaaggaattctcaaaagaaatccacgaggctgcagagggctttgtacttgtttgaactgtgcttcatttagattacacgcagagagagcattcgaattctccaagaatcaaatggaagatacacaagaagtggtcttggaattagttaaagaactatcaaacttgcgaaaagtattagaggaatctgctaacattgctaatgatgatcagattgttgttcaagctagtcaagtaagctctccaacatgtaatgattttgaatattcaacttctgaatttgtaaactaaaatttctgtttcttaatcaggcaaaagaagcctgcaggaaagcagctgaagcagaacaacttgcccaaaaccgccttaccgaaatgaactatgatctcaacattcactgcaggataactgtaagtgaaacaagttcttgaatgaatggtataaatattgtaaattagtcacatagcttaacattatcctaatttcatatgttaacagagcttggaaaggccaagagttaaattcgccgaagccaaggcacagtttcccattgagcaagtattgaaacttgagcattaagaaacataaactaggtaactttagctggctgtgcattgattaagccaaatttattcatgtacattttgagaatgtgaagtctttttgatatttagaggaaatcttggttatggtggattctacattttgttcaagaacctaaaatagtataaactttctagtttattaaagaaaaggaaaagcctaatatggtgtaatggtttaaaatagttacctttgcttttggtgttttaggtacttttttttgactattgttatattatttgttcaaaatgtgtaatgtaaatttggggaagtgcttcaaatgttaattctctataaggtttttcatttttttttattcctctaaaaaaatcagaggaaattactcaattaaattttattttaatttgtatttttctattttcaatacttgtaatcaaagatactttaatatgtggtataagactcttattgtatttaataagaagaaatactataaattttaatacaatacgaatcttaaatattataatgtttggaaatggttagaagttaagatctaaggctcggagtcgacctttggggttggatccaggtctaagatttgagttcaggttcgaggtctaaaattgggtttggggttagggtttaaattagtgtttatagtaaacataacttattaatataaatttatactaaacatattattagattaaataatcttatataatatgattgaacacaatacagtgtatgaagccagtactaattttggatgatgaagcattaaagaacaatagagtgaaaagggtaaaaaagaaaatgttcttaaatgaaggtaattatttattactactacaatcattaatcataagcttgattacatttaatatgagagtggtactacaactggtaattatgttatctgacaaacttacttttattaataataaagcaagttaaacacttgaatacaattaataccataaagcaagacatttttttgagtttttttttttaaggataagtttgaaatgtttttttagatcatttatgcaactactactgataagcctcatccatactttggtttttactctaagatatttttttgtatttttctgtgtgtacttgaattaattactctgatttttgctgtaacatagagacaaataggtcccaatcctaaaggaaaataatgcaatcccaaaaacccaaaattagtagtagctttttctattttggttcttttgtttttctctattattattgggatttttttgtgttataaatgtgagctttgagaaaaatgtatagcaattattattaaagtttgaatagattacataaatatccagctaatagccagtaagattgaatagatagacttgtttgtctttgaagctactttgaatgaatgatcttattccaataaaaagcttttgttttcaatggatgttaaagagtactcacaacaatgcatttaaatata

SEQ ID NO: 16911 - DNA, 7950 bp, Cannabis sativa
tagccaatcgcaatgtgatatgtcgagaaagtactaatcaccattagtacctaatagcaatgctcaataattaattagtgaagaaagtgatacgggaaataggggagaaagtgtgtgtgtgtgtggaagaagggtttccttttcctttatctaatttattaattaatgctttaaaatgataacaacacatataagaaagaatcttaggaccaatagtatgtggtcactactcactacactaccattattacttcacaatataatactatatatttaacctacgtcatcatatgacatatttgatgatataatcaactcttacatttaactttcttttttttttactcaattttttttaattttattttccaatacataagaagaaattttaaatgaaaaactataatcaaaatcaaaatatacgaggggtgctataaaataaagcaaccatcttacataaatggataattttataaatacacaaaaataataaaaaaaaatataaaatacacttatactgaatttttttaagattttatttacaaaaaaatataattttttgatgtattattatgttgcattcttattattttattgttaattttttgttatttatataatatttttctgttactattatgtagttttcttgtatttttatagaagagtgtaaaaatatgtgaaaaaaaattaacttaaaattgtaaaaaattctaccaaaaataagtgtaatataatttttcctaaaataaatacaatttttttttactataatttatttatatgcattactctattagttatttatttcatggctttaactattcagatcccttattttatttcattactttaatttgagctctttagatctacagtgagtctcctcagtttagtacctagttatttctctaacttaatattttaataatagagtttcttaaatattaagacaaaaagaaaaggtgggaaatagagagcttaagtgttaagatatctttgtactatatgtaaaataaaatgtgaagcaagttgatacatacacatgagtaaaactaactagtctatgcctaagtacggattatatatataataatctcagttttttgtcctcaaacttttttggtctttctttaacaatatgagaaaattaaaagcaaatagtaaagttggtggaaaaaatattaaacaaattattagtatttgttattagtattattgtgagctgaggtcttattttgaagcatcttcaataaaaatatttttgacatatttatatagatgcttatattggaacaaattaaaaaatcaagtaagaatgctcaaaaataacatccttgttatttatttttatttttttgtcataaattttaaaaaaaattaattatttaatatataataaataataatatgatattattttaattatttttaaaggaatttactgtaataatattttagaataaaaaatactaaaagtaatatgaaagagaaataaaatataaaattatatttttaattgatataaaaaattttaacacttttaaaatatctcattattggagattgctcttataaataattagcgattttttataataattattaaattgtctctaaattaatatatattgatcccacatcataatacaaataataaatgttaacagatacgtgtagtatttatcactttttaatatctattagtccaactaaatatcgtaatcatttttaaaaaatattattagtagatcaaaagtcgacatatagcaatacacttagtttagggtaaatgaaaggactgtaaaagatgtccaaagaagtggttgatgtgatgtattgtttgtacacacgagacttgctgtactgactactataacactactcttatgacctttaacttcttccttggaaatataatatacattgaaattgaattgaattgactattatgattattgatttccctattccaccaaaaagcaaagcctatatgttatttttaatataaaagcatgcaaacaagagcttttattgtactatctatgtatctatgttgttatgtcctcttaacttctctcttttcttttattcctttcttttaaaaagaaaaccaactctagtgggtaactcaatgaatgaatatgttgaattaaattatgtgatggagaattaaggtttcagaaagttctgatattgatgatgaggatgaggaggaattcatctgttgctgatctttttactcatactatcttttcttggtctcttgaagatgttacaaatgaaaatcttttcatcaacaaggtaattactttgctttttcttgttttaatcacttgcatttctatgatcatgattatgattattattatctaagtgatgatgatctatatgttttcttgtatttttgtataaatatttttttgtatgcaattttcagtcactttaaagaaaagtgtttgcttaaactaccattaaattaagccattgtttcttttattcatttttcttgagtaatttcttaaccaagttatatcactactgcatttcaaaacttttgttcagtcaactcctttttctgatttttgtgtgttcatctgccatatgattagtatgatttatcatcatagttatacacttccaataaaccttttgattcataaaacatttatttcattttggttgtatttattttttgtagattgaaaagattcccaactcatttcaatcagctgggcagtatttggggtcttatatcaaccctttattggaagaaactcgagctgaattaaactcgagtatggagatcctatatggagcgccttttgctgaggtaaccactttcgaagaagctaaaccgaatgggaaaagaaactatagatttcgagttaataattggagaaacaaacacagtaaaggtggcaaggagccttacaaaactttgcctggagatgtttttattttgactaatggtaaaccagaatcggttgatgatcttcaaagggtaggcaggtcttgggcttttctatcacttgttaaactcattggagatggtggtactgctttcacagtcaaggcatcaaaggagcttcaacatgactttcagaagggacagacgtcgctgttcatcgttttcttgtcgaatttagtccctctcagaagaatatgggaagcattgcatatgtcatccaatctggagtttctaaataaagttctgtgcattgattctgaggtaagatttaggaaagcagtgaatatgattgtctgtaaacttatataactgtgtttggttgtgcatgcgaatatttagttagattattgttaattgaattacattgtttgattgaacacaagaatctgataaattgttatgaaaaattcattgtatcatgatcgaaggaaatgtttaaaactcaccattttcaaaggattcaagagctccctcccatggagtataccaaacaagggaatgtggaggatttaccatggaaatattacatcatactgaacagccccttaatatatttttcattagagatagaatattatacttttgtgactgaattttctataccctttatcataacaggttgatagatggtgtgatggctgtttcaaaataagtaataaaatatgggatggaaatttggtgaagaacttgtcttctgaactgaatgagtctcagaccaaagctgttctttcatgtcttcatatgatggaatgcaagagaaaatcttctttggaacttatatggggtcctccaggaacagggaaaacaaaaactacaagtactcttattgtcaccctgttgagaatgaactataaaactcttgtttgtgctccaacgaatgttgcaattactgaagtggcttctcgtgtcctgaagatggtgttaggttcacatggtgatgatggttcggtctgtccattggggaatattcttctttttggcactaaggagagactcaacattggtgcagatcttaaagacatatatctggatgatcgagttgaacagctcgaaaagtgcttcagatcatatggttggagacatagcttaaattccatgatagatcttctcgaaaattctgtttctaattacaaaaacatgctggagattgagtcaaccaaagagaaagaagaagaagaaagcagtactaaaagtatgaatgaagagaagagaaaagttggcaagaaaaaacttccaacatttcttgagtatgtcagagagaaatttaacatgattttctcagaacttagagaatacatctctatcatctgtatgcatacagcaaaaagttacatttcggggaaaatatttcaagatatggtgtcccttactgcctcacttgtttcgtttaagtcattgctatgtaacaacaagaatgtggtttctgaagtacttgaaaggatattttcttgtgctgaagtaaatcaatatctttctaattcatttgtagatgatgtatccttgagactcgatttgaggagaaaggaatgtgtttcgagtatgagatcccttcgcaattcccttgacatgcttgacttttcttggattaaaagccaagaagcaatgaaggagttctgttggaaaaatgcttcattgattctttgtactgtatcaacttcttataagcttcatagattgaaaattaggccaaccattttgattattgatgaagctgcacaactgaaagagtgtgaatcaaccatacctcttcaacttccaggtgtagagcatgctattcttgttggtgatgagtggcaattaccagcaactgtcaaaagcaaagtatgtcaagaaactattttttcacttgcacaaatcctagtcttctgttgttaatcttgggactgttctttgtctgttttataggtttccgagaatgctgactttggaagaagtttgtttgaaaggatgagttcacaaaatcatccaaaacatctccttaatgtgcaatacaggatgcatccatcgataagcattttcccgaattcacaattctatcgtaatcagttactggatgctgccattgtgaaaatgaacagctatagaaagaagtatcttccaggtccaatgtttggtacatattcatttattaatataattggtggaagagagcagaaggatggagatggacgcagtcgacaaaatatggttgaagtagctgttatcatgagaatactacagaagttatacaaaggtatctgcaaactcattatgcattttttgtaatcactgtgaattttagttttctgtacatggaatgaacataattacttgtttgctttgtatattattcagcccgggttaagtcgaaatgtgagctcagtattggtattgtgtctccatatgctgctcaagtggttgcaattcaagaccaacttgggaacaagtacagtggaaatgatggcttccaagtaaaggtgaagacagtcgacggcttccagggtggggaagaggacataataataatgtccaccgtacgctgcaatagtcgccattcactggatttcatatccaaaccacaaagaattaatgttgctctaacaagggctaggtatgaatatgatcaaactatgttgagtaaattcttcaatggtttccattaagtttggaaaataacaactgactattttttcatgtcttcaggcactgtctttggattttgggtgaggaaagaactcttgtcaatgatccaactgtttggaatcctataatcactgatgcaaaaaatagaagatgtttctctaatgctgacagtgatgaagatttagccaaggctatcatagaggtcaagaaagagtctggtcaatttgatgatatgattgataaagatagtatacttttcaagcgttctaagtggaaggtacagttttcagtagtgaaaatttttaaggattagacattagtgtgttatcatatttactgctaatctggttcttttgtactccaaatattgtaggtttttttcagtgaaaactttctcaagtcattaatgaaacttgaaatagttgaagcaaagagaccagttattgaacttttacttaagctttctgatggctggagaccgaggaagactagcgtattgctttgtgaaaactcgttgcgaattatgaattttatggttgaaggtctttgtgtcatctgcactgttgacatagtaaaagagcatgaagaatacatacaagttttgaggatttgggatttgttgcctcatgaagaaattccaaggttcaaaaacaagcttgatgttattttcgagaagtgcacagaagaattcatcaacaattgcaatgaaaaatgcttggaagggtaatgtttgttttgtgtataagtaaatagtttccatagtctaaatttgctcaaatatacaagcatgattttggcaacctcttgtagagctttcctaacatgattctgattttttgtccctagaaaatttgaagtaccaaagaaatggccactctcttctaacattgcatgttttgaggatctttccatgaaccaagctgggaatgactttatagctcattttcagaatttaaggatcaatgagagctcattggtgatgaaattctactccctttccaactgtgtagtgaatcacttgttgtctgaccgtgatggtagagaactcgatctccctttcgaagtaccagaacgagaaagagagatcatccttttccatggaaatacatttgtattgggacggtcgggtactggaaaaactactgtcttatccattaagttgttccaaaaagagtatgtgcaccacttgactttagaaggactttatggagccaaccgaaatgggaatggaaaatttaacaaaagaaatgctgttacaaggaactcaagaaagaccccaggaaaggctttacgccagctttttgtaacagcaactcctaagctatgcgattctgtcaagcagtgcatttcatgcttgagaaggtgtgtaaaaacattcatgaagaagctagtttttagtattatatttgtgtgaatggaatagaagttggcttttgattctttgtggtaaggtagttacttgcctccaaatgaaattgatatccatatttacctgaaaagcagaatattagctaattttaattgggaatgaacttatcaatttacataaccttgtcttgactcatgcctaagaagtatgaatttatgcaaaatcttggtatgatgaactaactagtatcacttttctatgtctccaattgtatgattaaaatcatagtcatttaacatttccacaaatttccttgcagtggtagtagtaaatcagctgaagacaatatgattgataaggataatatcgatgatgaagattcgggaattaagaacattccagattcttttcgtgacattcccgttagttcataccctcttgtcataacattccataagttcttgatgatgcttgatggaacactgagtaaatcttatttccaaagatttcttggtatggatgaagtttcccaaaatcaaatgcccagttcaagatcacatatgtttcattccttcttaaggaccaaggaagttgattttaagagattttgttcacaatattggcctcgttttgattcccagttaacgaaaaagcttgatccttcttgtgtctttactcagatagtttctcacatcaaaggcagcctacaagctttggaaacaaatgatggtaaactcacaaggaagaactatgttatgctgtcaaaggaatgtggctcaactttaagggggaagaaaagagagatgatatatgacatatttcaggcttatgaaaaactgaagttggaaaatgatgcatttgatttggctgactttgtaaatgatcttcattttcgactcagacaagaaagatatctcggtgacaaaatgaattttgtgtatgtagatgaggtgcaagacctcacaatgagtcaagttgcattgtttaa

SEQ ID NO: 16912 - DNA, 4803 bp, Cannabis sativa
aaaaaaaaaaaaaaaagatagtaaatatttgcaggtactgaaatagaacgaaactttcaggcgcatgagggccaatctgaatttgaaaagaaaaaataaacaatgaaaaataaacttttgggcattttcctaaaggtcctacaaaagaaataatatgatgattgccctgaaaaagttaaatttttaatttagcaagaaattgattttaagtacactctgtaatataatctacctaaaagattaaattcaattaaatgcgaaaggttcattttttttttattttatttgtttacgttagataattaatcaagaaaaaacacgtcctaatcacctaccagtttcttcgtcggccctggatttccatccttcacatctaagcgccgaaccccattgcatccgataacacgtattctgctcaatcacaggctttccactccaatctcccttgagcctcggattgaaatgcaatatcctgggcgggtcctctccatccacggtcttcaatccctgcaactccatcatgaactgcgagaccataaccgattcatccccttccttcaacactgctatcttaggatcatattcagcgtgagcccaacgcggagtgccgacaacggtgatatgagaccatagtgtcagcccacacggaagaactaaaactcgatttcgagcctgaaaatcggaaccagaaagtgtaatcgaaggagggcactcctcggaccggttggcaggcttggcagctgcatgttgctcaattgtcccagacttaagctcatcccatagcttcctaccaaccatccaggcatgcttcattgccttttgaagttcggagaattcatttttaccaacgtttccgtcaaggacagtctcattgaacaccaaaccggacactttcttgaacacgcgaacgcgtctctctttagttcgatacggcgggctaagagagtcgtccgtgggacgagttgggaagtctttaccaaacatatcctcctcgctctcaagcggtttgggcaagccgtcgccgataaacccataaagcccgtcggttgatcccgacccgaacccggttcggagcaccagagggatttcaaaactcatgaagagcatgtaaaagaacaacaacgccatcagtatttgcagcagtctgagtcgactgggagacatcagcgagtccaacttccctcgcttcattgtctcctcttccgcctaaaatgcctccacaccctacacccactaaaagcctaggttttgtacagacaatgagtatggtttaagattggcagttttccagagacaactctattcagtaaaccctaaccctaaactcgaatcaaaataacaaagagagctgaactcgaatcaagataataggtactgtcgaaattttacaaaagtgaaagttctgtgctgacaaatgaaagaaaaagatgacacccaccattgctgccgagtgccgagctctattgcaagcctggaactttgtgcgcaaaaggcaaaaatcaagtggaaaacgacgcaactttaaactaataagtaaatatatttttttttttaatgaagagtgatctgccaaaacacatctcgaaaattttgtttgtagtgtgaacaatagattttaagtttttttttaacgggactattttccgcgttataaattataataattttgaaaaaaaaatattttggcatatgatttgattttagacgtagagatggactaaaaagttataatagaaggtgataattagtattctcttatagggtaaatatatttttccatcttgtattttataaaagttattcactattttattaaatgacaaaatggaccatatatttaccaagatggtaaaagtaggacgttgagttcaattttcaataatcttactttttaatataactaactttaaggcaatttctaacaacagatatagaaaatgtaatcagttttgtcattacatctttagattagattattgttaagttttattttgataaaaaatcagttcagggtcctatttgtacaattttagcaaatacacaattattttgtcatttaacaaaacagagagtcctaattaaaatttacaaaatacatgatcgaaaatagtatttatctttttatatatatcttttttcttttttttttatatctaagtaaatattttttttcttttcaaattaaataataagtaaatatttaataatgtagaattaatttacgaaaatcaaattctaaaaaaaaatctcaaaaaaaaatactatagtacaaataaattttaaaaaatagtgtcggtaagcataccaaaataaaaaatttatatatacaaaaatatattaacatagaaaattttttacttttaggctttcaacttttttatttataaaaatacatttttagtaaaaataataaactattttttaattgttttataatttatttatagttgtattatagttttcaattttttgttatttgtaattgattaatagttgttataaagttgatttctcgttattttttagttaatttcttactttttattgcaaaatatatttttgtaattttaaaattttataagcatatttttaaaaataaaaattttaggccataaaattataaataaaacataaaaaaaatattttgaaaatttccttactaaaattatatgtttgatttatttttattttgtctttttaaaaatattaatattatcaagccaatttagtagtgttcactcaaaatttagtcaactgacagtggagccttatttattgttgataatcaccacgtgtaaataataatgataaataataaaagtaacacaaggatttatagaggttcggtccccttggttagcaggtaatgacctacttcctttttagttgtattgatttttgagataataccacacagattacaagcttgaaccttgtaatttctagctatggcttccttcaatattacagtagtgaaaattgagtgttacagatttagaacttttgagaatttgtgaaggaaatagactgagtgtctagtgagtgagttgagtgaggaggcgtgaaagagatgagctatgggcttgtaagacttaaagttcatgtcttttttcatgtggtctaatgccctttatatagtgtaaggcttacaaaatatcctaattcaaataggtaaatatcccctttaaaatagaaaaataactctttttatcttatatttaaattacaaaaaggataattgttatcttattttttgcaccttgacatggcaatgagaatgaatgacacgtgtcccacattttggctacctgggcgaagggaagtattcctagcagcccactaaaagtgaaatcttaatatttgtaacactcagatgtccggttaatcaggaggacatccgaccaaggtacagacctatctgtattgagcaaggcgtataagttggcaattcaagacatcaatctcgtcgcttccaagacacgaagacaatccctataatcgtgggatctagttagagaataagggcaatacgccttagtttctttttccttacatcgtaattatagaattaatatagtttcctatttatttattaaagattaaggaaaactatccttcatgtaataagctcttataagcagtggcatgatcacactattaagggggacgaaaaaattaatccagagataaacactctagagagaatagtgatctaagagagaaaataactcagagatccattgtaagagctttaaagaggaagagcactgtattccttatcgcaagtcaatacaaatacaaggggagtaggctattaccaatctaacgaggtcaaacctcttgaaaaaccgctgttctttttacttcagtatttttgctgtctattatttatcttatttaatcgttttattttgactcactgccgttggctagaagcgaggtcagcattttggtgctttcattgagagcaaaaacacaagcttttgctttaatcttgataggttaatacgatgattgtacaaactagaaggggaggtcttactggtcaaggcaatccaatggtgacaaatccaaatatgcaaatttcacaaaccccaaacaagttaatacacaaccacctacagcaggccatggagtgactacccctctggctgggttcacaccaggtgcacatgagactaggaacaccagtacgactgtcgatcaaactactcctagcactgagatcccgccaataatactcaaaggcctgttgaagatgacactaaacttcaaaatatgtgggatgcatttgggattatgcaagtccataacaacaccatgcatcactatcaagaagatctccgagcatccatcaacattgccttcaacgagaaaagacgtcaattcatagagtggggggaccgtgagataaagaccatgagggtgcaacaagcagctattggcgatcgatctaggtaggctaccatactgataagaagggcctactaggttaccagtcaacaaccagcaattgaatctagtatctccctgagctggttagaagggtatgtagctggacatactacacagactcatgttggtcagccgtccaatccaaggccacaagtccaaattgtgggccaaatggtagacagccagatcctgccaaactgccccttgggaggagttacacattcaaacaactatacttatacggaggtctcaggccaagctcccagccaaacaggtcaaacaccaagaccacctagtaccttggtgttcaatcagttaggcaccgtgcatgtgttggaatttatttta

SEQ ID NO: 16913 - DNA, 5114 bp, Cannabis sativa
  modified_base (4608)..(4610): a, c, t, g, unknown or other
acatacaatataatacaatacgatgtgatacgaggtaccaaagaacccaattataacactattaatggttagtaatttttcatattgctatataagagaaatgttactaagggataccattaaaggcacaaaaagtgacatattgtcacatgtgtaatttattttgtgttcgatgcatatatattaattaaataaataataaccagttacagctcaccacaccccgcagtgtggtgttggaggccgttgcgtaagtggcaatgctcaaaagctacagggctttaaacacttatttaattaaggtcgttgcaactatatacattctgatcaaaatttaagttaaattaagaccttaattagatctctccctttatttgcttttatttgcgggcgcacacacactgacacacatatatatttatgtatatatacagacattgtactccttctcaaagaaaaaagaaaagaaatatattgttgtcctcaacagaagaaagttcataataattaataacataggtcgcaagatgggtctgtgttcttttggagcgtttcttgctggaataattctcttttttttcacttcacattgttattcagagaaaggtacgatcataactattattttctttatcttagctcaaaaatatatattcactgcatttagttatgtaagcacaatttgaataaacaagtaacttttacatatatacctatgatcttgtcttgtgatgatcaatgtgaacacgaaatgaatatgaatatatttttaattaataaattacatgcatgcacacgcagatccctcatttttgaaagaagcaacatcaagcccagaagtagtacactacgactacataatcattggaggagggacagccagctgtccactagcagcgactctctcacaaaacgccaccgttttagtccttgagagaggcggctcaccctacggcaacccctccataaccaacctaggcaacttcttgaacaatcttttggatatctcccccaactcaccagcacaactgttcctctccgaggacggagtgttcagccaccgcgcccgcatccttggcggaggctcggctttaaacgccggcttttacagccgcggcagcgccgcttttgtggaaaaagcgggttggaataagacgttggtggaagaatcgtatgagtgggtggaaaagaaggtggcgtttgagccggtggtggggccgtggcagtcggcggtgagagatggcttatttgaagctggagtgttcccaaataatggatttacgtatgagcatttgtatgggactaagattggtggaaccattttcgatgaacaaggacatagacatactgctgcggatttgcttcaatatgctgatccatccaacattgttgtttatttgcacgcaactgtccaaaaaattctcttcagatataaaccaggtgaaatttcattaatatattatttatttattttttgcataaaataatatacaatattggaaagaatttattaataatgttgcgtcatccaacaataataattttcttaaattgtaaattattacgcataatatgacatagcaatatctatataatatgtatatattatatctttatacgtggtgctattaaccactaccacgtgcgtagttaacttaacatagcaagagaattggacataagacatatgatgttccctggctgggtcgtagtagttggaattctataatagagatataataaacaaaagccaaaaattgcgtcccaaaagtttataatatattttgatgtaaataagtttggaatctccaaaaataattactacttacagctttaagtttgaaattcttataaatctattagtcctctgtttttaatgaatctgttaattctatcttaaaatatcacatatttgatattaaattaccatataaatctctacaaaatttacttaatatatataagtcacataaaagtttattaataagttctaatttcaaaaaattatagtcataacccttaagttctgacatttttgttagtctgtaggtacctaatttaaaaactttgtttgtagttctaaaaatttccacgttaaaaatttattggtgaacaacataaaaataacataaaaattattaacgttaataattatttttttcaatttttttttataaaaaattaaacaattttatatatatatatatatataaaattttatgattcgccacctaccattcttgatagtggaggcttgccgcccataaaggtcatctatcactacaaaattaaaattactacttttagtgataattttttagtcacaacaaaaacatacttgtgactaaaaagtagtatttagatacaagttgtcactaagttagttttagtaacaacaagtattgtgacaaaaacacatttagtcacaaaaaaatataatttttctgactaatacgtttagccatggaccttgtaatcacaacataagaatgaaaatttataattagttgtgactaaaagtaaaaaaatttgtagtgattcatctccacttttttccttgtcccatcccacgttcccatgctgaaaacccaaaaaaatataacaaagcaaaaaaaacaaaaaaacaaaaaaaatccaaaaaactctaaatagctacacatgcattgctgtgactatctccctgaatctattgcactagtccccatcttcggtgggtggtgcgttttagtggtcgtttcttttatcttagcttctatggttcaaactatatttagattttttttagagagacccctcttgctaatagaaattgaagagttttagaacacaccaaagctagagatgaagtgctagtagtgaactaaaagaaagaaaaaaaagataaagagaaaggttaattaattaatatttaaaataatttatttatttttttgttacacgtaaaattttttgaaacaacaaatggtgcagttaaattaagtacatacggaactaacgagaatcttgagtttgggattgttgtcaaaaaagttcgagattgagacttatctgcatcaaaatgaactcttattagggacttatagcacaatttaatctcaacacttgacattttaacagatccgttaaaaagaggaccaacagacttataagagtctcgagcttggagactattgacactatttttctaggatggaaacttatctacatcaaagtaaatttttgaacgactttgacaataattttctctaaaccaatttaattacatatctaaccttcttatacacgttacatatctaaccttcttatacaagaggcagttgaatgacttgaacaaaatttataaatagtgtacaaaaatggttaagagtactaattttcagtatatataattatactacgtgatgtaagttaaaatgcaactatttctttctagtttaaatgtattatttccttatatagaaaattagtaaagaaaaatagaatagctttaaggttttaatttcaaactatcaactatcaagtacatgcaagtgacgatcaccaaaaaaaagtacatgcgactgacagaatgagagattgtgtgaaaaagttaatatgtagattttttttaagaaccccttagtttctattttataagttgctcccttactgtgtgttgcctactttttatcctttcttttttcttaattttgatcacaatgtttagtgtgtatatagactatatatagtctgagtaaatgagtattgacatctcttttgttgataacatagcattattaatgttgcaggagcatcaaggcctgaggcatatggggtaatttataaagattcaaatggaattttacacagggcctacttaatcaataactccaaaaatgaaattatagtgtcagctggagctctaggaagcccccagctattaatgttgagtggaattgggccagcccaccatctaaaagcccgcggtatcaatgtcgtaatggatcaacccatggttgggcaagggatggctgataattcaatgaatattctctttataccttcgcctatgccggttgaggtctcactgatcgaagctgtgggtatcacaaggtttcatagcttcatagaagcagccagtggattgagcatttctcttcctttagttcaagaacttcataagtattttgagcctattctatatcaggttcttttttctctaaattctccctaatatatatatatatatagtaattaatagtttttaatgggactaatattgtttgacaccatttaaagttatactgttattgatctaattaaatatttgcttttatataatttaaattaataactattataaaatatcgttaattatttataaactgctaccttaaaatgatgctaaacgttactaggccctaatagcaatactcatgactataaattatcaagtattattttgattcattattaggtatataaatagattatgcatcaccatgaaaaaatctataatgcacccttctaaaggggtgtacttatacacccttattcatttcggtattcggaataatttctaattaagtctatttttttccattgtcatatatgttatagttatttaannnatcttgtaaaattttaagaaattccagaaaaaattacacataaaaaatagggttcaaatagtctattacatgagtgattcttttattttatacatgtgtgaaatagactgtttaaacactattttatatactgtaaattgttctaaatttctcaaaactttactagacgtcttaaataactataacgtatagaactatacaaaaaattagaataaaagtttttcttaaatatcgaaacagataaaaaatgcatcaatgtgtacctcttttagatggtacattgtagaatagccatatatatttaacaatattatactaattctaaataaatatatattgaagaaataaatacataaatatatattatccatattttacggagcagtaatgtaagcatttccaaaggactatatcaggcaaaacaagcccatttattggcctaattaggttaataactcatcccataagtggagtcaagccatggctccaaattcggatgcaagt

SEQ ID NO: 16914 - DNA, 2629 bp, Cannabis sativa
agacacccatcatataaacagaaattgaactgggaaactgaaatttcctttttacctcaatccctttttcattagattttcctgagaagagtgacagaacattatcaagtacagagcgcaaatcaaaaggaacatcctcaagttcaagcctgcccgattctattttagcctggtcaagaacctcatttataagtgaaatcaggtctttgccactagcatgagcagtttgagcatagtcttgttgggttgcatcaaggtcagtgtccatcaacatttgcagcatacctggatgggagaggaagttatatcattttacttgatcttgagacattttcacaagcaattttatagagatgaactttaagcttacctaaaacaccattcatcggtgtccttatctcatgagagacagttgctaagaactacaaaaacataaagaaattaataacagaaaatttgactatacttcaaataatagaaaatacaacaaagctatttatttgaagatgcaagtttgaaatcaatgatctaaaaaacttttcagtaataggaatcataaactaaaaatgagtaatgaaaaatcaactatccaactgaataattaataattaaaaaaatatataaaagaaatgaatgtttacagtcttggtctaaagataaagattcaaccaatcttaaatatatatatatatatatatatttgaaaagcacctgagattttgccacatctgcagcttcagcacgagctttaagttctaccatcatgcgataatctgcctccacttttgctatttggcgtatggctccataaaaaatatagccaactagtaaagtaatagtaaccactccacccgatgaaagaattgccatcattggtaaaggaggtctttccttgaacctacagcaaaatggaaacattttaacagtggaaaaataagtgattgtgtcctttttttcacaagataaatatataaaaggagtaaaagatctaacctgcaatgcatttcatgcttgcgaactggatctccaaagtctagactgctagtgtgcaatagaccagtatcagtaacatcagtaccatacatattgataggcgcagatgcattagttgtatcataaacatttacaacaattgtctccttgctggcaagttggtgtaggagcttttcaaccaatgacgggacatcatatgatgcaccaaggtacctaatagaaaatgtcagcaattagacgagtgtaccttggtgaaatggtacatgtctataggcatcttgaaagttaattgattccataaatatggtatctatctagtgactctaatctattttagcttctgacatacagtacaaaatatatcttagaaattttaaacactagcctatagacatgtacaaaaatttacaaaatctgaactttgacacaaaatagtacccaacagtagcctcaatacgttgctctgccgtagcatcaggtggcagttcagtgtcatagactgcgaaagtaagtactacaccaaggttatttgactttaaaagcttaaaaggagaagtaaggactcccttccctgttgccctggcccgcaagatgttctcacgatcttcctataaaatgataacacttgcaatttagcaaaatcaagatgacggatgatcattagcatatataatgcagacaagaggatgattacaaatctaaatagtgacgagtaatattctccttaaaagagaattatcaaacattgaaaagactacctatccttcagttgaaagcctagtcaaattcccaaattaacagaagcaataggacaaacactggcgccataaaaaaaatcaaattttgcttaacaccatttagtagtattcttgttcaatatcatcatctcaaacaattgatcctcctatctcacaaattctattattgcagaattaagagtttcattttaccaatattagtcagtaatatgtgctacatcaactcttctagatcaagttacaggagcaactcaataaatcatcaaacacatactgtatctaaaagcacacattccaaagtatcattaataagtattctagtagcaaagaaaactatcaatttgaccagttattatttccaaaaatgtccatgaaaagcaaggcaacaaaataatcaatattttttcattgggtacatttgaacagcaaagaagagcatacctttcctgacatcatgtcaatagatacaatgtgggagacagtttcttgagaaaatataacaggtgcatattcatcttcaacaggtgcaggatcaaaattttctggaatacaatcatgtactaaagtctgttcctctgtttccattttctttatggtccatccatgttccttctcaaattgttctctctctgagtgaagaactttcaaagcatatgcgacaccactagtaagcggtctctcaaaagatgttctctctgtatattctccaaatgttttctgccaaacaatgcaggggatcgtaattatttagtatttattctggcacagtaatgttacagctttacttctaaatatagaattgcatttctgtgtgttgtcttaatcttcaataattttgttcaaagaaaaaaacaaaattgcagacaataaagtccaat

SEQ ID NO: 16915 - DNA, 3570 bp, Cannabis sativa
  modified_base (3469)..(3481): a, c, t, g, unknown or other
aataaagaaactatacatatcaaatcctagaaccttccactggatcaataataataataataatgcgataaacctaatctcttttcatatacctttatatcaagaacacaccaagctgttatgatacatggccctctctctctctcacacacacactcaaacatgtagtggggttcactttattattatttgtttcaatattgatgggactctttgcctataaaaggccaagtcttcaagacagagttaattaagttgtgtgaacatcaaagaggaaaagacatccttagtattattctctctagctattttctttcattttgtcattatttccttggaggaaataaaaagaaaaaaacatggtcagtcttatttacatttttatcatacttatttacgttacaatttttattaattaatttgaggttgtttagagttcttgcattatgttataattcttctttaaaatgtgtcaaaaaaaaaacaatattataggaagggaagatgagttggactgcttctgatgctgtggactacaaaggttttcctgctgataaatccaaaactggtggttggctacctgctgctcttatccttggtatgttcttaaacactcacatgcacacactcttaatactcatcttcctcatcatcacagatcagaagaaaaagcttgttatatatcaattatatatatatatcctatatatatcctaccatgatatatttgattgttatatatatacatattacatgatggatataaatatataacaatcaaatataattgagcatgtatatgtatgaatcaaattaaaagataataggttattttgtttttttttttaaacatattcatgcatatatgattatgattgtttaagcgtttacagaggagatgagatcattatcatcatttaatataaaagaattagttggctgttaaaataggacagttgtatatacatgattggatatcaagtatgacatgtttgatttgttgcattattggtaaatagtagcacagtatagtatagtaagtaagaagtagatggttcatgcaaaaagaaaaagttaagaggaaacatgcacatgttttcatattagctggttttgtttttgatgaaatcttaaaaaaattattttgtactaatgcattacaatttggcagctctctaacacaaattcaaaaaaggtttagtttatagtcaaccaaaatttttaatgttattgcctttttatgcttttctttgttttctattaattatttttattttggttgacagaatggggatgatataggacccattatgtgtatcataatattactatatacatttctgtcattttctacttggaaataatgcatgtcaaaaggcaatatattatatatctaaaccttgctttgttttgagccctggaataaaatatacttctccaattcactcatcataaactgcccatatttgctttgtgcaaatgtaaaaaaactttttattttatttcatctgtaatataatcaataaaaagggtcaccatctgcaagatttcattgttattatacacagataataattatataaacccacaatgtaaaaatatctataataaagtattattaacttttgctttacaatattcaaatttgggaaaatcccatacttgtgctctactacatgtggctaacttttcccttccactccctgaggtttataactaattattaggaaattttcaatgattgaagttctgtcccaaaaaaaaaaaaatatattttctttttcacttttcttaataaattaatacaaaattaagaagaatatactatatgcatatgctattaaagttcatcattaattagtcttaaccaatcaatttttttaattcaaaatatgtctccataatttacagggattgaaataagtgaaaggctatcaacaatgggaatagcagttaatttggtgacatatttgactggaacaatgcatttgcctagttcaacttcagccaatattgtaacagattttatgggcacatgttttctgttgtgcttgcttggaggctttttggctgattccttccttggaagatacaagacaattgcaatatttgctactatacaaactctagtgagcactactatgcctatttttcctcaacaacaaaatttatctccctgttccttttggtacatataggattattgaatattgctaagaagcacaccaacacaacttgacatggcatatggtattatttgtgcaatttaatatcagatcccatcccagatatcataattcaaaatataaataaaaataccaaagtagagttagaaactatagtactctatagtaattcttactatagtacaatcaattaattaactatcataaatcactaaatctaatcaaataaaaacaatttcttgatctgcagggtactgcttccttggcaatatcaacaaaaataccggagttacagccaccaccttgcgacggaggtgcaggcgccacctgccaacaggctaatggatttcaaatgggaattctttacttagccttatatcttattgcacttggaaccggtggacttaaatcaagtgtttcaggctttggaactgaccagtttgatgataaagatgagaaggagaaggctcaaatggcttacttctttcagagattcttcttcttcattagcacaggaaccttaatggctgtgacagtccttgtttacttacaagatgaagttggcagaagctgggcctacggaatttgttctgtttcaatgttaatctccatcataatactattgtctgggactaaaaaatacaggtacaaaaagagcatggggagtcctatagttcacattttccaagttattgtggcctctttcaaaaagagaaagatgtctggtcctttcaatatagccatgctgtatgaggatactcctatggaagccaaaatccctcacacagaacaatttcggtaagtgtcaacttttaactttgtcttatggactgttttggttatgccttagtagtgtggtaataacatttgtttttgtttagtttcttggacaaggctgcaatagtgctagaaggagattttgagcaaaatgttagtagcagtactcctaatccatggaaactatgttcagtgacaaagattgaagaggtgaagatgatgataagattactaccaatatgggctacaaccatcttgttttggaccacttatgctcaaatgattactttctctgttgaacaagcagctactatgaaaagaaacgtaggaagtttccaaattcctgctggttctctcactgtgttttttgtggcagccatattgatcactctcgctgtttatgaccgtttcattatgcctttttggaagaaattgaaaggcaaacaaggtatataaactttacatagcattacttatacgtttaggatttttgccccttgaacttnnnnnnnnnnnnnatcatgcccctgaacttttaaggttgttgaaaatgctccctgaactatttagatttttggatttaaggacttttttccaattttagtaa

SEQ ID NO: 16916 - DNA, 6766 bp, Cannabis sativa
  modified_base (938)..(941): a, c, t, g, unknown or other
tcgtaaaaacttgagtgtgtgatttaatagcttttttttttttgaataaaagtgtaattatataactaaaaacagttagacttcttgatcattacataaaatatctaaagggatggtagatatcagaatatcactaaatattttgtgggtaaaagtacactttaccacgttatgggcaacgaaattataaaacctactaatactagaaaacagccaacagccaaataaagaaagtcgactagttttgatacatcttatctcattctattttttccattacacttagagctaaaacaaaaaatctaatgagtatctgattcaaaaagccactaaattcaaaaattatttgaaaaaataaaaccaaaagaaccacatgtaattcgaaaatagtgagctaaaataaaacgatttttgatcgagctgtcgagaatacatacaatattgacaatatatgagaacttaatatcacacataaaatacatgaattactcatctaacaccatactaatgtaatacattgtgagtagttagtgaattcctatattattttataaatcaaaatatataaaacacgatattaaactgcaccaataataatacaattccttaagatgctctttagcatttctcaaaccacatacactctacattattctactttctccaccacaattcccaaattctaacaattacccaagtaaagttagagactttattcattctaaattataagcccttaacttttgtagtttaccataaagttcaaagtttgcaacttcatgatttattccaaaattatataaatcatggttgagcaaagcttaaaactttgagttaaaaatggtaaaagtagagactaaattagtagggtttgttggtttcatcattgtgtttctctgagcttttcatgctcagaaccagagagagagagagagagnnnnagagagagaaagagagagagaaaacccatcaaagggagccctttcaatggagaaaggaagcagtgaaaagggtactatggatatatcatcatcttctaatgctggcaatttaaggcctaatgcaaacgccgccaccgacatagactcagctagaaagagcaaagaaattgttcagtacaatgtagatgctgggttacttgctgagtttgagagttctgattttaaaggtaagatttttaactatacaaaatcagttgttaatgctcctgaaagtgtaccagacgagcaaatttcagcttacttaactagaatgcaaaggggtggtcttatccaaccttttggttgtttgattgtaattgaagaacctagttttagaatcttaagttatagtgagaattgctgtgttgttttgggtttagatactcaattagtgttgagacagaaattgggtttgattggggttgatgctaaaactctgtttactcccacttctggtgtttcacttgtcaaagctgttgattctagggagatttctttactaaatcctatttgggtttattctagagctacccagaagcctttttatgctatacttcatagaattgatgtgggaattgtgattgatttggagcctgctcagtctggtgatccagcattgtcacttgctggagctgttcaatctcagaagctcgcggttagagctatttctaggctgcaggctctccccgggggagatatcgctgcgttgtgtgatactgttgttgaagatgttcagaagctaactggttatgatagagttatggtttataagtttcatgaagatggtcatggtgaagttatgtctgagattaggaggtctgatttagaacctttcttgggattacactatccttcaaccgatattccattagctgctcggtttttgtttaagcaaaaccgaactagaatcatttgtgattgtaatgccaaaccagttaggatcatacagagtgaagagctgagacaaccggtgtcattggtgaattctacactgcgccaaccacacggttgtcacacacagtacatggctaatatgaagtcaattgcatcattggcaatggcagttgttgtaaacaataatgaagcatcaacttcaaggctttgggggttggttgtgtgccaccacactacagctcgctatgttcctttcactcttcggtatgcttgtgagtttcttatgcaagcacttggatcgcagataaacatggagcttcagttggcagctcaaatagcagagaaacaaactctcagaacacagacattgctttgtgacatgcttctccgagatgccccctttgggattgtaacccaatctcctagtataaaggatctagtgaagtgtgaaggggcagcattgtactataagggttcgtgttggttacttggggtaactccaactgaatcacaagtaaaagatattgtggaatggctcagaacaaatcatggagaatccacggggctaagtacggatagtttggcagatgctggttaccctggtgctgcattgctcggtgatgctgtttgtggcatggctactgcaagaatcaacggaaatgattacttattttggttcaggtctcacattgctgaggaaattaagtggggaggagctaagcatcatccgaaagataaggatgacggtgaaaggatgcacccgagatcttcctttaaagcttttcttgaagtagtgaaaagtaaaagtttgccatggggggcttctgaaattgatgccattcattctctacagctcataatgagagactcatttaaggatatggatgggagtggtttcaaagcgagtaatagtcagcaaattgacaatacaaagatgcaagggatgcaagaactcagttctgtggcttgtgagatggttaaattgattgaaacagcaacagttcctatttttggagttgattcatctggtttaataaatggctggaatgagaaaattgctgagttggtgagcttacaagctaatgaagctatgggaaagtccttagtcgatgaccttgttcacgaggactcacttcacgttgttcgaaatattttaagcaaaggtttgcaaggtaactgttttattgtctttgtagtgaattgaacaattcaggacttctatcatttttgcttcaatatatcttggtgaaaataattgatttaatggtttcatcgtattcaggtgtggaagaagcaaatatagagttaaagatgagaaatttcggggctgagaacaacgcagacaatgttatatatattgtggccaacacttgtacaagtagggattatgcgaagaatgtagtcggtgtgacttttgtgggtcaagatgtcactcgggagaaatttgttatggatagattcattcgcttgcaaggtgattacaaggcgatcatacagagtcttaatccattgattccacctatatttgcatcggatgagaatgctcgctgttctgaatggaatgcagcaatggaaaagttgactggttggacacgagatgaagttatcggcagagtgctccttggagaaattttcggaaatttgtgtaggctagacaatcaagattcattgaccaagtttatgataacgttgtataggggaatcagtggtcaagatattgaaaagtttcctttggagtttcttgaccgaaacgagaagatggtaaaggttttcttgacagcaaacaagaggactgatgctgttggcaatccaattggttgtttctgcttcttacagactgcatctgacccatatcaagcctcaaaattaatcaggaaaaaggaaagagatgatgtttcgaaacttaaagagttagcttacttaagacaagaaatgaagaatccattaaatggtattcgatttactcacaagctcttggaaagtacaggcatttcagaacatcagaagcaatttctcgaggctagtgatgcatgtgaaagacaaatcatgatgattgttgaaggaaatttaggaagcatagaagaagggtaagttagttttttcatcttaattagtgttaacattttttatgagttcattcaatacaatatctaacatattaccttggttgtggcagtactttggagcttaatatcgaagagtttcaattgggaaatgttttagatgctgttgttagtcaagtaatgctacttttgagggaaaagaagctgaagctatatcatgagatacccgaagaaatcaaatcgttatgtctgtatggcgattatattagactacagttagtcttgtcagatttccttctcaacattgtacgttacacaccaacatcgaaaggctgggtcgaaattaaaatttcctccggtttgaagattatacaagatggcaatgaattcattcgcttgcagttcaggttcgtttatctaattatttacaaaccatgagcctttctattttttagaaaatgagctgaaaacttaacatagagtatgatcaaaagtacaaatcaaatcaatactgaaatgactccagttggtctatatatagaagccaagacccaattagcttttgctaaaaattcttgagtcactttagttagtttttatagggtttggtgtagtgttagttgaataaaattttgttattacttttagatgggacatgagttagataccaaactaactttgtgattctttttaagtacacacccaaccatttgagctagctgactgaaattgtgttttcgtaaacaatgccatgttggtcgggtaaaaactacaacttttcatggttcaaacaaactcgaatgataattattataataattatgtcgaaattgtgtggttgtgaatgtagaatgagtcatcctggtgaaggtattcctaatgctcttatccaagacatggttgagagtggaaagcactggacttcacaagaagggctcgggttaaacctttctcgaaaacttctcagtagaatgaatggacagatcaagtacattagagagaatgacaaatgttacttccttatcgacgtagaattcaaaacgaggaaagaacgacaatggggaggaggaacaagagtagatttaagcaggatgacttgaacttgaacttagaacttttcgaggaaaaaccgaatgcttctatcacgggtttgaaacgcctgatataacccggtaaatccccagtgttactaccagttttcatggctctactactatagcttttcctttatcaatgtatgtatgtatgtaaactactttcacaaacttctgtatcaaaatgtatattccattccatctttgtattttttttctttctcacaaaactaataaaaataagctttttgtttttagttccattcaataatctttcataactatcttagctactatttatgctacaaatttcagggtctcaatcaatgcatagaggttgagaaaaacacttatttctgtttttgttctcaaatttttataattttacaagagaaatgggcatgaaatgacttgttttcataattttccttacgaaagaaagataataaaacttgaaagaagaaaccaatatctggcaataatgttccttaaatatatgtacttatggattcaaagatctaaatacattaaataaaaatgacaaaaagaaaaaagaaaacatatttctctcctccccccatttacaatttttttcaccccatgttaaattaccaatcctctcaaaaaaagaacaaatttatccacacatatccatatgaacactgaatcagcaaataagaccataaaaacaaaaaaaaaaaatgagaccaaaaggaagattagcattatgtccccaaagcatctgacaatttcaggagaaccagagctccatgttccccgagtccaccgagccgcacatcaaaaacgtcgaagctctttctgcagatgataacagcaaaaaaagaaagaaaaaaaaggctatataacacaataaacttaacaccacccaactatttcttttttcttctcttgtccctaagtttgtacacttgagtttatgtgcaatggttagaacccacagccgcaatcaaaataggtcagcggcaatttgtgccatgtactattgactcttttcgggtatgtcatgaaagacatgttctggcgggctatccaacgaatcacctaagtgtgaatcgttcggttgacagacttggatgttcaaactgtttgagagaagatgttcctgaataacctacatagcgtaaacacaatgacataaagtttgcaatcatcgagaattaacaatttaatttgaaaacaccattggcttcaccaaaagattatcgagttttattaattacctcatcgctaccctcggaatagaagagaattgggcggcaacgtttatcttcattcattaagctcgagttttgaaagtgagtaacaagggccgcctttccttggatccgagcatatgccaaagatgcaactttctcactgttgaacttctcccacttcttcccattaaatgcctgcaccacaaatttaggaatttaaggcaatctgaaatttttcttctttgaaattagaatccccacttaatcgtacaatatttggagaccgaaaaactataacaattgctatgtaggtacccaaaaagaactcgaacctcagaccttatgggatcaaactaaatgactcttagataagtcgaaagaacataatggaccaatcagaatacatctaacaaaaatggaggaatattattacctcatagaaaggaatgatgtgagaaggagacagcatattaataaaagcataacccacattgcatttattctgcaatcacagaaag

SEQ ID NO: 16917 - DNA, 7402 bp, Cannabis sativa
  modified_base (60)..(65): a, c, t, g, unknown or other
ttcaaactccactaagcatgcattaataattaattaataacaaaaagttagtgaatgtannnnnntatagcaagttaaaatctgatcaataccaaattattccaaaccttgaaaattagcttacaacctacaatataataaaatacaacaaaattagaattttaattatttaattacttattagttataaaaaaaaaataactagttactaaattatatacatttatttttaaaaaatttacacatatacatacatatataataaattatatctcacactaataaatttttaaaaattttatttggaaactaattaaatctctcttatctcattctcattcacaatacatatatattacttagaatatatacaatacaattataatatttatataaataaaatacacaatatatacacacactacaaaatatatatacacatattcaataaaatacaaaatacatatatatactatatatatatattaaggtttaaatttttaccttataagcaaaattcgatgaccaattttgcaaaaagtcaggccactatgcacatacacaacaataatgttaataatataaaaaaattctaaaaaaatttacaaaaacgaaaaataaagcaatgtacattactaaaatgaatagaaatcatatttataccttaatagacgttgatattcaacgttttctccactaaaatttttggttggagttataaccaccgctttctttgtatgggttcggtttatagtgaaaagaagaaaaaaaatcaaaacttttttcgtgtctatgtttaggtattaaaaatagaagattttaaaaaataggctcaaatggtgcgaaaatagggcatatgggctataggagaggtgttttgcgaaggtggtgagggttttgggtgttcgttctctgctgctagttggttttgtgaggaagaagaagatgaagaagacagagctgataggatttttgtgtaaccctatcctttcagttattaggaaataatcgacagcatagggcacacgtgtcagttattttgtgtgcctatgtcgtcgattatttcctaataatcgatgaaatatggttaataaacaaccattcagcactcccaaacccccaaccgactctaaatgatgtagtctaattctatacctatggtttttagaaaataaccacctctaaatgtcgatttttaatagacaggtatttctacaccctttagcttccctttttataaaacttgtggaaaaaatagtccataaaagattattttgtagtagtgtctatacaagtgtttttctttaaattttgtttgtccaaaagttgaaaataatgttttattttatttattaaaagtaatcagataaaaaaaaataactgaatgaatatgtgtatatgtatgaaggtataaacttacaggttatcatatgtcattgtaatatttgagaattttttttaatgtttcaatttttcttgttttcttattcattatttgaattttaaaaaatataatatcactatttttataaatttatttgtctatttaaatattgttgttattattttcgttttgttataaatttagtctcaattttttaaatagtcgaaatcaaggaatgaattaagcactttttgtactttggagattatttttttttttttattttcacataacaaatttatgataaaatatgaaatttaaaattattaataaaattgttaaatcctaccaaactgaccgttgttcgttactattttaaagttaacacaaaagttaatacatttttataataaagagatattcgctacataacttaatgtagtgaccataaattataaaaaaatgagaaaaaaaaaatcataaattaactcaaaaaatatttattaattagtataatgatcgcgcttcgggcggttatattgcctagtttattataagggtaatttgcgaccaaactccttgaactttgaagtttggcacggtttaactcttaaactggaaaaattatggtaaactctccaatcttcacaatcgtttttctatgtagtctttccctcaactttggtctgttaaatcccaaagtggaccgccatggtgtacacaagtgtacacgtgacgaaatttcattagtccatctaattttaataattaaaaattaaaaatataacttcaaaataaaaaaaaaaaatcaaaacatattttttctcttttttcttttttctttccttttttttttctttctttccattttctttttcttctttatgcttcttcttcttcacactgtctagaatactacacccaaaaaaactcaccacccaccaacccccaccccgaaacctagcaccattttgtccataccccaatcccggcaagaccgcgtctctcttttccttctctccactgtctctcttttgatcccgacgagaccaccacccagagaacaaataacccaaatcttaaacccacaacctattacaaagaattctttggtctcgtttatttgacaagggcacgacaggtttaggtttgtaggggagcaacgacgtttgtgttttaagggtcgacttgttttggttcgttggggtcgataacattttgatttgcaggggatcaatggcgtttgggtctgtagagggtcagggatttggggttgtgggtttgggaaaagggactagaggagggccagagcacaatactcctagttcgtccgtagccagtgtcgcacaagtagagagaaagagagagattaacaggagaggaagagagagagagaaatgatgattttagttttagaattttcaattaaagaaaaaagagaaaaagaaaaaagagaaaaaaattatttttaattttttctgtcttttaattatttttttaatttttaaaaattttaatttattttttaattattaatatttggtggactaatgaaatcatgctacgtgtaataattttggtacacgatggcagtctacttggcacttaacagccaaaaattaatagaaggagtacaatacaaaacgattgtagaggttagggagtttaggttaaaccatgccaaacttcaaaatttaaagaatgtaaccacaaattacctttattataatattatcttgggtttagcaaaagagaacagaaatatcacaaaagatctatctaaaataagaaagcaccagtccactaataaaatcaaaaaatcattacatgcaaattaaaattggaagttaacatacaaacgaactaaaaaaaagatacattaagaaaagaagagaaaagccaacactactgcttaattaagagaaactcattctacatggccttcagttgtggaattctgggttctacaaatggaaagcaaagcttcatatgctagagttacgatagaaaccacttttttgagtatgcaccatacaattgttcgcacaacaatacaataatccatgacttgtttacgagggacaggtacaaaccttataatgaaaccaattggcaatgctaaggaagaaatgccaatacataaaccccaatgtagccatgtcaacttcactgtgtctgcaatgagttttagaatttccactaacaatgtttgaagtagaattataaagccagcagtcacccagaagagtttattagcatgaatcttttcgaagacattcttcgtgtctagtttccttgaattgatctgattaaatacttgacagaacacatatgcattgaagacaaaagtatcacgtaccttatcaacatctatagggtaaatgaattcatttgttatcaaaagaatgagagcagtttcaaataaagcttgtggcaagacgtttctaaacatgatgttggtgataagaggatcagtgtttcgcaccggtggcttcttcatgagctcttttgtaggcctttcattggcaaatccaagacaagccagtgtatcagtgatcaaactcacccacaacagttgtatagttgatagtgggaacgattcagccacaaacactccagcaatgtttgataaaagagggacagaagatgcagttagttggaactgaataaatttctgtgtgttgctataaacacatcttccccacttgaaaatcttagtaagagagcaaaaattaccctctgatatgacaatgtctgagtgttcctcgataatttcagtgccttccttccccatgtagattccaacaatggcttctttcattgcagatgaattacttgttccatgtacaacaactccaacgacattcccatcatctctcaaacattcaacaattaagcgtttatcttcaggggatgaattcgccatgacacatatctcattagccattttccttctttgttttgcattgcatcttctaaacttggccgcttctacaatctctccaccatgttgttcaagtatcccacattcttctgctatagcttttgcaatgaaaatattatcaccagtgatcattttgagttttactccagcattatgtaaatctttgaccacttccttcatcttaggacgacatggatcttcaataccaacaattcctaagaggatcatattatcctccaacaatttttctttgtcatcatcatcttgaacttctttggtttcgactttatgtgccaaagcaatgcatctcagcttcctggtagccatttcttgaataatttgatctagttcttttttttgatcgtgatctagacctttaacaatgccaaaagcatcgtaataccgtgaacacacttctaaaattaactgagcagctcctttcaagtgtacttggattgtcttatcaatctttttctgtgcaagaatccaactctgcttcttctcaggagtgaaggccccgatgtgaagaatgtcaatatttgtttttatgttgtctatatctattttcaaatcttgcagagcccatgttttgattgccgcttctgttggactaatagagagagtattaagagcaataccttcttgtagcaatcttataatcttcggagaaattgatgagtacttttctttagccacacaattattgtctagccaaaactctgagaccttcatctggttcattgtgagtgttccagttttgttaatacaaatagtgtcgacaaagctcatattctctatagaagagagcttacgcaccattgcattttgttccttcaatttcttcattgcataagcacgagtaagcgtcaacgtgagtcgtaagggatctgcaatattcaccacagatgttatcaatgtcacaatcatgctcactataatattaactttggctagacctttagcaggttttttgtttccattgtcatctgtagttgtaaaggataaacctccaaaaatagtgaatattaaaacacccaatatagatgcatagccaatccaatctgttgctgagttcattttttcaagtcgagtttctaagggtgttggttgcatcgactcatggatgacattaacattttgttctctccttgcgttcatcccaactgaagtgacaagcatcaaagcaaaaccatcaacaactttagtaccagaaaacaagaagatatcatcatttactgaatccaattccacatgctcattttgttcttcagagcaactacctttgttgtccctctccaattttaaagaatgggacattattagcgaaccatttgcttaaactttatccccataatttaaacaaacaacatctccaactacaatgtcaacaatagtaactttctgacaaattccacctctctcaacttcaatattgattttataactatcatctagtaacttttgaaatactttggcatgccaataatcactagtggcaacaaatataatagccataaaaactccgacaataatacttacactatctttcaaaccttcttttgacccatctactttaatgcctaaaccaagagagattgcgccaaaaaaaatagacaaaagttctacgggtgcattctcaagaatgttagcaccaaacacaatgagcgacattttcttcatcaattccattgactaagtcacttttgagaagtttagctataaactcaacacttcctattctttcaagatgtacttgccgatcttcgtttttcagtgagatgatttagagtagttgatatttgatcatcagtctcaaacacattatgatttggttcaacatcaacaacagtatcaagggaagaatatccaacttccttctggctcttttgtctgtcatagtcttgagaagttgattgaaacttaaagctgagacacaaagagtagtaacaactcgcaataaatagttggtaccattattatttgtgtctttattggaggtgtcattcttctcttcttctaataattttgtaagctttatttcttcatggattagagaactgctacttgaaatggttactaagcgcgagcaagcaaactagaaatgtgcctctcccccttagagagcatatatatgatttctgtgaaaaaacgtatacaaatgattacccattcatgtcttgctcaaacaatactaacttaaaaaatgaggcaaattaatcctactatacattgtaatatggctatttaatatttttgtccacaaaattatgatctatgcatcatagtacctttaatttttcaggtcgttaaaaatagtctacaaactatttagagtattgtaaattgatcattttgtgaagttttattacacgtgacaaacagaatgatgatgtggctatgtagacaattgtcacgtcaacaccacaaaataatttacatgtttttaatttttataatcattaattgtttttttagtttaataatcttctaaaaatacatttttgtgaaaaaaaaaatgtaactttgatacgacaatttttaaatagatatgtcattatttcatgggatattggtggctaaaccatctgaattttacgttttataacacttaaccacataaagtcaatttttgacggcaaaacctattgaacccccattccgttttgctatgtaccccttcgtccaaaaatcacagttaaatgccacagtggactgtccacatgtacacacttgtacacgtggtaaatttttagtggttcacgtaatattaattttaaaaaataattataaatatttaaaacaaaattaaaaaattagaatttttttttttttactttttttttctctttttcttcttctttatttctttccttttctttttctttcttctttcttcttctttttctactgaacctctcccaggccctcctttctttctctcgtctcaccaccggagttgaagtacccaggccagaggcagaggtagaggtggagacggagccatttgccctctctttctctctcccgatcttctccttcccaaaccctctctttctcgtctcttctctctctct

SEQ ID NO: 16918 - DNA, 3265 bp, Cannabis sativa
acccaccagggccgaccctatatatatattttggcaaaaataaaaatttgactcactgcaaaatatatttaataatttgagaattttttttttttaattttatcaataatttattttttcaaaatggggtctgagcggtgactgataagctgaaaaccacataatgtatatatattaattgacaaaactatagaaattaagaaaaaacctgtaaggtgtggttcttgagaagaggatgatcaaaagcaggttgtttgtatatatcaacacaatcgatcacgtcaccatcatcactctgccaatatatatgtgaaagaaaattacaataatgacaaaagagcgtgttcaatattttcactcgtatttcaactaacatcaattgttaaaaaagtcacacaatttttaattgattttggctgtatataactgaatgagaacaaattttaagaatgatatatctctaattttatatgtgaaaagatgataataaacatgatattggaaattaaaagaaaaagagattaattgtaaacataatggagaaaaaggttacaacctctatggttttgatcgttcccttaagcttgcctaactctgaactatgtaatcttcttccatatgcaatttcaatatttggaatgaatacataacataaaattaccaaagcgagtatgttactcgtaaccatggttctaacaatattttggaaactcataatatttgtgttgtacgtgaacatatgcaaaaaaaataagattaagcatatggcttgtacacatgatccctatatatgtacgttgtacgtatatatacacacataattttcgttccttttctttcaatattcataattatatacatataattaagatatcgtttaaaaaaaatatcgtttattcatattttccatacatattgtttgaaaaataaatatatatatttccatgatatataagtagataagcttatatttattagtataaatatatatatctttcgaaaccgtagatgtaaaaaagttaaaatctatctggaaaagtaaccataatacgttagaaagataaattaagtagagattccagaaaaagtttcctaaagacatgctgctacgcgataaaattttaatttttttattatttaattataattagctaaatttttacgaaaaaatcaataaattttgtattaaaaaatttatttatttctataattaaagtaatgagaattaaatatatataatatatactaaattctgatgaaatatttggaaaaagagtttctactatatatattgtaatatctacgtacggttgatatgtactgtagaggcaaaaatctttgctatcaaatctgttcattgagtgatgttttcacttgcaatgtaaattggagttaaatatatctatctctatatatttattccctatttattaatataatcgaccaaattaatcctatagctagcacttatatattttgacgtttgacttttgtgacactgtgttattgatttaatttttattatttgatcaagacaataattatcgttacgaatcttgcaatactatctgattttttatttttacttttcaagaacagtgagtatataaatggcagcaaattaagagtatatatgatcacgatataatattacagattttacgatccattgttgatcagcttttagaggagtaccagtaattcttgatgatttgcttttcgatcgatttggaatcaaattaaaattttggagatttggcacaattaatttcacatgccgtatggatcttatgccaaattaattcaatcgggttccaaaaactaaatcagtaatctccagaaggtccaacgcagatcataaaattccatcttcataaatattaattgttatcacaaaattacgattggtttttactattactaacagattaatttttgcttggactgggatttagtccttgtggatcccctgtcgggaaattaagtaagttttttctctctccctctttctattcgttcttaaagaccgggtttactatatttttaaagaatttccatcaaaaaatagaaataaattgaaattattaacgaaatcaaaattttaatttctttcctttcagaaagaataaattaattaattccattatttattttggtttcaaaaagtttgtaattgatgttttctcaaactttgtttggtggttcgatattattattattatttttttttttttttgtatttccgaccttgaaattgaaacagagtcttcttatgaggaaaatcttattgctatatcgatgatcacccattttctttctttttttttttttaaaaaaaatagtaattaagtgtattacaataatataagagttcatcaagtagtgatcatggtaaactaaacttattctataaatgtaaaaacaaaaaaagatgatatattaaattaatccattattagagacatttgtctgaatacccaggaccaccaaagaagaaataagttcctttatcagtagacttgtcttctccaattctgacatcgtagcatactggcttggtagcataagtggtgagtttttctggatctttaaaggttaggccattatcagtgtacattaaattactaaaatagcttgctctaccaaatccttcaataggaaaatgaccactacccatttgagtttccgtatgatgcccattcgccccatcgttaaaaatttccccaccccaattgatggtatcgccacccccaccaagcgtcttgaatacagagcttggccaataacctattggttcacttccaaattccagccaccattctccattctctttgtgctgaatacacaatttaattagtttgaaagatatatatagctgcatgtgtagtatagtatagtgtattatatataatatacctgagctaagctaacttgtattgtggtttgtaccccattaaagatggaaacaggttgcaatatagaacctaaagcagcactcttgcttacttgtacaaatccgggacaatcaagattgtaacaacctgtggttctatacccatcactctgcagatcaattcaaagtcccacaggagatcaaatctcattagaatatattgcatatgtaattaatatcatatgtatagttagctttattatgcatgcccaacactagagatgaagcttaatatataagtgtatatatagagaattaagtgtataataaaagcatatgggctacttacttttaaataattaataatttctt

SEQ ID NO: 16919 - DNA, 3005 bp, Cannabis sativa
ttattattattattattttttggtataaaactttataagattcccagtggaccatccgaagtggaccaaggaagtccaatatttgggccactgaatatgttggacttttccaaaaagaaatttagaattgtttccccttttcttctcctccatccttttcctttctttgagtgcattattatatataccttttaccaactttacatgcaactattttcctcttgtcaaattctccaccctctttacgattcgtcacatctttatttgaattcactttatcaaataatcaaacatctctcaccatggcccccacacaatggactccaaaaaccccccaatactaaaattactcacaaataacataaaataaatacacttttatatatctaacaagtatatatatgacccaatacgaattacgaattgggttattcaggcttgaagcccaacccaaatagtaaaatataagttgaatcttatcattatgtgtgtgcaaattacaggacacgttgagatcaagcccaccagaaaacaggagtatgaaaaaggcaacttttgctggaattatgactacaacgactttctatattctatgcggttgtgttggttatgcagcatttggaaataacgcaccaggaaatttcctcactggatttgggttctatgaaccattttggttgatcgatttggccaacgtttgcattgccattcatcttattggtgcctatcaggtaaaattgtgtgaatcacatatattagtttctcttatgcataatttcttatgataaaaacaacaacaacaacatcatcatcagaatgtgatttcccaactttattaattttattatcatttccaggtgttctgtcagcccatatacggactcgtagaaggattctgcaataaacgctggccagaaaacaagttcatatcgcgtgagtatgccatgaacattccattccatggtgtctactatttgagccccttcaagttggtgtggagaaccgcatacgttgtagtgacgacattagtagctatgatattccctttcttcaacgacttcttgggtctccttggagcagcatcgttttggccgttgactgtttacttccccattgaaatgcatattgttcagtcaaaaataccaaagtattcattcagatggaatatgctcaagatcttgagcggtgcctgtttgattgtgtccattgtcgctgctgccggatctattcaaggcttggccacagatgtcaagacatataagccattcaaaacacaatgatccatcacaatagccttagctagttgtccccaacggtgtgtgtagtttcttccctctcagtattaaaaaaaaaaaccataaaaattattattattattataaaataccttacctgcaagtctgtatgttatcttcaataccaatgctgtaaggtcttagtctgctgatcaatgttagtattattcgtcagaagaaaaattgcaaaacaaaatttcttcaatataagacttttacttctacaataactcttaattgcgacgtttttcatcaaccagcctagaaaaaatgaaatcaaataaagaatagaaaaactgtgaaaaaatgagaggaactatttctagtccctattcaaaagaagcttaagacctactattaatgtgcagctaataaggactgattcacatgaagatggtagatgtccattttcttatttgtgtttaatgttcaagattaaaacccaaatgaatattcacttaaaacactattttaaaggtgcatgttgaacactacttcctctaaacaaaatagtgcatgttaaacacttgggctcttttggtacaccgatatattgtattgtattgcattgattagtattgtgttgggttatattgtattgtattagtattattaatacaatattatgtttagtatcaccttgtactaataggttatataaaattataaattcttcacaataaactcgaccgcaaccccaaccacggcttggactcggacccggacccgaaacgccccaaacccataccagaactaggactcagatcccagaccgggacctgaactcggactcggactcagaccgaaacccggtcctcatatccaaacccaaacccatggaaatggacttcggacccagacccatggactcaaaccccaaacccggaccccgaccctaaccctgacctgaacttgaaccccagacctgaaccccagacccaagtcgagacttggacctcgaacccaaagccaggttcggccgggctcggccccaaacctcagactctgaccctagtcccggtccgagatccaggtctgggttcgggtctaaggtctgggtccaagtcctaatttgggtttaggtacaggtccagggtctaagccccagttcgggtctagggtctaggtctcggtcttgatttggggttcaggtttgggtcggggttcgaggtttgggtcagggtctaggttgggattggggtatgcgatttgggtttaggtttgggtcccgtgttcaggttcgaatccgagtccaaggcctggtccagatttgtggttcgggtacaggtacaggcctagggttcgagtctaggttcgggtttgggtccagggttcggggttcggttctaggttcaggtctagatttaggtctagggtgcggggttagatctacggtccaggtttgggtctagggctgaggtcgggggccccgacctgaacccgaacccgaacccaaacctcgaccctagacccaaatcgagacctagaccccggacccaaacctaatttcgattggctcggcttcgaacccaggtctagtcgggcccgacttcgaaccccgaacctataccgtagttccagttctagtccgggttcgggtttgagtcctagttagagtttgaggtttggatccttgttcgagtctgcggttcaggtctcggtttggggtttgggtccagggtggaggtcggggtcgaggtcaggggtcga

SEQ ID NO: 16920 - DNA, 7498 bp, Cannabis sativa
agtgacgagtaacatgtcgcctgttgccaagtatatgggaatttcaataacgtttagaagtttgaagctccaatactttaagcaaatgttctaatctcattagctaaacttgatggtagttcctacacaataaataaaagttatttaagtttaagcttaatcacacttttccattctctctcctagctcgccaagattaaaagttctctcaaagaattcatcaaaaaatgattgaatgatgagttcaaaggcgtgttgtcctcactcgctcctcgtttcattgttgtaatctcaaccatcaccctagggattgcaataaatattttattacaataaaatttctttcatgtgaaagtcttgatggtcttaattgattgaagggtatctcactacaaccaaccatgagtatgaagaacggagttttgtttctcgtgtgttctgtgcttcgattcatgtgcgactttcaagtccttttcaattatattctaatatatttcctttggggaattactttttgtttttcattgacagatatttgaggaattacttttagcaaaagaatgaagagatgtttttgctaaaagagaacagaaaattttcagctgatttttttttttttttttgtttacaatttcacattacactataaaatgtcatttcctggtagagaaataatttcaattggcatgtgaaatgtaacttaacctgtaaccatctttccttttttcttaccttgggcctcctaaggtagctctatgattattatctgttgtggtaacaagtttccttcaaactgttcaacatttattgaagctttgtgtggaagacttgtggaggtccactcctctttcacttcggtagaaacggagtagttgaaaggaagcaatatttcattgtttaactttataaggatacaagttagtgtcgttttcctacataaataagatttatgaaaatattacatatacagaaccagagaattcatgttttaggaaaagtaaagtaataataatacaaagatacttgatgaaatgtaaatattctcctcaaattacatatagagaacatatgtgtgagaaagagcaaaccatgtcctgccgtatattcagtgagagttctttttttttaatatttataattctttataagaaaaaagaaacaaaatgaaccgattaaatttctcttcaaatgcatgtcgttattattattgaaattattttgtttcgttaaggaatgaaagagacggtcctctggagcaagaactcgttcgggagttagtctatgaatccatataagcccgtacgacgtcaacaattggagcacaacatattggacaattcccactgctccattgcaactcgtgtgcacacttgaagcacgtgcacatatgcccacatctgttataacaaaacgatacaaaatgaatcgaacgacatgacgaaaacagcttcagtcagggcaagttttttgcttttagaacaatgaaagctacctgtataaaagcgagtcaactttcattgcgtagcagatgcggcagtttcctttctttggtaccccctctgctgctttgacaaaataactcagagtctcagtcataataaagcttccaaccccacccaaaaaaaataaaaagaaaaattgagtattatttatttttggtagaaataatggcgtgaataacctgattgagtttcttgcttcatggattgctgcattaacatcatctgcatgtccatgcagctctttaatgaatttcttagctcggacatctctcgactaagttgctccatttgtcctcttagttcaaaaattagatccatttcctgtgagtttcatttattcaagagatttatttcatatcctaatatgtactttacattatattgctgaagcttaaacgaaatagaacagataaacaacttaccattgaagaatggtttcgagaagaagagcaatgcctggagatattatagtaagattgagacgggaattcttgacgtggagatgttgaaaaggcccggtccgaatcatcaccaatttcgttataactccaagaccttaacagaggtggtggtgaagggattttctgagatgatattgattgatcaaaataatcactggcttcgtgatattgaccactgatgaggctttcttcatgttctacttccggttcctcatcaatttctatctctccttcaatctcttcttcctcttctgattcttcttcctcatgttgttgtagttgacgttcttgtataaacggtgtcaattggctatgctgttcatcatccttttcttctcctccatcactaccggcaggatttgttagtcttcccaagcgactctccattaatctatccattttctctcgaaagtcacttgcaagaaagcttgatactgttcctctgaatacattcattgaaaaatcaaatttgttatatattcttgacagttaagcaaaatcacacaaagccaaacagaacataaagtttgttgtatggccatatgttaatttcaattacatctattctcattggaaacgtattatcttaacttgatatctaataaggaaaatatatgctctatgaatatagaggataagtgtaagttaatgtaaaaactattatggaaagctatgatcatattaattaactaccttggatatctattttcttttcaaaatttaatgggaacatatttcgttaaactggcatggagtcttagtatgtaatcaaaatgaaaaacaataaacacaacaataataaaggaaaaagaggtgcacctttcaagtagttgacgaatttcaactttttctgagttagaattcagcatctcttggtaccattcctgcctgcggtcttcccaatagctccgaggcctagatatatctgcgatccagtcgaagctggtgtctgcatactgtgaataattttcttctagttcttcagcagcatcatttccattccagcagccatcaaaacaggtgcttaaatctgcagtttcttgtgactcaatatttctattcactgagcatgtttcactgggaagatctacagtggtattcacagcagaacattcttgtaaagctgagttctcttgctcaacaaaatgaacatcttgagtgtgtgagtcatcttccagcttattagggatagaagattgttcttgttgtgaatctttcttgcttatttcactttgaggacttctaggatcagctgtttcactctcaagtgttgtgcttcgatctgccccatagctaaatttctccctacattaaagtgagttcaaatgattaataagacccagagttgtattatccgcattaagaaataaaatttaaaaattaaacggcacagtaataaaatttattcaccaaaacaattatcttcatattgctacaaaacaataactattaaagtttcttttccaagtcagaaagcaataactatgaaagttaatccctttaacatatctaatagtatcactcttctttttaaacatcatcctctctgtcataatgaatgagagttcagtgaacacatgatacttataaaggatatttaagtcattagttagccttcactcacttttatatcgaataagtgagtagaaatgacacattgatttagtgaggaaaaatatcaaattaattttctttgcaaatataattcagttagtagttttttattacttcaaaaatgctaattttgttaccaaaaattgcctaggcacaatctactttgagtgtgttttttgttccgtatttacatggagcaaaggacaaaatttagtttaaataacacttttaagctactgacaaccgtaatgttcgaaagagtacaaaaagacagtaaagtttcgaacaaagcaacacaacacagcccacaatcatataaagctaaaaaaaaaaatagaataaagaaaaagtagagaactgaaaaggttgaccatctggtaacagactcaaccataaaagtaatgctatgataataatattttaatatgcaaaatagtttgtaataagattttcatacctgagatgcaggatggaagatccttgaggcagcctctcaactttaggtgacgttaactgccaacgatgctgatcttgaattgccacgccacgttttagcaacctaagtcgaagcatggactttaaacgataaaaacagaacaaaagaaaacatcacttgtgttagaataactacagacaacaccccaaacgaaaaaagactagaaaagaaatggcaagtggcaacaatttcacctgaattcgacctttctgggtaaatctagaaactgcagcgcgttccaccaacctgttgagctcagcatgcctttccctttccatctgcataagcaaatccgtgaatgcctgccgccctctgatccttggggagaataaacggtgctctaaaatatgatcacttgccatggtgcggtccacttctctttgtggcgagctcaacggctcacgatcattatcgaaagaggaagaagaggatgatgataaagtagtgttagtaggctgcccatgatttgcagccgttaatctcttgatgatatcagctactttgactgtctctctttcccctgcgtctgagttttggctacgagcaggagaattctgaccactccaatccgccaatgattcttcattcgcctgccctgtgtcgagagcagagctccctgcttcatagcctcttggtgcttcttcttcttcctcttcttctaccggaggagctgaattctcgttacagctcagcccgtaatctgaccggcttgtggtggacgatgagctttgattctcgctgttggagcggttcaatctcttttcccaaatctgaacgagagaagaagcaccgagattttgaattccggctagactatccgatcgaggcagagctgctctcggcgtatttgaagttgacaatgccgacgagaagtcagcctcttggggcttactttcaatcaaggcggctgttgttgttgttcttttagctgacagtgaacgccgccatggacattgactagatgaaaattcgtctctgtccttagatatttcaattttattctggttctgactggttttctcttcctttttaggaagaagagaattttcatcggcagggagtgaaatgcaagtgtgtagatgatccctgaccaagttcttgaatcttttctgaaaggaatgactttctctacacccatctctacgattatgatccctcaaaacacaaccgaacggagaagacgaagcgatttccacttgcgaagacgccatacttgatgtcttctgattctgttttctgaattccaacccgtataccctccttaattcaatctctgatattattcattgaatatatcagaatcaacgaagaacaagccatttggaagaaaaaagagccagggtgaggaggtggaggagaagttgaagatgtgaagcttcaatacaatccaacctcacaattttttttttgggggggttcacaaatgggatctatctttttctacaaactgggaaaatcccaaaaaggacaaacattacaacccaacaaaaacatgaggaggagctatttacaggccttctacatttgttatccacaaaaataggttgccaaccatttctgctcactatatttggaatcctaaacgaaataaacctaagggaaaagaaaaacagagcaagcacatcaaattaaacaaacaacaaaaagacaacaaagaaacagtgaataattatctaattaacccaaacacagaacagaacaagagacagaatttggatttttaggcgtgaatgatttctaaccccaaagaaatgctagatgaggatgaaaagttattttcagtgagagacaacaaggaaaactggagcgttagagttcttatgtacaaataaatttgacttgaaagaaggaaaacagggcaagagagattactgctaataaaacagtgagaggaagtttggtgaggaaaaagtggagctagaaagagagagacgttgggttttagccgttgggaacgtgggtcataacaattacaatgtaattatctattaatctatagtatggtgtatgggtagaggggtataatgtcattaataagcatattaaatttggaagaaaaaaaaaatcatgatagatttttttccttattgccactatttttttttttttactagaatccttttcaccacgcttgaatctcgagcatacaggaaacctttcatttccaataattaaagatgggaaatccatttgcatatataattaaagagaaatggtatatttctagctctaagttgttataggtgttggagatcctcagtttgagtcctaagttatgcattagtgtaatatattttatataaaatacaatttaatataagactatacaattcaatacagtgtaatacagcgtagcaaacatacccctaatgttctatttttttctaatttttgtttttttttttttgtatttaacatttattaataacaacaattaattaataaaaaaaaattctaattgacattgtatttatcaaatgatgaatgtgtcttctcacttttataacttacactatatttattttaattatgaagtcaaatttaagtgcagttaaaatgtaatttttttttacttttttagtattacaaaattatattatctctctatatatatcctattatcttaaatttctcttattactatcacccttcataagaaatattcatttatctatctttataattgatagtcaaatataataataattagaatcatgtcaatttaaaaaaaaaaaaaaatactatagtaacttcttttttcttgctttctcatttttctaatttttgtttcttttgttaatattttttctatttaatatcaactataacaattaaaaaaaaaaagtaataactaccccaataaactaataattagaaccatagcaatttaaaaaaaggtgatgttttgttcaccgtaatagtaatcgtaatggtaatgaataggtccattacattgtttgtttttctcttttagtttttgtaatccataacaatgtaatgttattacattgagtattgtaatgatgattacataccaaaactaatgtaattcccattacaattacactccatgacaaagaaaagatagtattttaataaaaatatactaaaaaaagtcaaaagtctatattacactttttttaaaaatattttagagttataaaataaaagcaataaggttattttggtcaatataaattttattctattacattctggtatcaaaccaaacacagtaattatgattacaatgtttattccaagtacaaaccaaacattataatcaattcctattaccattcttattccattacattactattactattaccattagtattccattactattacattatttgtcttttcattttactatagcaattaaaaaaaatatactaatatgtaaagaccacttagtttaa

SEQ ID NO: 16921 - DNA, 6354 bp, Cannabis sativa
  modified_base (4000)..(4000): a, c, t, g, unknown or other
ggtaaaataaattccaacattggggacgttacaaatggcatcaaaatcttgacctagccaaaagtgtggtcgacgaggccgttagacctcgtaaggggcaaattgtgatagtcagtagtcccaagatccgtaagaagaaataccgagtaagttgtgcaatctcgtatttcttggggaaggtcaagtgtgatgattcaaagactgtgtaggtatgggacaacacagttgaagagggtttaaatggattgattgatactacctatattaacaaggtgcatcttgttttttggtagcccaccacgaaaaaactccacagttaaacgtgcttgacctggggtaatttcaaaatgggtgacctcctgagaagttttctcaaggagcgtgcgagtaaggacaaagtatgtgggaaacactcttatttgtttgtagggtcagtttttagtccaggaagcagccataatgacgtattcgtgtataagagccatgagtccgtgggggaaggcccaatagaggcttgaagcggggaacattacaaaggattaatcaatattgaagacctaaaactactttttcttctcttatctattttctgtgtttgatgtctaaatctcacatccaatttcttctcttctctattctctaattatagattaatgcaatttatttaattttatttttcattattatgatttatgtaatttatgtttaatgcttgtatatgcttaattactatttacatgatttaagtttttttattcaaaatttaaaaagtgagaattgaatatgctataattgtttagcgtaactgtatggtttgtgtagtatttatgatttttatacttaataaattctatatgtttaaatttatcaaaaagaaaaatataagttgaaatttatatatgtcctaactcgaatatagatatctttcataaattcgctataagaaggaaatattgaaattgtgttataaaatgttatggtggataggtgatgagattaaaagcccctagttttcatccatttacttttttattaattttgttatctcttttagatttaatttttattatctagtttgtggttctacattttttgaaattaactaattgttaatcaactagaatatagaaattaatttttggtagttaatatatcaacctttatattatttattattgtattacaactacgtatatttgtgtatcaagtttagcaaataatattattgtattaaataatacttatataatatataatacaatataacacgatatttaacaatacaataatacaatagggtgtaccaaactaactctatatttatactcctgctgaaaagaaaagcttacacgcacaagtccaatagtacatactacatacacacatacaattactgagttcatacttctcaaatatgaaactaatcataacatgttagttctcaaataaagaaaacaacatacatatgtattctcttatgagaaaggatggtatatagcttaattaattaacatactccattcatcgcaaaaaaacaaaaataaaattaacatactcgatttttctttcccttgacaaatcgcttccaatgttgggtcacttcttcttcaatctgtctatgagtcttcttcttgatcacagtgtcagtgttgatcggcgtgagactggggatgggaagatcgtccaattccttaactactttcaatatgtccgacacaagtctctcgaccaaaccacgactgaagtcctccctgatcaccactcgaataacagagatgtgttcggcgtcggcgggcatggtgtaggccggcacgatccacccaaaccttctcaagctgtctgctatgttgaacactgtgtatttgctactgtctttgagagagaatgccacaacgggcacccctatgtcttttgagacaatgtcaaacttctctgtttcctctaatttgtttcggagtacttttgcagttgcagtgcagttttccattatgttcttgtaacccttttcaagtaacaatgttgctagtgttaggctttgcataattaatatttgatctttcttttgattgtaaaacaaaataccttgactcccaaacggatgaattgataatactgagcgactatttgagtagagcctgcgagaaagatgtattagaagaggtcagttgattaatactttcatataacatgtttatgttattcaaggcttgttaatgagaattaaattaaatggtgagaataagtaaattactaattctagtgcaaatttaaaagcacctttggagaagttaagggtgaaagtgggttgatcagatccaaggtaattgatatggaaaataaggtcttcaggtaagtcctctttactcctccacacaacccatccaacaccagcatacacaagtccatacttatggccactcacattaatacttttcaccagaggtaatctgaaatcccactcaagatctggataaaggaacggcgcaatgaacccgccgctggcagcatcaacgtgaattggggtgtcccaacctgtctccttgtttttcttagtaaggagttcattgactttttttacatcctcaaactcaccatttaatgtggacccaaggatggctgcaacacaaatggtgttctcatccaccatctcaactgccttctcaggatccatcacataatatccttcttttagtttaacctctttcagctcaacctcaaagtaccttgcaaatttctcccaacatacctatacattctcgcaccacctcaatcaatcagaaaaaaagcaaagatagatattcattctgaaagagtgtgactgatattagttacttaaacaacaccagtgtttagaaagtttgttaagattgagaactaagataacctgaacattggcaccagtgactatattaggcttatcaatgggttttccctctgcttttctcttttgctgccattttctcttgaaagctagaccagcaagcattatggcctctgatgatccaacggttcccacaccaaccgcagcttcttcatctcccgcaggagcattgaaaaggtgggcaatcatgttcacacatcgattctaatcaaataatgttagtgatattagtgacgatcaataattaaaataagaatgaacagaatttatactcttttcatatattttatattcgagagtgtaaaggtctctacagactacactctttacccgctttaatttaagttattattcatgagaaactgcatgcatgcgtgtataattgatacgtagtacattttacaaattcgggagaaaaaacagagcaatttatataaaaattgcatgaaaaattttgaaaacattaatttaagaggtaaattgtaaataattaatcataattgtttttttcacctatttaatatatataaaattgtattgattttctttttttttttttttttttgggtggactacacagcctctactcaatgaatagccactcaagtacacttggtaaaataaagaaaaacaaaaagcttaagtaatcggacaattaaagtagtattaattaatttttaaacaagtagagtaatacatttaatattatataagaagaaattaaggacctggatttcggtggtgacagggtactcgtccatgtcaacgtagttcttgttaacggaagccatgatgagtttatcacactcaggctccatccaagtggtgacaaaggaggccaaattgagccttggagtaccatccaacatgagctcatcatgtatgaactggtaggcagcttctttaggtatggtctcctcaggcatcctccatttcgggattggctcacgtacgtaccgagacgcaaacgtcgagtttaagtagtcctcatcgtcatcatcattgccacctctccccttgcccgcccttgtcaacaccattattttttttacagtttttccttctctatatcttttctcaatgtatagtatttctacatgcatacatatatatatatanatatatatatatatttatagtagtagcaatagtatatgcgtacatataacatattttacacatgtgcattacaataatggtgctgtcgctctcctttattgtagggccttgatatgtgccacttatctagctaaagctatatcccttctaacaaaaggcagctattcgattgggatgtgggagattttgtttggagataagataagaaaagtgagaacagtacctcttcatttttctatctttaactatgaatgtcaagataaagtctcttcacacattctccatcttgtgtatattctatacatccttaatattaaggtccacattgtgcttctatcacgtagtagtttctttcaaaaaaaaataggtctacattgtgcgcgtgtttgtaattgatataatcgttcaaataatagttaccaaaatttaaaaaaaaaaaaaaaacatcaaaccttaaatataacatccatctagttagttatatatatatatggacacttaattaaaaaaaaataaatttgaatttctatgcttaatttaactacttaactaaaaaaaatatctaaaaatattactttttacactatatcaaaaatatgtttatatataaaatatttaagtcaaattcaactttttttttgccgaaaaactttttttctcaaatttttttcagctgatgaaacagtctcaactcatataatgtaaaagtaaaagcttttttttaattagatagaaaaactaagcataaaaactcaaatttttatagtactacccatgaatgggtaatactcattaagagtgcatctatatatatatatactaagtagatgttaatagttttatttaaaattttggatttttttttagatttttctaatttatattacttaagcaatatagtgttttttattaaaacaaaaaaaatatttagttttagggctcgtttagcacgttgtattaagttttattgtatgatattgaactaggtaatatagtcgctcttccagcggctaatttatttgtttttagtattataataaaatataattatttattaatataatacataataacttaaatattattttcatatataacaatactgaaattacatcatctaattatataaaattttattttcaaaaaaataaataaaatttattctattaatatattatttattacatattattattgaaaaattatgaatgtgttctattatttatttattttaaaatttatattattatttatatatgtaatattaaattattttattaaaaaattgttattaaaaaaaataagtaaatagtgtggtgttgaaaaatatggagtgttctctataaatataatgcattatttttttcactaattgtttaacaccgcatctcactcattgtctcacctattatctcacattgcttcacattgtagtcatcattgtatctcacccactatcatcaccgtatgccactcattgtcatcattgtatcttacccgttatctcataatatattattcgttcccatcaccgtatctcacccattattatcattgtacgtatctttcaacaatatacctcacccgttgtcatcatcgtatctctctaatcgaactctagcaatttttaaatagtcatcttgttgaggaacaatattcttcaagagttgtcttcttaacaatataactctcaataacttccagacttttggagttggtaaaagtattttaaattagttgcactcgtaatatagagaagtcaatatatatatatatttagagtaaatataaattaatacgtacacacaaatatctataattatatattgaaatattaaatgatggaatctaaataaataattatttttgaattttttaatgttacgtagtagaagttactatcacaaaaaatagacaccgtctttttatacaaatttgaattattaactttattactatatatatatatatatttaattcatatatagtatatatataaatttaaatttaagcactctagatgattttatttttaagaaattagatattatatgtgtattgatatttttaatcaattagtaattatattatatcaattaatacatcatcaatttattattatattttcataattagttctcaataaatattttatttaaattaagatattttgattttaaatttaaaataagggaacagcaaacataaaaagataaataatattgaattttaaaaaaataaaataaataatattttatgtatgatttacttatttataatattaaaaattgacatcaaatttttatgtaaatacggtttaaaagagcaagtgaaaaatattaaaatgaatcata

SEQ ID NO: 16922 - DNA, 6219 bp, Cannabis sativa
atcaccaagtccaagtgcaggactttttggatttcaactgagaaattattgtctaggaaccttcgctatattgtatcttcaaatgacatcatatctacaaactacatgatcttaaaacgacaatattctccatctatctatggcttccgatcaaccgaaaaagatgaagatatcgatcattcgacgactactattatggtgtttatgttgaattattgatagaattgttaaacaaacattgcaacgtattaatacttggtaatatacattatacaacaacaattatcgaattcaaattttgaaatatatctctgtgagtttcaatttcatgtacgaaactggaaatttcattttcaatccgaatacgagaagaagaagaaaaaagaaacaccatacaaagtacgaagcgaggatcagagctaaccagaaggaagagatcctctatggcttggaatttagaggtgtttctgaaccttcttctcaagttcatctttcttagctccgacaaccctgtccacttcctttcctttcttcacaaaaacgaaagtcggcatcgcctgcacaccgaattcctgcgctacttcctgagacaaaaggagttcaaaaatcaaaattcgaaacctaaaataggtacaaattgaaatttggaggaaaagaaatgcgtacggataattcgtcgacatcgatcttcacaaaatcagcggcggtgaacttagtagagagagcgctgaagatcggcgccatcatcttgcaaggaccgcaccaggtagcagtgaaatcgatgacaatcttctctcatacaatttttaacccaaaaatgaaaaattcagaaccctaatttgaaatagaaaacaaagaatggcgaaaacagacgaagaataaaaagattgatgatgaaaattggtaagagtgatcatcaccagcttgtttgattctttggcttcgttgaaatggagctgccatctggccgttgaatgaaacgcgagaacggatgactgatcggacgatgaggaagagtcgtcagcattcgcttctcctggtccgagtaagcttgagagaaatcctcccattttctcttcttcttcttcaactgaaaattgatgcagagtctctacgagtcttggctgatcaaaatctggagggccggcttgggttgactaccgagaatattaatggagattaaaacgactgcgttaatatgcttattattattatataccttataaaacaaattactaacattaaaaaataattaaaacaattataataataaattaaagtgtaatatgtgcattgtcagctacatatttaagaggttcactcaaaaaaaaaaagctacatatttaagataagataataaataatttttgtttagtcttattaatagtaatcaacaattaatcggctaaaaataaattcaaattaaaaaaaattataacagtaaaaattgttgcagcatgttcattcaatattgtaacttgaacacttaactattgtgcatggtacgttattcctaaccacactcagtcgcagagatttattatttccaactactaagaacgatttgatggcgagctttccaaaaacaaaacaaaaaaaaaaaaaccaataataaaacaaaacaaaaccatgtcacatagacaagagtaaaacactcaaaatcatatcacacagacaagaccaaaacacttaaaattatatcccacaaataagactaatcacgatctttcaaaaaaataataataataagactaatcacgatagcaaaaatcaaatcgcgattcaaaatacaatctcaaccaaaccgcaatgcccagagactttaactacaaaatcaaagcctaatatatgtacaaattgagtttatgattctcttaatctcttacaccaaacacccaataaatagtaagaagagtttcgccaactattcagtctcccaaaaaataggtactattccatcttattaagcaattatttcttaaatgctttcgcagaaagagatgtatatgatagacaaattagaagaaaaaaatagctattacaaaatttgaactatcaaataattaaaaatttatgcaacaccctctaaagttgcaacttgtttcttgtgactagtaaagttggttcaaagacaatatcaatggctaatctacaaacaaagatcgatcaataattcagagttcactgaaatggaactggaacaccttgtttcttgttcacaatagccatggctaaatagcgagtacccattccaatcggtgcttcttcatccggtccttcccaaaaaggagcttctccttcccccaccagacgccaatatccagtccttaaagattctgcttgctcatctgtgcagtttggcaacaaagcatccactcgaaaatttatcccgagggaaccaaggaactgagactgagtaatcgggccataaacagccacatctcctgcaagagattacgagataacatggttatatcttcattcttttgttttcgttgttccattcaaatgtggaatgaaggaaacgcacctgatacttcctcagcagaatgccgaattgaagcaaaatcaacatatgcactgagatctgctgagcctggatcatcgagaatgtttacaaatttatgtttccgaattgcctgtgataaaatgtaatacagcgtcagcaagcattaataggaaagaagaatgtaaaggcttttcaaacaggatttggcaccaaacatcacacgatagcagaaaacttcgcaaagctctccacatcagaccgtgtaatcttttgtttccaaattatattattaccccataaaattttgcaggtttaaatgatcaatagatacaagcacagaacatcacagatacataaatgttaatataaatttaaatgcatgcaaatttgcttagttggttactaagaaaacacaatactgacaaaggcaaggtacagacctgcagactatcggagactatcccgttcatgccataatcaattataagagccccacctccatcagaactgattctatcggcaatagtttgagtcagctccattgctttggggcaaacctcaatttgatcaagctttgttacttcttcagttgaggcccatttgcaacgttttgccagatagagagttgcgggtgtaggctgtggagatagaacaaaacgaaacctagccgatatttaagcgaatcaaataactctgctaataaaatttatctgcatacagtctaattctgtcaaaagtataaaaccttacgttgaatcttctgcaacatcaaccattttttcactccagcctcgagaagccctctgtagaggagaggtaaaaatcagacaagaacaagatagcagcaaatatgaccaagataccggcatggaaaataaagaaacatattaatgatttagaaaaaataataaggaaagatacgtatattatttatcgaaaaaaaaaaacaccttaaaagatcctttatttcatgtaaatgcagaaaaatgcatttcctgattcaaaatatattgaatatagattgaaatgtatttgaccaaaagatgtgaaaaagatcatacctgaaattgatgaactggtaaagcatcgtaaaattcgtgagcaattatgattgttggcactggcaaaaggattcgagagaacaaagtaaggaaaataattgtagttatcagaagaaaagaaaaaaacacatttaaaaaaatattaaaaggtcaacagatacaagtttgttgtttaaataaattgaaaatgaaagtaaaatgttgttttttgttttcaatttaaaaatattaaaagctcaatagacatactttattttactatctgtttttggttaaggtttataagtatgtattcaaatgtatatatgtagagacacagtatgtacatcttttgttttacaatttatttgaaaaaaaattaaataaatcactagaaatttgtcttctctttagtaaataagaaaacaaaagttaatgcagactaaacaaatttctagtgatttatttaatttcaagatgggagttatttagttaaggcaagcaaatccttaataagctgatatttatgagatttgtcacagcataaaatttattaaacttcacaacttggtttccacaagaagcatttgttatgcaaaacttggtcaacactaaaatccaactcttacaatttgcatcatcaagtaagctaacaaaaaagtaaaatattcaaattcaaagaactgcccacacaagtcccatcttgcctgtggttctttagcaacagtaataaagagctttattaggcaaactagattcatttgagaaattaaattgacaaaggttttcaattcatcatgttaaaggctaatattagttatcaatgcagaaaagttttgcaagcacatagagagaaaagaccagagaacgcatttaattctattcaatcaaaaatacacattacaatacacaacattaacaaaaagataacttcttacctcctgaaggaacttgctccaatgcagcatgccatgataccggtgtttgagccaatgtactaactgtccttttattaacctggtctgtaatatcttcatcaacacatttcaagttctcgtgttgaagtttctgtaatgttggactacactccaccaagtgtacatgcagtgactcaatgaaatttttaaactttgacacaccctgcattaaaagtattctattaaagatacacttccatttctctgttgtctacctcaaaacatgaaatttgaaatgagaattggcaattcatacacgaagaagatcaaccataagagttcctcttcccgggcctagctcaactagattaactttcttgggttgccccatttgctcccacaagcacattgcccaaacaccaaccatctacaacaacagttcaatatacaaactagttcattataaccaaccttcaatactcaagtgaaactaacaagaatgaatctcaaacaagcaaattacctctccaaacatctggctcacttcaggagaggtgatgaaatcaccttctgctccaaacacatctcggttaatatagaatccagctttaggatttgtcaatacttcctccatatactcagcaaccgagattggaccaccccggaactaacaaacaataaacataaaaattggcttagcatgcgagaggtacaggatcgataccccacatcattgattttttatgttttatttttttacagcaaaattttaactaaaatttcaattaaaattttaataaaaatcatgttcaatctaatgttcaactcctttgtacaaaacataatataaaattgtttcaatgcactcttgaaagagatattacggtacatccttatttgttttgacatccagaagagtttttagcttttttttttttttttgttatgatcatgtacctcttaacaagaatgaacctcaaacaagcaaattatctctaatgtaaattacattatacaatggctctaatgaaccatctcagctgattattgtgaaatgataacaatattcaccaacaaagattcaaattttgcaaatactaagttgagatgataattgaaaacaaaaaaatatgcacaaaatcaaagaaaaagttggaaatgggaacctttatgatgcctttgagatgtttgacgagctcagaatcagatgtagattcatgggaatgctctaccaatccaaaaaaataataaataaataatttaagttccttactcattacaagaaaaaacaaaaagaaagagcaaccaatcgaaaatcccaataggaaaaatgagtgattttaccaggcggagtgtgtagaccagagcgatcaacggagagcgtggcagtgggttgagaagtggcttggtttgcgtcctctaactgttcgacaaaagaactgtttggaatttgggaagaagaagaagaagagaacaaacatttgggaggcaaagaaggtgaaagatgagaagccaagtagtatgatttggcaatatggcggccagtggaagctcgttgcagcactcgcctcagcattttttttgttttgggtttggggtggacggtgtggcctggctagcttggcctcctgctagagctcgtttccactatacaacaagcaagagtatgcattagtccattaattacatgtcattatttagatatagtttgaatcaacgaacgaacaacttggggatgtagctcagatggtag

SEQ ID NO: 16923 - DNA, 6417 bp, Cannabis sativa
aacagtttcttcctgttaatactcattcttgccctaaattacttactctcagtctcttaggtcttttaataactgttttttcagtgagcagaaagaaatttgatataatgttaaagaaaatgtaattaatctcaaactttggtttatgttagaaaagaaaagttttttttaaaaaaaaaaagttgatataatttatcctaatctttatggctgcatgttactgaaagaggttgttttggtatgaatatttgtgtaatgttttgtttttagaaaagaaagggttttctttctttcttttatgttaggtttttttttttatgaacatcattgtttatgattgcatgttagtggtagaggttgttctagtgtgaatacaaccatggtgtttgttgtgtcagttcttttgtgttagggttttaaattttaataatcatcatgaccaaaatgtactgtacatctttttcatgtaatttgtgtttatagagttaatttacattatctgactctgcatgtttcagaaagggattatcaagatgagttcaagaagggcatcttcatattcttcatcaagcaaaggtaaagctgtagcaaataattttgagcagctgagccaatctgtggaaggtctttctctggagtcatcccaagacagcggcaagtgggaggaagtgactactaaaaaatcgaagaacagagctggaaatggatacaatgctgctaaaccatggcctactcaaaattccagccccaatgcatgggctaagaagcctgttgttggaggaaacccgaggccattatcatccgcttcccctccgcagccttaccaaaaggcccctcagcctcaatccatcattcccccgccattacagaatggatggaactggcaatcaagaccagcgtcacaacaacatctggataaaccccaagtatctaatccttctttcgatgaggaggatgatgatgatgaagtccaggaacatgatgacgagtctgatgaattggaggattacagtgatgatgatgaagattttgactccgattcgagcgagaagagccatgatgatcttaaaaaaacgaaatggtttgttaaatttttcaagatcattgatgatctgaaagttagtgagataaatgatcttgaaaggcaatggcactgcccagcgtgccaaggtggtcctggctccattgattggttcaaaggcttgcagcccctaatggctcatgccaaaactaaagggggtgacaggctgaaactccataggcagttcgctaaaattttggaggtggagttgcggaataaaggaacttcagttgtacctcctggtgaaacttttggcaaatggaagggattacaagaggaggaaaaggatcatgagatagtctggcctcccatggttattgtcatgaacaccaagctagaacaagatgaaaatgagaaggtaaatcataatttcaaacattaattggataatgtatgtgtgtgtttttcttttagagaataggttattaattgctatataaatgcttaatattattttggatattttattttagtggattgggatgggtaaccaagagttgctagaacattttgacacctaccatcctgctaaggctcgacatgcatatggtccacaaggccatcgggggatgagtgttctgatttttgaggcatcagctaggggctacttggaggctgaacgcctccataagcattatgtagcaaaaggatcagacagggatgcttggaatcggcgtaatcgaatcttgtttttacctggtgggaatcgccgtctttatgcttttctggctgttaaagaagacttggatctttttaaccagcattcacaaggtctctctcttactttgtgtattgattgtatggttcttattttaaatgcgtttaatataatttcttgttcatttgaagatcttatacaatacacttttccttttttcaatttgttagggaagtcaaggctgaagcatgagatgcgatcatatcatgaaacggtcgtgactgagattagacagatgagtgaggacaatcaacagcttggctactacaaggacaaatactccagagaacatttgcataataaaagtctcaaagcatctatggttaaggtttctaataggctgcgccaaactttggaacaaaatcgaattgtgagggagaggagcaagatgcagcatgacgagaacacagaagaggtaatttaacaacttctgatgaatgttccttaagattagtgtgtttttattatagtggagtgttatatatgtttaggcgcacccacatcacatctatataaagaaaatctcacttgacccaagttcatatatggtttatgctttcctttcaagtcccattttcagcttttgagcttataggacatgtagtgatttgcctggcatagttgatatctgctgttttgcctgaaacgtactcctttgtgtagctccgttattgcaatgtcttattgattctaattccattttggctgattttgttgtctctctaaaaaataattacagatgaaggagcaagaggagttctttaaggaacaactgaagatcatccaagaatcaagagaggaaaaggaggaaaattttgagcggatacaacaggaagaacgtgaaaaggtttccaaatcaaaggctaagacttcaaagaatgcagggtaatgcggctgacttttggatttcttattgaactttaattaacacttgatgaatgtaaaatgtcctttttcttttttcatgttcagagctgaagaaatctccaaatttgtggagctacaagataaggagatggaactttatgtggaggagagggagaaactcgaaaaagctcacgaagagaagattaaagaaatgaaaaagagacattttgaggaggaagtacaacttgagaaggagctgaatgagaagttggcacttctcatggaaaagtactctcctctccatcccaaagagtaatgttcaaattaaatttaaatatattggtatcaaaatcttgcttcttcattgtggactccaaacaatttaccaatctgctaaaaatgtttacaacataattaggttattaatgtctttttaagtttttggtttgttttagtatgtaatcaatctctctttggagaaaattttcacaattatatccaaatattctggcatcttgaacatgtaaataatatacattttacaaagctttgtaatttttttccttttcacttttttggatgatagttgctacttttttagtgtcttgtttttgtaactttcaaacctttgaaatggttttggaattggaattttgactttttagttgcagtatagtttgatattataataaattcacatttacattccaatcccaaatatactcattgcagtatatactatattagttatttactactacacatttatagaatattattattctgaaatttttgaaaaaagtggagtttgggtaatttattttaaagaagttatgtgaaagtatgctataaaatgaagaaagatatagtagagaaaccgtcatagttttaagcacaagaatgtctagttagattactgagttaaattgtccttcaaaatatctcctcatttcaacaatgtctctttgctcatatcatatatggtaaaaactgtatttattttagaaataactaactgcaagtttttacatacaatagcttaagggatacatgaaatcaaattgagtctcaaacaaggattaatttaattttagtggagagactgagagtggagcaaaaaaaaaaaaagctttggtaaatatcaaatcaaattgaaaaaaatgaaaagactttactataaaactgctgctgctgcatcatatgttatcaaattaagttggaaaattaatagtaacaaacaaaatttagagaaaccctaacaaataaaaaaaaaacaaaaataattcaaacctaactaagggttttaagtatagtgttaatagttgagattatccaaaatgtaaaatcagctaactaattggtcttcttctcatcctcattggcgactgtggttgtcgcatctgctgcagccccgtcggtaagctgttgatcatcctcaccgccaaaaccaaactcatttacacgtttcttgtccactggataaatccatctttggtacacatatatcaaaaatataatatctgcaattccaaacaatttgaatcagatataacacaagtaaatagtgtataagttgaagtggtggacaagaaaaatgtacaaataggattctcaccgtcacggaagacagaaaggcgatgtagtgttggcatttttatgacaaaggcgaataaatcgtcgatgattgtgttgaggaacttgtatgtcatctgcctccacggtagatgtgccacagacttgagtttatagtttatgaaaagctgaggacacatcattatgaaacctgcacgaaccacatcacaacacaataagaaaaccattaacaccgaaatcagtcttttcgattatagttagaataagtgaagaaacttaccgaacatatagacacagcttgtgagtgaagagagaatccaagaataccagctcctgtgacgctcatacttgagcgaatagatagacgaacacacagcaaggaagaaaagaacgtaggacaaatacttcatagccgtgtcatcatattcttttgtcttgttacttgaatatgactcgcgatctctgaaccttaacatagggatcctcccggttctatcaatctaacaaacgagaagaatgattaacttaacatactccccatgaaatcttatacattcaaaaaaagatggatgtactaaatgtgatacctcaatgtgcatggctttcccaattttccaaaattcaatgcagcagccaactccagaacttgcaagtatcatccaggatgtatcgttgtcgagaagatagagaaacactatgagctgacttatgaaattcaccacaacagactttgcagagagtccttccatagacttatttttgttccaaaattggatatctgtatggaaaaaagaaaattcggattagtgtaatggtggaatctcgagattttatagaattaaaaagtttgatcttgaaagtaaataactcaccgttcttgaatgccaagaagtcgaacactgaatgtaataaagagaccaccatggtgattcctagtaggtaagggttcccttccacgaatactctctgaaataagaaataaagagtttagaacttttaagtcaacaggcactacgaaaaggtagatatctctttcggcgctaacatagaactcgacaaaatttagtttacagatttccaaccacaactgaatttactaaactgtgtagcaactgttactagcagcatggtggaggatcattatacataattatgttgccaaaacaattttaagtcatccaaatcaaattgggaagactaactacaaatccaagatcaaaagcagattagaattttcatgtaatagaataaacacacctttagttcatcagcctcgccttcaatcatgcttccataactacggtgaatctggaaagactgatcaatctgcaaaaacagctgccacttggtcatgcttatgggacccacctcgagattaagtggcagttctgtcacagtttcatttaaaggtattaatttatctcggagcaaccaaaactcgttgaaatagacggttgggtagtagttccctgaagtaggctcgacattcaagtctgcaattctaaaattaaggacctcaaacatcacagattgctaattagtagtttgacatgtacaattatatgccttaaaacacaagcatatctcacacaaacaaatgagaggaacatgctcttagctccggatatgtaagtgacgaggacatgctaccggagacttaagtacaaaactataaaatttcaaggatacatggagcaatattgggtggtacaccattgtgaggatatctgccaaaaggaaaaaaagggggaaaaatttagttattaggagtaaaagaaagctcatcaactaatgaagagaagcaaaatgtaacaatgagtgagcatgagtgtccttatggaactatcttctaatgactcaaatatcctcatacaaacactagagattcaatactagtattcatgaaggaaatataaagagcaaactaatgactactaaaagaggagaaaaataagttaatacacataccgagtgaaatcatcaaccaaattaattgtaatatttggtttccaatatggtaaccactctgcaggagtatcatctttaacatcaccttcagtatcttcatcaacctaaagcaacaaccacaaaatctatatgtaagcattgaacataataatttatcacatgtaaagagtaaaaaacaagaaaaggacag

SEQ ID NO: 16924 - DNA, 9828 bp, Cannabis sativa
  modified_base (9428)..(9432): a, c, t, g, unknown or other
ttaagtccctctgaagaatatagtattaaagttagagccaatatatgtggaagaatgaagaatggatttgccactgcaaatcaatcattgatgaactctcatgcttcatctcatcacccactgtaaatttttaggctacaattttagtgatattattgtgattgctttgtcttttgacaatttatatttatatatgactgatatgtttcctatgatcaaaagtagaaggaatagtcttggaaggggtttttcaaaagtagaaggaatagagagaaggggatggggtttgagagcaagatttaattatcatataatagggaattatctggttaccttgctttggtatagtggcctctttgagcaataacaggtttcaaaatgcatcattatttaaagtaggccctttttagtaattagtattttgtaaggattaatgataaaatatttgttgccgccttagactcttttacccaactcagtgagcctagactagagcctataacttgagcttttcttctccacatttgatcattgtattcctaatctccataatattgtaatgattggaatctcttttggttcgttctaatagtcttgtaatttttattttgttttagaaattttatgaatagtcttatatttacatgtagattaaataaatagtaagaatagatagtgaagtgtttattatgacaatgacgaagcttttatttagactcaaaaacattaagaaaaagacatatttcaatggagatgaagagattctcgaagtaaaaatactattatacaaagcactattgtacaaaattgacgattgctaggacttttttaatattttattcaagattggaaatagttcatatgtttattttattttatgatgtatggtcttgtcggttttgtgttatctcatagataatttatgatttctgagatttcaaattactttattattgtaagatgttaatgtgtattttttatttagaaaaaaaaaaaatcaaaattcatattttttgtttttaaaattgaaaaacaaaaatgattacaaaataaatttatattttttgtttttaaaattagaaaacaaaagtagttataaaacacacttttattttttgtttttaaaattaaaaaacaaaaggatttatagaacacatttttgtttttcaaaatcaaaatatttaaaacaaaattctacttttaattttgtgattaaaaaattaaaaaataagtgttatcaaattctacgttagtgtgttattttctttagttaattttgattagattattgattcctcatttacctattcgaaagttccctcccttcagagtaaacatggaaactgaatccgagaagatgagatcagaaacggagaaacaatggagccgatattcaaaacgaaattggtcattgcaagactttgagatcggaaaaccacttggcaagggaaagttcggccgagtctatctcgcccgagaaattaaggtgctcaaatataatctcccaattttcaaaactcatatatgtatattttttaatattataaattattttgaaaaatggtggagcagagcaaatacatagtagcattgaagattatattcaaggagcaaatggagaagcattcgatgcacaatcaactcaagcgtgaaatggaaattcagaccagtcttaggcatcccaacgttcttcgactctatggctggtttcacgattctcaacgcatcttcttaattctcgagtatgctcatcggggcgagctctatggggagcttagaaaaaatggccatttctctgaaaaccaagccgctacggtactaaatcatggcatgctatttttatgttttatgcttctttttcaagcttaatattttgttggcattatttatttattgtttgtagtatattttaagccttacacaagcactggcgtattgtcaccagaagcatgtaattcatagagatataaagccagagaatttgttgcttgaccatcaggtactgcctactcacagtttctgtcatttggatttataatttggtagtgtgcttttacctaattacttcaatttaatgatcacataatctaactttgcagggtcggttgaaaatcgcagacttcggatggtctgttcagtcaagtagcaagaggcataccatgtgtggaacgttggattacttagcaccagaaatggttgagaataaagctcatgattacgctgttgataactggactttgggtattctttgttacgagtttctatatggggcacctccatttgaggctgcaactcaaagagatacattcagaaggtaacacaaataacttgtttacttgtaagttcattacctggatagttagtaaatagtcataaactagtctaatgtggattaatataaagttgggtaattgatgtttttttttcatgctttatgaaactacagaacagtgcaagttgatttgtgcttccctcatacacctaatgtttctcaagaagccaaaaatctcattagcagggtgagcttgcggacctgactatgttttttgatggtgtctgccttttgaaatagaatatatcatcaataaaacgatttgaggtgtaattttatgtgtgatttttttgttgcagcttctagtaagagaatcctcaaagagactctctctgcggaacattatggagcacccttggattatcaggtttgccaattctagtggtatttgcaataactagcatttccgttcttgatggatgttccaaaagtgggttacaggttctgtttatgtagtattttagtcagaaggtaatggaacttcttaatcacaatcctttctttttttttttcttttttttgctttcaaagatcaatattatgccttgtgattttgtaaaactatgtaaaatttgatgtattcagcaatgacatacgaatacgatcttatgtcaaatattttgtaactactgagagcagatactggactaatgtgaacctacacacgaaatcgtcaacaaaaaaacacgtatgaaaaaagtttgatggttaattgtatccatggattaagttctaccaatcaaagatcctcgaccaaaattatgtctgatggtagttttttgccaatgaattattatgtaattatccaattgcctaatcatttacctgaaagacgatattttattgatcaagagcaagtacaataaactttagctgaaaaacaaacataatgattactatgttgctcaaatgtagggcaccaaattttttaatggttattttctcggagcagaaggattttaatatcacaaattataatgatgctattacccaaattttagtatgggttatacattatactgaagaaaactatagttacacttgataaacacatcaaaggtgttaacacactgaatgtctccggtttgaacctgagcgacgccaattttaaattcaacatttttgcttttatctctaatcttaccttatattctaatagaggaacataatagcttttgagagtggtaacattccacaataaatattcaaaaacaaaccacgaattagatggttacttatatgactagacccttataaagatgtatacaaagttttgccagatcaagataacctctacctctagatatggtaaaagatattcagtattttgaattttctcctttgataaagctcgtatcaaaatgactacaacatcctctattcaaaaacggaaaaatcagaggcacccttttttacacattcaattccactacatgactggttgaaaaagaacaaagtttagagaaataagcttcaagttcttggtgtgtcatcttaagcaggaagcttattaattgtgtaagcagcaacgctagtatcggaaatagttgtatcactgctgctgctagaatcacttttctctatgatgttggtcaactgagggctgtcttgaatggatatagagagcttcgtgtttgggctcacagggttgacccgagaggggatggctgttgttggtggacatcgagcagaatctgtagcagcagatgaagctgcgatggctgggagaggtgggaaaaccttcacaagcttcttggcacctctatgcatatggcgagcacaatatttctgatcagggataacatcccgtctgcatcgccacttcttcccatctgttctcctacacctccccggttcaagttctatgccatttctatagtcagtgtgtaagccattgcttcttaggactgaaagagtaacaaacacaaaatataaatgtctaaagtcataataaaggctgaaaaatatttaataaaaggcttttaatcgcttacaatgctaccttgtagatgaagaacacttctgggagagaaacccaaaccctgtgacatattactgctagcatttgtgttattgcttcttcctactgagccaaaatacttgtcactaacaactttcccggcattcccagcactcatgttacttttagtaattgcagcaatgttagtagtagtaatacatggagcagtaacattagtaacccttttcgtactaaagctactagagggagtagcattaccatggctaacactagtgatatttgaggacaaggtggtcataagttgaagaccaacagagactggaatgtttgaacttgatttttgtagcgattggctaactgatttctcaggtgttttggtaattgaaagagaagtaccgatttcagcaacttccacaagctttcttgaacgttgacggcctctgtgcatgtgctgctcacagtatttttgatcaagaactacatttttactgcatctccatttcttcccatcagttcttctgcaccttcctggttcaggatccaccatgtttttgcagtaaaacccttgtgggctgaatcctgtaactgaaaatattataacaaatgaaaagaaataagaacaacaatcaataagcaaattcggtttcaatttctgacatgctttttagcctttcacacagggcagacacaaactattctcagagataaggtagttctgttgaaacaaatggcaagatttaatttattctccgccagaagcaatttacagaaacaagatgcaagtaagtaatattttgaatgatttagtaccttataattctttttttctggtacgaaaaacactttcagctaaaactaatatagagctatttcaattcccaaaagcattaaaaaagacaaagcaaaataccatttccatgcacaaattcagagaaaagagacatggcttaaaagacatgaatataaggatctaacttaaacccacttctaatattttacaactgaaatcgtacatgcaaacttttaagaattcaaaatgtaaacttacacatatataaaacaaaaagataataaagaaaaaaaaagacttacagggatatggattaagtagagtagtagaaagtggaggaagcagggtcttggaaatggtagcaagaaggtggaaaggaacggggataccgtttactatatggctgtaaatgagagattggtgtttcagctgcagcaattgaccccacgagaacccacaatttccctcacacttgatcaacggcttcactccactagacctcttctccttccctccatctccatgcatcaccaccgtccattgtttctcactcctcttccgcacccgcaatactccacctccatataattaaatacaaatcataaacactgctatgtataaataaacccaagacccaacaaatattctaacaaagaaaaagtctacgaagagaacatgaaaattaaatgcaatttaaagaagtataattaagttcccacagcaaaagagaagaggggataaatcataaatggagagagagagagtgagaaagataaaagagaaaaaccagagtgcgaagaagttttggtttgaaagtccatgatgaaagttgatgaaagatgagagagaatgatgaaccagtccaaagataattacagactttgtgtttatgcgtgagacagtggcagtgaaagaaagaaaaaataataaagctgaagaaaagactaacacaaacagatctgaaacaactgtggtagagagagagattgtaattgactcaagaaatggaaaacacccatttcaaaagcacagcccaaccaaccgcccaatacacaaatacatacactgatacacacacatatatgatgtgtacgtactccatagtccatattcatatgctttaggttggagacggggacagaggattaaagctgagtgtcagtgtttctgccaaatattttcccaccttttttagcctcatctaggccacacagttatttcttctgttatttaaagcgcgtagcgcgtgtgtgctataaacaaataatgaaagtaccaaaataaaacttaatcaatattcactttataaattttacaattacaacacaaataaaataaactaaaattatattaaattatacaaaaatatcaaataatattcattaaaacctctagatatgagactacctaataattatcattctatacaattgaaaataacgaattgaaaacatcaaataaaagatagaagagaacaacaatgattgaacttaaaattctattttttctcttcaattttcgtttcttcaaagttacctcctgaaaagctcttttgaatttttgaaatcagaatttaaaaactctaatggacctctaaaagcaggcgcgcaacgatatagccatttaagtgccgcggcctgaatacttagtttttgcacagtaagttttcttgtgcgatgagggataataattttttttttttgatattgctcataatttgaccatttaagatgttttaaaaaactaaaagagtttattcacaatatttttcttgtaagtgaacgaatcgtaatcaaaaattcacttggagcttcagatttgattttcgattacaaacggagcgttttgaacatccaaaatttaaaatctttcacactactatattttgaaaagtctaacagtgttactttctttatagttgttttaacatacttatacttagctcagagtgcaagaaactaaactgaaaacatacagatttacaagcttcattcgaccctgaaaactcatttcaggcgactattgctttagttcccttgaaccagggtaataaccttcactatgaattaaagaatacactatccaatttcgattacaattacaccaaaagtaatctacaattaattcatacacgaattactctactgatttgaacaaaaacaaatcagaaaatcatcaaagtaaccttagacttcagaagccaagattccattgcttctatctagcttaactctcttcagtaatgtaatctgaactcccttcagacaaacatgatctctgattcaccttcaatccaagaagatcccatcagttgacttggaagaaaaaccagaaatacaaagaaggcaattttgccctaacagagcaaaactactaatcaccgaagaagagttagttagaaaaccgataatccttgtttatatactaataactcacaagttaacaaactttaacagctcaacaactagagaaggacagctgtccacggtttaagattactaagctgacctgtcaaagagaaataatagacaacatagttagattaaactaacaaccagacaaatgaccaaagcagcataatttaccacaaataacatctgggtcttacatattttataattccaaattccataataagttcatcatttctgtctcatttaacatctttattctcatctttatttcatattataaattttatcatttaaacctgaaataaatagaatataagcgtaattatgtacaaaataaatatttttagacctcacggtcattatataaaatgtttctcgttatagaagagatatccactatacaaatcctcttgttagtaaacgttcactttgcaacattatgggccaacaaaattataagttcttacattcttagaaaaaaaaatcttcgatttagcacaaacaccattaagagtgttgataactacactagagtcgctttttacaattacataaaatatacaaaatgaatataatcaattgaaatacacatctaaactagcctatcatatatatttattaattataaatacttttttaatattattaattataaataaattaaactaataataatactacttaaatataatattgaatattataattttgtagttaatattagtagaaaatataaaactaaaactatatttaaattttaataattttaaaaaatttctaatattattaaaatagtacataaatataattaaatatatattatttttacatatgaaaattaagtgagttgtttaaaaaaaagggattaacagggtacctacgaatttacaacacgatttgagggggaatgtgggtatggatgatgatgttcacgcgccttctgaaatggatatatgagttaatacataaagatgactcattcactcactcactccagtccagacccagtctaatgactgctctgtttgtctgcgtctgattctgactatggctggctggcatttagctagctgcactgcacaccaccgcaccaccatctttgcttttcccttttgctatgccattcaagttcattgcacaagtgtcacccaaacactcttccattgtcctagcccaggcccatttaaaagtactatattgggctgggcccaagagagattttaactcctaaatgaaatcgacagtatgaagggaccatggcccacacgactatttataaagttggcctatgtagtgtttgtgccattggctggctgtaatgtaaactagttaatgtattaaaatactaaatagcaagaaaataattttgcaaaatttaatggtattttgaaaagtgtgacaaatttagcattatgtcaaaattaatattttatataaaatatggtgtgtattgacacaataaattatatttagtttaagagcaatttgagcataaacacttatgtttaactctcagataaatatttaagtaattttttattgtaataatagctaaattatatttctgaaacttccgtagtacttggttgttcagtgtccaaatcaatggtcatgtaaaaattttatttttatttaaaaattaatttacatataccaataatatgtgaataatgacttgacacttaacgatcagataactacggaagttctagaaatataacttagaccatcttcaataggagatgtaaaaattgtgctatatttagcacaaaaaataattttgtggtaaatttacaccaaattttagctttgtgctccaatgcacaattacaaaattttgatataaaatttaatatctaattaatattttatcaaaaaaaaataaaatctaataactttataatcaatttnnnnnttattttaatatgtaagacaataaaaaaaaaaatataaatgtttcataatttaatgtaatagttaaatgtacctataaaataatagaaataacataaatgtaaataaaaaagtaatgcatttattgtgatgtaaattttacatcatagcaaatattatgtcaaatttggcataaaaatttgctatatgccaaatttacatcactttttagcacatcattggagcacactttttgttaaatgggctatattttaacttttcaccactaatttacacttatattagagatgttcttatatgagtatgctcttaatgggtattacccatgtatgggtattttatttttgaccattggatcaaatatctaatggttgatatttataatcattaattaaat

SEQ ID NO: 16925 - DNA, 11787 bp, Cannabis sativa
  modified_base (11273)..(11277): a, c, t, g, unknown or other
tttttttgttctcaaatggttatatatggttcggcagtacgatacgcacggggttgatcccattttttctggttcggtaggaatatacatataaaaggtattcttgttttattgagtgtaatattaatttgttaatttggtatattagtaaatattgcccaaaataaaaagccctaaactaataagcaaaccggcggcccatttcccaatccgtaaatcctcagcccaaattagccgtgcatctcctccgtctttcctcagagtgtccctctctgctcagaaatcgttctcgccctcctctgctctgtcgccgccaggtgctctttctctttaatgctaatgtcctcttccatttcttctctgctcttttttcactgtaacaaaatttagggtttatcaaattggctcattttttgtacgcagaaatttttctcccagtcaattcagagaatatttaattcaaagcgcttgattttgaaatcaagcaagcttaaaatgagtatctatatgaaccggttactcccccgatcaaatactagttttctcttacgcaatggaaatgccctacaagctaaagttttgcgcttgagggaagaaacgttcatggtggattctggagttgggccccccaaaatttgcacacgagatgagctgactcgggtcccagtggatggatcaaccaggtttgagaatgtggtcggttacgttgatgttaaggctggtgagtcacagattaagaagcagatgctggagaggttcttcgtggatgttgtagctggtgaatcgcaaatcaaagagcgagctgctgcgaggttcaatgatatggttggatcaatggctggtgaatcgattgttcttccaaggagattcagacagaaccgagcttggcttgaactgaacaagatgtcgcgaacgaatgccaaggtcaaaggctttattgttgagaaagtaagaggtggttattcagtagccattgctggtttcatcgctttccttccatttcgtgttatgatgaatcagaagctaaatgatcgattcaccattgagagcattaaccccaaaagtaagcagattgtggtgtttttttagaaaaccaaaaatacattaaacaaattaagcagaaattgctgtatttttattttcttagctcttaagcatttctcctaacattaattggcttacattgattgttgttctgaataagggtttgtattatttgcttggtttatatgtttgaactattttactactttttcttttttctttcccatttgaaatatttgatgtatagtttatgattaagattgattgaaaacctaattcagttcttaacaagtgattattagcatgaggaatactgaaatgtggacctgcatttcttggagatcctagcagcttttcccaaatagcaaaaaagatctgttaagttttttcttatggtgctactttttgcatgatccaaaattctatttgtatagtttttggatgaacacaaacgtcagaaatctataccaataggattttgcttgatgcaacagtagacttacatattctatggaagtaaatatttttttttattattattattagtatttattggtggaaaaacatttaaaaaatttactgtgtgtttatttgccatcggtataaacaatagctcaaagtttcaaaagaatgacaaattcattttgtgatgatgcaaatttatttgatatctacaacaagatagcgtatgatagttgagttgccaatgtacttttgtaaatattggcttgattttaaccagagacgacagatccaagtatcagtctggtgaacttgtaaagtcattttcctataattattcttgaaataacaatgataatcaacatgtgatgaaaattgctcataaactttccaactatattagtatttctatttaagagtgttcaaccaatcaatcctcaatgtatatttcttattttaaatcctttctagtccatactcgagttcaaaaccaatccaatccacggtgcagattggtgggttgattactttagatagttactttttttttttaaaaaaaagtcttttgatcgtattatccaacggatggcagtaaaggtcgggttcagttgatccctgtggaaaactttggggatcttgataataatgtgctcttgtggtggaaatacgagtagtgtgaagctttggaaagtcaagtatttatttgctaggggtggcattgaatttgccaatttttaacctaaccaattttctgcatcgagaagctgggtaacacaggtaggaattaacttttatgagatctgtgctctattcttatcttatccttcttcatttatttttcatctattgatccaacaattgggttggttgggtggtgtttggaagcccacttttttgttctcaatgcctttcagcaaccataaaaggaagctaatccagaaaggcgcaatgtttcatctctttgacttccgacgaaatcaagacgagttgtgaagatgtgagtttctctgtacttgctcgctagcttttcaactacactcctccgacccagggtggattctaggggaagggcagagcctcaccttgcagtaggaaggtgtttgttgccgggacagattcaaacaggccttaagggaggatgaattcaatactcaagtgctcgtttcagtgaaaaagttgttccataatctcacgttaatggaactagtcgagcagatacaaaaagttcgacatagagcattttggtttttaagttatagcagcaaaatcctcgtccatggaatccttgtcgattcttctcctcgttccttttatcttgggcatctcacactaagattcaaaatttacccaatcttgatattttcacttaacacaaaaaatattagaatttttgaagatttcacacatcacaactgaagtgagacatggttaaggaaaagctaaccatgagatcgatgtgtcgtgtcatatggttcttactttttttttttttttaattattttttaatctatttatatggctatgtatttttttttatctgtgtaatcatcttgttgctcccttccttttgaaactatttccctattctttctatcttttgttagtaggtaacaattccctttagatcactggtgcatttgttgagaaaaatcatttgaaccaagctcctcagaaattagaaatccattcatatttttattgaagaaaattttggaggctcctccatctggaaaagagaaaaaatgttttgtaggctcttgtaggtattcctttaagtttgtccaatattcttcaagcttgtatggtcaagtgttgtatgctcaacttgtgtgtgttagaaatttatataaatgatatgaagcatatatgatcatgtataaatacacgatataattaaaagattaaaaaaaaatttgattagtgtgggtaatcggacttcaaagctttctctactttctttacatagattgactgtattttatagaatgactagtgagcttggagaccgataccctatatttatataggtgagatctttcatcaaagtctctgctacaattaattgtcaatattttgacaattaattctggaaattaaatatagtaattgaaatatttggtattgaatctgactatgattaaattattttaattagttatattttataaatcaaattaaataaaatatttgatttgttaccatataaaaattattctaacattcttccacttggtcaggatttaaataaatttaccacttaatatccaacaattaaccttgttaaatatcaaaagtgataagtcctcataagcaagtattatcttacatgtattaccatacatttattacataacaatctacttaatgtacttcatgtggcaatgtacttaagtgaataaaccctaaactttatttttattctggtcctctgaagataatttttttcagatgaaattaatgtgcacatgaatgtgaaaaatatcgaaattaaactttcattgaataattcagttgtacaaggaaaaactgtataagggaaaactgaatcccatctttattttatgattcttaaatttatgttatggtatgcctttagtcaaggatattgcgatcattcaattcagtgtcgcgtgctcagtgaatacttatcacgcctctttatggctaaatacttaatgtcgatatggtagctttgattagtacttttaatagtttttagccataaaaactgtagctgaatttatcgcaaaattttcttaatggcctgaaaatataattttgaactctaggcctagtatgaaactttattatacatcatacaagatgtatactcaaaacaataaatgaatctaacttctataatagatatactaattaaggttttctacaatacaacttactggtaatcttaaggacgtagtgaaatattgatttacacgaatcaatgtagccagataagttggaatataaatggttaactgtattttcgaaatgttagttcatctcaataaagtatatatgaatgtaatttttagtgtatctcaagaaagatacttcatcactctgtataaagtggtcttaacttaagttattctgatactacttaacattcctaaaacaaatacaatgctaagttttatgcaaactcttaggcatacattagatttccaacaataggagtaaagaaatattcttaatttattctccttccagattatttttcagaaactagtttgagttggatttatcactgtaaaaaataaaagaaacatgagatgaataatatataatttaattaaatcagagatgttgtgactactctctaattaattaaaaaatattctatttatattctttatctctattgattaggatattttccaaaatgtgtggcacttcagaagggggccatgtggcaataggaccctcgatacggggcaagttatgttaaaccacatcctaagcttgataatcaagaggaactccataggggtagtcatctccagaaggaaccttcgggaggatacttggtttctctctctctgcaaaggagctccacctggagaagagatagtaggattgtgcaaactatggcgtgtagcctaaggttaagttgttgttcacgaatttaatgcaacatggggaagaacaacttactccttaccagtgaaagtgtgcttaagggtgtaaacccataattctctgactttacgacatcttatgcatcatttgacgactacattattaattgtcaagtcatcagtaagagataagtgtagtctcaccaaacctatatcaagcccatgcacatcatacaaaataggctatcatgccctataattgtgtcggaaattgtgcaaagcatagttcatacaagcacaacaatggtgaccttttttttaccaccattatgagtctataaatattccaaaaatatataggaaaaggggatcgaatcattaactctctgtaacacaatctaaaaataaaaacggctcgtggactaagaattattaatgccccaaccacctaaacaaaatcctattctttaatctgcatttattattcaatacttcgtgaattaattgttaccgaaaatctcggtcaatattatggtgctttcattgagagttgtaggaagctttctaaaagagaaaatgataaaaaatcttatacaattatggtactaaaaagaaatacctcgcgtccacctcaccaacttgatgcgcataagcatccaaaaggggaagatgtggcttctcgagtggatgctgaggaggaagatgacaccaatgaccctgagtatgtaaaagggcaagacgactatgaaacctatgatagaggtaattatacagagctagtggaattgaggcaacgagctactgaccatgaagtttagttggcagagcaaaaagagcaaaaccaaagaatgcaagaagcaatgaaaaccatgaaaaggacgatggaaatgctgggattcatctatacccagctgttgtgccacccgtgcatgagaaggtaggagaaaaatcttctcaacccgcggagaaccaaagacaaaaagatagggaacctagccgaatcaggtacccttctgagaaaccacctcttagggtgaaccctatgattataccaaaaagaaacaaaatagcctgtgaccctcaaaatttttgttctgatctcccaaaagggaaatgcccgcagggggtatatttcccaaagggaaggctgggccccaggactgcgcagatcgaagaagcatttgtgtgcatcaagaaccaggggaaaagagggggcccgcaaggaaagatccttctatccacttatgacaaaaactcaataaaaaacacgaagacctcagggcacatcttaataaaaaaaaaaaagaaaaccactccggcctcgaatagtatcctaaatgaagggatttcagtcgaacttgctatcctccgacaggaagtacaagaatctcccggaggaaaaaaggagatgactcgaagtctgactgtgaggatcaggagctttgtgccagaaacgtacttgaagtagagctcccaaaaaacttcaaaatgcctgaaatgactttgtacataggggacattgatccaggtgataatttgtctcggttcaatagagtcatgacggtattgcttcccactaactttgggaggattcgtggaagagtggtttaagaagctagaactagggtccgtggattgtcggagtaagttgcaaaccaattttagaaggcagtttgttgtagccaggaagataaaccttaaagttagtgccctcacaaacattaaacatctaccaccctgaaaaaattcatcaggaggttcacatatgaggcttccaaaacaaagaaagttgatgatggacaacaattagccttgttacaagctggtatctagacaagaactcccttctggaatgaactccaacaagaaggtgtgactagccttcaatatttttagaaaagtgcccagaaatacatcaatctggaagaagcccaaataatgtctttttgagggtattattcaactggtgaccctgggtatgcttctaggatgcaaattccctaaggggtgcttcctgtcacccctccaactagtgggatgcctaatgtgcagtttctggggccaccagtataatcacaaaatctcactatggctccagcccaatcggactatgggttacagaataataaccctactccaggaacctactcacagtactccaatcaatctgcttcactcgcggcaaccacaataataaccccaccgaccttctgaagtaaaatgtcatcaaaagggagcacctacagcagaataaaaacatgaagaaggcatccaaatacaattcccaatacacccaatatattatgttggtggatactcaggaacatgtgtatctagccatgtgacaaaatgttcactattggaggacacctcccttgttctgagatagttttcaaagagatcccaataaaagatgtgagtaccataatgatattggacacacaactaatgaatgaaaaaatttgaaggataaaagtgagagcctgagatagctaggacacttgtatgaatggataagaaacctcttaccgcatatgagagaggggcaagccggacctcaagcaccaccttcgggagtacttccacccaaccatcaaggggtaccacttggagagccacctaggccgaacgggagagtagccatgatttccagaggaccccatgtgggggggattaacccgcaatgagttaaaatgctatgatagggccctttgaacatgatgaaggggtctgggaagtaagtcagttaccgacacaaagacctcatctcatggaccaacctataactttcaatgaagaagatgctctgacgatgcattctccacaccacgacttgttagtgattgagactcctattaccaacaagatagttgctcaaatcttggtagacaatgggagttcggtaaacattctgttcaaataagtgttccttgccattggccttacagaccaagatttttcttcgagtgtttctcatctcactagattcaatggaaatcccctgatacctatgggaaaaatacgcctcccaatgactctatgctctgacaccccttagagcacattaaaatactgcacctttattgtggtggattgcccaacaacttataatgcaataatgggacgtctagctttgatagattttagagccataaccttgatctgacatttatgcctcaagttcgcaacccatgctgctagagtgggaactgttcggggaaaccaaggagaggctaggaagtgttataacttagccaccaaacaaattgtcttgatggttcagctgaacgaggaaagaaacccaatgggaatgaaagatgagttagatccctgaataggggctaagactatgctggaactcgtagaggaggtagaagaaattcaaatttgtgaacaggattcgaccaaggtaattaatgttgtgaagggtattgatcacaacgaaaggagtgaaatagtgaacaccatcaatgaatcaacatatatctttgcgtggagtcacgaggacatgactggcataagcccaaacgtcatatgccacgtgttaaatgttaaatgttaataaaaacatgccagctgtgtagaagaagagacaccccctcgaccctgtaaaatcaaaagtattaaaacaagaagtggataaaatgttgttaaatatattcatatgtgatgtttactacccagattgttggataacctagtcctagtaccaaaacctaatgggacttggtgaatatccattgacttcacggacttgaacaaggtgtgtcccaaagattgcctcccattgccccaaattgaccaaatggtagaagccacatctgattatgagctgttatctttcatggatgcttattctagttacaaccagataaagatgcgtgtggttgaccaagagtgtactagctttcggatagacaaatgattatatttgtacctgattatgtcttttaggctaaagaatgcaggagcaacttaccaacggttggtcaactagatgttcaaaaaccagctgagaagaaatatagagctttatgtggataacattcttgtcaagtccaagactactgggaaccattccaatgatctcaaagaatgtttcgaagtagtgaaaaagtacgagatgaagataatccaaagaagtgtacttttggcgaaaatcaggtaagtttttggaattcatagtcaaccaacgaggaatagaggctaatcctgaaaagaatcaagcttcgctggataatctttctcctaagaagcataaggatgtacagagcttgacgggaaagatagctaccttcagccatttcatctctaagtccactaacaagtatatactgttcattaatattttgaagaaaagtcaaaaatttgaatggactgaggaatgcaaggaagcatttaaaaaactaaaggaacacatggctaagcctccagttttttccaaaccagtgcaaggagaggacctgtacctatatttggctgtctctgagaatgtagtcagcgtggctcctggtctgtgaggaagtaaaaatctagcatcccgtttattacattagtaagaggatgataggaacagaagtctgatagataagttgaccttgtgtctactaataacatctcaaaatctacgaccctacttccaatctcatttaattaaggtcttcacaaatcatccactctagtaagtattgcaaatgccagaatcctcagggacattgctcaaataggccatggagttgagccaatttgacattcagtatgtcccaggcgtcttgatcaaaggataggccctgtaagacttcatcgtggagtggaataaatttaaaacaaatggcaattgactagaagtaattacacccacttggaaagtgtttgtggatggagcctgaatttaaaccgtaaggcagtctgaagccttaaccctttaggatttatcattactactcctgctcttgatctagtagaataactttaggaggtgtcacaaatatatttggtagcataccctaggaaagtggcaaggcattttaattcaatagtcaaaagcaaaaagttctcaacgagagacttggttttgagaacagtttttcctgcctctcaagaacccgaagttggggtgttaggcccaaattgggaaagaccttacaaaataaaagatgaattaggctctgggacctacaaactcaagctcatggatgggtctttgaccccgagagcatggaatgctgatcatctccaaaaatattatcagtagttataagtttggtttttaattcatattcagttttttgtcaaaagaaccttttgtgcgtcaaatgaccaaaaaattaagtatgctatttccttttcaattgtgaggacaagttttacaagtgactcaaaaagatcaagctatttcaatcacttggggagtagtagataaatataattaaaatgcataaaaatctctacccttaaaatagaacactttcataaaagaagtataaattaaaagacccttagggaaaagccaataagaatgtctccctgattaaaatagaggttcaaaaattcaaaaaattgacaaaaattctaaagaaagagtaaaaagaatattgcttaagaaaagaagttccctaagctcgcggaggaagatgaggacccaatttttttacccagtttagcctccaacctcttatttttctcccaaaagcgagtcaagacaacttcaggatcaagtgagaagttaagacgaggctcaaactggttgaacctctagcacataaaaactccatcttcataatttttgacacaattattgcacatgacagaagccaaagcgaattcctttgcagatttttcagcatcttgtttggctgaatctcaaaattcacggagttccttgagctccacagacatgttggccatagattgaagatcgaccttatgaaggtcctcaagctttctcaatttcaatttgagatctttgatttgtttccaagcattacgtatgtttgtgtcctgctggacttgagctccatgaagggtggttttaccatttgcaaaagttgtatggtcctgctcccttagtgttggaaattattttactacaatctagattactaacatgtatgtttgattagaaactataatctaacaacctaaatatgaatatcctaatacgataaaataaacacatataaagnnnnnaaaaccttacattgatggcagtgaaataataatgactccttctgttcagatctttggcacttgattcctttctgttgcagaacattatcaaaatatacacctggatcttctgtccttcagtttggttaactacagtcttctacactatgattgagtacttgagttgatatgagtgggcatggtattttatcactaaaggctcaaatttaatgaagaacaatagaagaggattcgaaattactatgaaggaggctctcaatttttctagttgtccgacaaagaaagaaaactaggttattagagttggatgagaatcacagcatcttattccttttattgtatttcaactacggtttaggatttaattatatggattaaaaaagataaaataataagaaaaaatcaagcttaagtggccgaccatagtagtgggcctcactagttacaattttgccactttatttcattattcatcttttctttcaataatgccatattttccaatttcaa

SEQ ID NO: 16926 - DNA, 4454 bp, Cannabis sativa
ttattaaaaaaattagtattttttattgtattaatttaaattaattagcatttcaaaatttcttggacctagaaatttaaaattgatattattattattttaacttgtaataatttataattattagactataagaacctagtaaagttagcttaaaaatttgactaaatattcaagatacttctttttctagcttgaagtattatgttttactttcttgatgaaagaaaaatcaaatacctaatttgctaacacaaaattattttatcattaccattaaaaatttcttagactaaaagaatactttcgaacaaattatgtcatgtccaacatttattatcttgatgggttttaattttgctagaagtgcacttaattatcatagatggcttgcaattctaattaatgtcacattaggcaaatctcttgcttttgttgttgtaaattaatacaacattaattgcaaagtaaggctaagattaacactaagtttggaggagagagagatgacatccctaaaaaagtggagtaatataagtaaaaataaaataataggcatgacatcatatttattataattaaacaagaaatgcaaaagatgaaagaaatgctaaagagaattcatagtgtttagcattcttatgaaatatattaatgtaatttaatatcgaattccatttattttagttaagaaatttaattttatatggatattgtaggttaaaattaataaccaaaatttaagctattcaatattagtgatataggccaatttttatgtgtaccccaaaatacttttctcatttcaaaactttttaatttctctctatttcctctcttgatttttccctctcaccggttctcattgaaatacccattgaaacccactaaagaatccaagaccgtgaccactgcgaccattgccaccatctgactgagaccacaccaatccgaccgactaagagggctccatttcaatttgactgagacctctccaatcccttcctcaatcgcaaacggagagaccaccgccactaacagagaccacaaacagaaaccacaacggagagaacacgaacgaagacattctttgtaattttatggttttttttttttgttttttagagttggtctgatataggtccgatataagtttgataggaggttacaaaatttaagtttttaaggttgatggtgaaggtccgatagctgtttgatatagattcgatggtggtctgatgcttactaactgattggtgaacatatttcgtgtctgataagggttcgatactgttcgaatgggagtccaatgaggtccagatatactgagtccgatattggtccggaccaccatcagacagtgtcataccccatccaaacacgaaaagcctaccaatctgttactaaacatggaacaaccatctaccctatattagaccattatcagaccttctccatcaacctcaaaaacttcaatttcagaacctactgttgaacatgtatcaggcatatatcggacaccatcaaactgactcgaaaaaaaagcctagaaaatttactgagaatgccagattggtgtgggctcgtggtctacatttgtggtttccgttcgtgatttgcgtttgtggtctctgttcgtggttatagaaggagattggtgtgggctcggacggattgaaatggagtcgagagggccgatccgattggttttttagtgggtcaagtggtcatggatggtggcgatagtgttggatgatgggggtaatcttggatggcagcgatggtcttggatggtgcggtggtcgtgggggttcgattctcttgaagagagcgagggagaatggagggagagagagtgagttgagaaatgagagaggtaattttgagtttaataaaaaattgacttgatttaataatattgatacactaataattatgggataaattttgacctaataaattcatataaagtcaaatttctcttttaatttaataaagattataaaaatttactaactaatcataagacgcatgtcataagaatgcctataacaatactcttaaatatagtgtactttgaacaattaattcatgccttaaatattgcttataccaagaattaggctcatccacaaccataaatactaattaacaaaaaaaaatcaaatttaattctaatttttcaaaaatgatagattacaatacttcacaaaaaacttcatttgatcttgatacaaataatttctctttcacacaacatccaattttgcctattcacaaattatctcaatgttcccatatcttttataccaatctcatagcctttattggtgatcccataaattctatcaaacacctcacaagcttcttcagcaatatcatgaatcattaaaccgaaaaatatcaaattaaataatatcctatccttttaggccggtattttgaagccatcggaactgaagagtttgaatatgtctaatgataattttttgttaagttattttgatatgactttgtataaaattgagtattgatttagtaagatggaaaaagaagagtatgagcgaattaggacaagtcgtacatttttgtttacacaaaacaataacatttcataactaatttcataaatttaaatatagtaaatttatataaaaagttttatattcaaataaagaatattaaaagtagtacaaattttctctctagcttttatttatttatttattttaaataactagtctcaattctatttaccaatcctatgaatttcaaagaataattcatacaaagtacttaaaatcatattatatatatttacaatttttttttattagttttctacttgtattttttttcattcagaaaacaatcctccatatttttgtaattatttttaaaaattcattgtattgggtctctcttagggaagcttaggtgatggcttaaatttcctatggaccatctaaatatttaatagaaagattcttttttttttcttttcaaatatcactcatataacaaattaattattaataataataataaaagaattgtactaataaaataacactgacaaattatcatccattccaatatgaggaaaaaccaaaaaaccattaaatttatttgagtttgtatattagtatttgtggggtccattcacttcaaatccattatacttttctaatatcaaactaacaaatttaattttatttgacacaaatggcctcactattataacatatttaaaatagtttaatttgtctatgatatcattaatatgttgattatataagaatttatttaattaccaaaccaaaagcttaaaagtagagaaagagttgaaatctcaatctcaagtcatgactttgaaattttggttctttactcaacccattcaatcatagcaacaactttctttttttatatggatttggataatatttggtgggacaacaaaaatggcctattataagttttgattacttattcaatgataaaattaaattagttattgtgaagttgaaatattatttctctctaaaacaaatggcatattataactttttgattagttattcaagaaataaaattttattttgtttcacattaaaaaaataaattgtaatatattattgataattgataaaaaaaatattctccatgtttactaattgactattgcctattcttgttgccatattttggtttgcaatattttcttttaattaaattttacttatattgaagtaatgataatggtcctagttattttacaacaatataatggtaacccaaattatataactaatgtgttagtaatgaataaaagttattttacaacaatataatggtaacccaaattatataactaatgtgttagtaatgaataaatttttgagatatgttgagaagtgccttttttattacatattaatcaaatacagctacaaaataattttaattgataagtactatctactaaatataatctcacataacttattaaaattaaaatttctaacgtacacattatgggatatgacccataaaattgggtatgaatcaaagagtaataaaatgtgggtatacaaagtaatttcctcaattttttttgaatttttgattcattagtgcaaataaatttcaatacattagagtttcttaaatattttcaaaatataaaaaccttttttttttctttaatatagtgcaatttgcacaatagcctaagttcaaaacatattagcaaaatactttttttttttatttgctaaatacctttttttttcataaaaaaaagtattttgcaaataatttttaaaattagggtattttcaccaatttcccaaaaaggaaaaaagaaaggaataattacataagacaccattttttgtaaaatattcacatttttaagttcaaagaatgatttttttacatttttacggttt

SEQ ID NO: 16927 - DNA, 3642 bp, Cannabis sativa
acacagtttcttttgttgtaaaaggacttggttgaagttctttgcgatcattcgtcgcagtgtctatagaatataatcagaaaacagaaatttatttattttcttcaagataattaatgcatcaaatggggtcttttttttttcttttctatttattattttcttgggaaacaaacaccaaacctgaaagtttagtgatggggcaccttctgaagagaactttcccattgtgaatagccaggacttctgtggttgaagatagcctcttggcacaatatttggctgtggaaatcctactcctgcagacaaaatctatttagaataatcagaaagaaaccaaactaaagtttggaagtatataaataaacttatatatgtctcttttttttcatttggactatatttaacttctgaacctacctaatattgcttcgtttacttatgcccaaaaccagagcttcaacaccatgactgattgcctctctcaccagagcccttctggctgaacttccagttaatatctgaccagtaagtgccacctaacaaatttaatcacaaaaaaacaaaacatccaaagtcaaaataaaaatgaaattcctaaccaagaaaaacaaaaacctgttggacaaaattcagttttgtaacaaaaacagaaccttttttacactacataaaccttgatacacttccaggtaatcatctaaagaaggtttctttttcaaagcttcatctgcaatactagacgaaaattgtatcaataacaacatttaaatttctgtacaactatataattaatagagatttttatatataaagataatagctattgacctgaatttctacagacatgaatagcaacaacagaatctccaggctcagcaaccttcacaagagcccagctgagaatctctctgctatggctatcaattcgaataccaaccaaaacaattctctccttttttgtattatgaagaacagtcaaaaactcctcaaacacagtcatggtagtaagatagtcgaccagtctctttctcttgtacagttttcaaagtttgtacaagctaaactctcttcttccttgactatgagtcattactgcccctgtaataataataacaaagatatcaaacgtggaaatgataaaaaggtggaacacaaagagtgtgaatatgaagttgccactgtcactataaaatggtgtccttcttatttaaaataatcatttatttttatcttctttctagagtatttaatgcaattaaaaatgatggaaaaattagcataaatagagtaagataaaagtgacccgacaaatgaaatggtacctaaaacttggtttggttccatctgttgttgaagcccccaccatgacaatgcccttttcaaatacagaaataccgccaaataacatcaccttccatacctactgcaactctgctattcaatactaaaataatgaaaaataaaataaaataacaaaagaatttgcaattttaataattcatcgtttttgatttgaaagtgtttaaatgaagaattattattaataaacgtttttctttttgttggaaatatgttcagaagaaagtgtcggtagaaggctgaaatccccccaacgagacggcactatttcttttatttgtttttcgtttttatttttatttttttatataaaatttgtttatttatttggtggatgagatcattcttcttctttgttctgtttctttggaatgtgattttttttttgggtgaaaatgtgttagttaaagtgtagagataaattgaaaggagtccgttaaagtcaccggcaaatactgcgggaaacccccgatacccggtcgctctaggtgaaccgacgtaacaggagaatggcttttccaacggccattgcgggtgcaacaatggggagaactacacagttaatttgtttaagacaaacaagaagtactattgtaataaactagttatgttctaaggtcaatatttgttttgttttttttttttcaaaaaaatgtcaacattcaaaaaacaagggaaaaaatatcttattgggtcaactttaaaacgtttattcgtttttaactttatctctttttacatattatatatttattttaaatttgatattattgattcatgcccttcaagaaaagaaaggtgaaaaaaagttattaaaaaaaaaaggtgaaaaaaattaataaattaaaaagcttgtaaaattatgaattattataaattggtcacgcaaaaatgtgtaattaattagataaatatattattctagtgcaaatagtcttgtatattaatatattataaataagtgtgtatatgtttataataataagataacatagattattttgtgctgatgtacatgtctcaattatagttaagaagacatccaattattgagtaaagacttcttaatatgcgtttaattaatagatacgtagaagttagatataaaaaagaaattatggtagcagttgatatgtgatatcacaaatttatttttagaaaaagaaaatcaatataattcatggacagtgtcatactagctaattgatatgcagttatcaaaataaaaataaattgattgacacattacaaactgcaagacaatgtataaacgataattgttgagagtatttcataagcatggatgctagaaacatggtacatgtcttccatcttttacaatagaaaaaataaaaccacaaaacaaatgaaacgaagcaaattaaaaaacaaaaaaaaaaaccgtgaacctatatctttaattatttggtaataattaaagacataaattttagaaacctttatatttattatattttgaaataaacgaaaataaaggttttcaatatcttaattttatattagatatcactacaagaaatgcggcttgtcggcacaataatgacaccggtaaaagctatcagtgaagcttggttggtaaaaaatcttttgctagcgcaattcacatttgcgtcgacacaactagtttttgctaacactgttatgtgccggttaaaactatacgccgtaataaactatggttccaaatccgctaatggtcagctaaaataacttttgtcgacacattaatgcaccgacaaaagtttcgcacatttttcccatttggcgcgaaaacctttctcgtcaattagaattttggcgcatatgacctttaccggcgcatggtttagggttttaggattttagggcaagttatgttgtcgcaaaaggcgccgacaaatgttttgttttatttttttttaattttattatattttaataatattacaattaattttaaatataaaatcagattttaaagaaacataataaaaaaaaaagggtattctcatttttaattaaaaagtattcgaactaatatataaacatgtttgattttgtactaaaaatagtaagtaatcaaaagttctaaagttattagcaaataaacaaaatgttaaaagatgttaaaaaaagttaagttttatagttaattataaaatatatattgttctaaagatgggtaatgtcagcatcgttgttgttatgagtctctggacgatgcgatgatgatctagcaccaggaggagtagtggggaacggtggaagatccataggaga

SEQ ID NO: 16928 - DNA, 3905 bp, Cannabis sativa
aagcctccttcaccgtgaatacaaataaaactagtcgtgccaagcacaattagtcgcgaccacagaagtagctagtcgcggcaagcttgtaattttcgcttcgacctctcttagtaaaatgtacatgacttttacatacaaactccaaatgagctcattcaagatgcgttggaaagctggaaaacaaatctaaaacttctatgttttgacgttttcgaaaatctaatcaaaacataatcgaatttaaaattgaagtttcaattttattttcttgcaaaattttctttattttataaactactatttttcaatatttgacaaattttgcatttaaaaacctggaaacctcaaataaaaaacaaaacgcgtaaaaccattccaaaaataataacaaagaagaaaaataactagacccaaaatttatgctaaaattagcctaacaaaagtcaccacaaaaatctggtcattttgcttggttattgccatgaaaattcaaacaagcttctagtatatggtcaccatgagccatggatcattatcaaactttctcttcaaatcagagactaatttaatctggaatgacaaaatgaaaataacattgggcattgctcgcggcatcttatgtctgcatgaagattgcgagaataagatcattcattgtgacataaatcccaacaacatattgatcgatgagaattgtaatgccaaaattgcaaattttggactggcaaagctactgatgtcagatcaaacaaggacacaccgaaattagaggaacgagggggttcattgctccagagtggcataagggtcaacctattacgaccaaagctgatgtttatagttttggaattattctattggttatcatatgttgttgttttagagttgatgttagtgttcctgagaaagaagccatcttagtcgattgggtttacgagagcttcataaaataataagtcagcaagtctaatgcttgttgaagaagtgaacgagcaagagtttgacagattgtagaatattggtctttggtgtatacaagaagagccaacaattcgtcatcccataaggaaggtagtggccatgcttgaaggaactttatataatattgtaattgtgctttctttttctaagaaaggaattatatttgtagtttgatctctttttcctttttccttttttcattctgtgaagtgatgaaataatagatcctataatctaattatttatcgctgtacacatcacattctttatttgcaacagcatgcatttgccatgttatatgcaccaattttcataggcaataaagcttttaacagagctaccaagaaagtgcaacatcagcagcaaccaaccaacctgaaccccatatttgctatggatcatgttgtcaacttgtcaccatgcctacattgtaaggcattcaccacccacatgaagctgatgataaagaaaccagttgaggagaagttgatcctttagagcatttgtttaagcttcgtatactgcagatagcttcagtggaggagacaaagctcagtaacactgcaaaacgagcaaaatagattaagcattcttgaaagaaaccaccaatcaaagaattgttttttttcttcttcatagaagtagatcctgtaattaaaaggaaaactaaactgaagaacagcaagaaaaacacctgttaaatttctaaatttccaatttcgatcttcaatatgactcacattaaacagaatgtagccttaaaaacaataatgggtctctaagataatctagtgaaaccaacgaagaactgaataaacaaataaactacattagcaacagccgtaaatgaaaaggaaaaaactttaataacagtcaaattagcaagaagttagtaacaagtgttaaccataaatgtggaaaagcctaccatcttacacagtagctacttctaatgcttcattcttctgctctaccatgtaattgtgaacccttttagtattcaatctcataccattgatcatctcctcacttgcttcaattatctgtttcggcagagcaatcttcaaataatcaaaccactcttcaagtgtcatattctccaaatctggctcctttccggattcacccaacttctcattagacccaaaagctttatccttttttccctcttcacaaaccccaccattgatgccacaaccatctctgccatgatgatcctcctcttcacagagctccatcaccgtagcctccaccttttcacactcatgttccctcaaattcaacttgtcaatgtctttatcatcattaactcgtcttgacttgacttgtccaccttccacttcagaattctcttgaattttctcccatctccgagttcgcctcgttctcacttgcggcagctgttctttctcctcttcaaccacactcttcaaaaccttaggtttccttcctctccttgcctctgctttctccactcccaaaccacatccctcttccttcttctcctcaactcctccccgcctagttcttcgcctcaaaaagcacccatcgtcgactccaatcttaacggatatggaagtggaatctccaatcctgatgcaatctccgtcgctgagctcgacggggacgtcggtttcaataatttcgtcgttgaggcaagagcgattggaggtgctgaggtggtgaagtagccatttgccagattgagattggatagagaggtgcttagttgagatggtggagtctttgattgtgagattgttaccacggacaagacgaccgattctgacggtacatccgggccggaagtctagggtttctccggctcgaggaccttggatgatttcaagtttgagagccatgaagaagaagaatgggtttgtttgagctaactaacacagtttgttgttttttatttcatttctaacttaattaatccaaacccggaaaatgaaattataagtagaacaaatcagactttttacttttacttttatcttttatttgctgggtttttaattaacatcaaataaatatgctttttcttttctttttttttttgaaaaatgcatttataaataaaagtgaagttaaacttcatagttattacaaaagatattaacaggtatagtagatatctctactattcccgtaacattgttggcaaacgcccattaaaccacattatgggccgcatagttacagtttctagctatataagaaaaattacaattagtcatagaagcaaagaggagcttgcaatgacgcacataattctcaatcccccaaatagagtcatcaaataaatatgctaatttttaagcattgtaaccagattaattagatttattgcactaaaactaataaattatgtatattattattatgagaaatactaaaacaaccatgcctaaaaagtaattatgtgtagatgcatcaaatattcatgtcgtgaacaatataaaatttctgttatgtgaaaattttgacatggaagatctaggtgaagcggatgtaatctttagtatacagatcactaagtctgaacagaaaatttctttggatcaatctcactacattgagaagatcttaaagaaatataattactttaattgtaaacctgcttgtacactatatgatcacagtgtaaaattatttaagaacattaatgattgtgtgagacaatctgaatatgcgagcatcattaggagtcttcggcaggatcgaccctgggggtaggcgggctaggcgtgcgcctcgagcccccgaatactcagggcccccaaaatttaaataagaagaaaaaataacaaaaattatttagtgtggtggtagaaggtcttactttaaagtaaaagatatgggatcaattcccaacctctactatttaatttttaaaaaaattatttaatgtgtagtta

SEQ ID NO: 16929 - DNA, 3725 bp, Cannabis sativa
aaaaaaaaaaaaaaagatgaaaatagcattatccagtaataaatagtaaaaagctaccttaaacgttaacaacatattcttggcgattgaaggagagattcttactaaagtcttcgattaacaactcattcctgttagaattaagaccgcgacgtaatgtatttatttatctacttttgtcttaccattattttggtttggactaaattcaattgggcatctgaaattgaaattacagaaaactacaccattacaaagttaatagaataatgtgacaaataggaggagaaatcagaattagtccaaataaacaaaattagcatgattatttaaaaataaaataaaaaaaaattgcctataaacgaagaaacaaaaatattgtactgcctatagatgaaataattagtcatgttatttggattgtttgtatatgttgcacaaataatatggacgaactcaatatatttgagtacctgtgttctgagctatcgaagaagctggccttgctaacctaccttattagaatgtaacagaaattgattatatttacaaccacgggaaaaacatacacagttcttaactagctcattttgttaatttatattagatttcagctcataggaggaaaatgtgctcttatgacatgggttataacaacttccaactgcaatacaatactaacaaaaagagttcgacttggaggagtagggatgtccattataccttctagcattagctgaaccttcttcattggaggacggaagacgcaacaatggatcttcctgaatgcaccacagtgcaatcttaacaattctctccaattggatcttgttttactcttaattacataccactttctccagctttttattctcaaaacagttgtagacccaatcttccaagactgcttcctcttcctccagaagatccaatatcacattctttcgacaacatataatctctaacagtacaataccaatgctataatgtctgcattgattgtgacaggaagccctttatcgcagtgaaggttctggtttggtctggcatcatcaatttccccaatccaaaatctaaaacttggctgatctgatgttatcaatgagtatgtttagaggctttatatcacaatggatgatatgtgtctcactcttggggagcgatccccaatctttcatctcaacatggctgactttccttttggaacagcaaatccgcaagtgactcgttggccatgtactcataaacatccttcacgataatatcctagtaaatgaactaggttctttgtggtgggttctcccaattgctttcatctcctgaaactctacatctccttcctccaacaatctacttaatctctttacagccacccttttctggctattcaaaattattcctttgttaaccttcccaaatgatcctcttacttcctctaacaatctactgaatcttaaagttcttgtgaatatcggttgacacgtatcactttcttacttctttaaaatatagaaatgtaacccagtattgctgctgtcgatgctacatcatcaaaacttcaaatgaaatccaaacttctagcattttatatacataatagaagtagaagtgactaaggttcactggcagtcaaccagtgatcaaatcattctaatttctaaaaatgtctgtcttaagaggaaacatttagcattttagttgccaagactcgcctttatcttcccaccccatttattgtcaagaaattgtgtgaacaaaactcactgaaggacaggtggtgtgctgcaaaaataactcaatctgtcaggattgagaatagaataagaatgtaatcgtcgaatagataatgtcaactcaacaaacttggattcagagacagcaatttcgcacacatatcaacagaatctaaatgtaattcaggaagaacacgttgagaaaatggaagacatgtactagattttatattcttgaggacctgaataataagaagtttacaagcaatcgaagaatgcccatctaaaacatctttgcctttggaaacagaaagtaagtacctgaaagttattccttccactaaaagggggatacccattaagaagctcaaaaaggattacaccaagactccacaaacgcctacttttcagtacaacccgattttaagaaacaggagagagtaagaagtttgtactctttcatcatatctttggaatgcaagaacttctggcgccatgtataattgagatccacaaactgtctcagcataatcacctgggtgtatgcatctattgaagaaggaaatcattgaattaaaaaaaataatgaatcacaccaatattttagtttcacttaaattcataaaaattaccttgagagaccaaaatcagccattttcaacaccggatcaccctctgtgcttgacaataaaatattctgcttcaataataagtatcattgttaaatgcatatagatttctataatataacagtcctcaaaaagccttgcttattccagataaaaacctctgtccatagaacatggtaaagtcagatcattcataaattaacatagaatttaaaagatgactctctaagttgcaagtactagagcccattatcttcactctaaaccatcttctttaaagtatagctgtcttgagatgaaaccattgatgaaatcaattaattgaaggaaaagaaaaattaaaatgcagagtttgacttgaatacggtcccattaagatttgagaagatactattatcacacataccaaatattcctcatagttgtctatattggcaccaccgcatgtttttttttcagtaggttaatcactcacacaaaggcaacttgtttacctcaggcttcaagtctctatgagcgatgtgatgagattgcattacttccaaaccaactgctgcagtaaagagttctgaattacgatttaagaattgcttcagagcaatagaataacttaacataatgaaaatgacaaggttaccaagctgttgcataaatcgtcttgtaatgtgttcttgaattctaccatgtagatgtatataggaagctagatttccaccctcacataattcaagcacaagaaaaatgcaatctttaccctgtggatatgaacggaataatgattagtcatgtcactgatgaaaaatgcaatttcatgaatttatttttgagcgtagagaagagaagaaaagagaagatgagagaatatgaaatagataggtaaaagtacatggaaaatatggaagaggcggacgatgttgggatggttgacggaggacgagaaattgagctcgcagtcgaagcagctgcgcatgtgtggagtattgaggttggagaggtagaccagcttcaccgccgtttggtgtccattgacgatgtgctccgccttccatactgtggagaaggatgcctctcccaccttcgatttcagaacatactttcccactttcattattttcgcctccatgtcattatagttttcttaaaatacatcttccaacaattctctcctcattaaaacctgaacactaaacctcaaaggaaaaagtacgtgtgtacaaaaattttcctacaccgtccaacccgaataacccgcccagactaaaccgacaaaaaataccaaccgacataactcgacaaaattctaaactgcccaatcaattaattgggcgggttgaaaattgacccaaactgcccaacccgattt

SEQ ID NO: 16930 - DNA, 8180 bp, Cannabis sativa
  modified_base (5778)..(5795): a, c, t, g, unknown or other
  modified_base (5892)..(5915): a, c, t, g, unknown or other
atatgtacatctttttaagagggtgcattgtagaatcagccatatatatttatctatcatataattttgtatgactatttaaaaaaaacataaagttcaaactaatttgttttttatggtggttgaatttaactttaaattcaacctatatatatttatgtcattattacaattaattaaaatataacattaattaaaattactattttgattggctataaagattgtgttattgttatggttataactcgtatttactattttgatttactctaatattttaccactctcgaaatttagatactcaaattacttaaactttatggcttgataatgtaatataaatcacacaaattacaaatacaagcaatgtgggacaaatatattttttaaacaatgtgttgtttttctttactttaattttttttttttttttttttaggagttctttactttaatttaatacatatgaatgagaaaaaatcaataatgtgtcgtttttcattgtagcttttattttagcctaaaattttgataaacgacaccgttttatgaaaagaaatcctcttctaccattagctgacttaacccaacggcggcgcgtcctcaccaatcgcccctctccgatctcctccttggcctactaccattacatttccaggttcttacagttttcttttacctttgttcatatcagattgaaaatataaaataaaaaaaatggttttttccttcttcatatcagtgaaaaactgaaaaccctaaaatctttaatttgattagaggagattaaattgattgatgaaatctcttgaattgtaaatgacatgagctttagctttgattttggaacaattcaattataatttcatttaaaaatttgggtttctttgatagcttttgatgcttaaaattcagtatttgcttgtcacttgaatataatggattttggggttctttaattaagcacttttctggtaagtatttttaatccaagaaatgattttggaggtgaaaactgagtttgcataaattttcttcattgccattttaattatttgacctgaaatttcagtctttaggtatttaattgaatgtttaacattgaatacatttgtttgaccaaattataatatgcatatatgattcatgaaccaaacttacaacattttgaaagtcaagtccaagactgaattttgctttagcttgagtctcacttcacacactataaaatcccagaacaagtttctttccaaccaaacaatgcatgtgaggtttcaggtactgcttagttgatcagttaaaagagtttgaattttgtcagagatgtctcatttgaatgaaggttagtccaatttctcagtttacctctgattaatttactgattctaatatctttttgtgctaatatttgggaattcatgttcttattgatgcaattggaagttggttttctgccaatagaacccaattgcttgtttttgttataatgaaattatcagcatgaaaggattcaatttactgttataatagaagatattatatcacatttattgctgataatgttgttttgtttcatcagattttttggatattcagttaccacttatcaaattaggtctgcatttgattgataatgatccaaagtaagtatgcctcaactcataatgttctcttccttatacaataattttatttatttgttacagaaaattttggactattttaaatcagttcagttaagttttgtaaaatgtataaatgtgggaaaaacatatataacaaacttgtctttcttatgtcaaggggcaagacatatgtgattcttgttgccactggaagtttcaatcctcctacatatatgcatttacgcctctttggttagtttttttataaagttatgtgttaatggtgaagtttgatatttgatacaccgtgctttcaatgtataatgttcaatatttctctcttcggatgataattaggaagttggtaggaaatggttaaagtttattttaattttagaattgttcaacaaaccgacgagattgagaaatcaaggaagaaaggatgaacacaaatgcctctaatcttgtaacttgattgtatgctaccttggtagaaaagggatttaatgtatatttattaaatctgtgtttttatgcatagaactagcaagagatgcactgaattcagaaggattttgtgttattggaggttatatgtcacctgttaatgatgcatacaacaaaagggtatgtggtatatacaccatgtttcctttttgaagccgatacattacgctttctcaatatgcacattacgttaactcatttcggttttcttctttcttaactatgtacattgtggccacaaatgaacatgttctaacaaagtactcaccttgatgatgtagggccttatatctgcagagcatcgaatacagttgtgtgaactcgcctgcaaaagttctgactttgtcatggtagattcatgggaggtaatgtgctcttcactctctcttttcgaggttacatgctattatgtttttctaactcatgataagaattttcatgcaggcgaaacaaagttcctatcaacgaactttaaccgttttatctagagtcaaaagtgggttctctatgttgcagttgaatcccaaaggtaagaaacacaaatgaaaactactttaggctttagtttccgaaatcctcaatccgaacattgtattcatgttatggttataacttgtatttactattcctttgttagaatcccttaaggttatgattgtttgcggttctgatctactccaatcttttgccactcccggggtttggatacccgagcaggtacttatacaaaaattaatatatgaaactagagttcaatggatttaaagactcaccctttatgcatttcttttgtcaggttcgggccatatgtagcgagtacggtgtggtttgcattcgtagagagggacaagatgttgagaaaattatctcagataatcaaattttgaaggagaacagggtaaaaactatgcctatttgccaccatatatttatatagtttttgaaactagattatgccaatcttaccaaaccagaaagaactcgaactatagatacaagccctgtcgtaaaaatttgatctttttattgtttaggttaaacttccttaggcttgggatgtcgtgggtcagctagacattttccgagcaaaccacatgtctgaccatttgagtttctattctaaacattttaaccagaccaacttctgaattcttagcaatttggtcaagtgatttatgaaattggattatgaagtcaaagtctttctttctttgaagatttcagttctgtaatttgattttcaactattttgattttgacctaataataatttctttcttcacaggggaacataaaaattgtggatgaagttataccaaaccaaataagttcatcaagactaaggtaatcaaaatctaatcacttgactaaaataagattttctttttctttcttctttcttgtttttaaattaatatttaaccatattcaacttttgtattttattgcagggaatgtatttcaagaggtttgtcaattaaatatttgactgaagataaagtgattgattacataaagaaaaataatctttacatcaactcatcttcctaattagaatccaataattttagtgtttatttatgaatgattttacatcattctattcaattgcaattattgtataatattttagatgaatatgaatatatatgcatagttgttgaattcaaataaaatggcttttgaaatatcttttttattattattattattattttgtttagaattagaaatattgtgaaagacatgaaatttataagtgaacttaaataacacgacatatataattataaaaataaaaaataagctacattcacaaaaattatcttatagtgaataaattatatacacatagttcgataacataaccattaatgattggtgaacctgaaaatccatttgcaattttttttagacaaatattgcttgaatgatttatttttctcgtaatttaaatacttcgtgtactatcaaataaattattggattggatttcgaaaaagataaatgatataacaaatcaattcaattattttgttatcgtttgctgctcgcctcattcgaattatgcaattttaaaataaaattaaattacttttgcatccttatattaataatccaaaataaatacacaagaaatcaaatctaaacacaaattaccccatacaaacaaaaactcacaaattaaacttacaagcaagaaaataaaactaaaaaacaaacaaacaaaacataaataaaacataaataaaacaccaataatcatgattaacccagttaattaactaatcaaattatgattaattaactttctcagtttatatatatatatatcaaattccaataataccctccctccccttctttggtttttcatttatactgaccaaaaggatcatatccaccaccaccagaagacccagctccggacccgggtccagtataacccgacccgtctctaaaatacccatgaatcgagttctcaaacatagctggtggataagggcccaactgatacccaggcccaccaggcccataagccccaacatgaagatgatgactaggcccataatgatccatattagctgaagagtttcttttcacatacgccggttcagggcggagagaagaagatgacctatcagtttccgactcgcggtggcgcgtgagaaagagcgtgagaggctcaacgtaatcgtcaaaccctaattttgccatagcccaaagcacgtcctcggcggtcaccgtcttccgctgctcgcgctggcaacggtcgttggcttcaccggtgatgaagcttatgtactccgacacgcactcttggatcgtctccttcgcgtcgtcggagatctttgcgtgcgacggaagaatccgacgcatgattctgatcacgttcgcgatcggcatgtactgatcttgctcgcgtattacgcacgtgttttgtacgcgctcatgacctcctccgcctccggtgaaagctccggcaccgttgttgtcggtgccggcgccgatgccattttcttcattggtgttatttgttaccactaagcctaagtctgaaaaatacaataatttatataataataataacaataaagaaaacaaaaatattatgtatttatatacttaaatttaatttttaactataatatatttaaatatattttaagtttaagtcaatcatcttagtctaattaaatttttatttttatttaaaaatatattaataaaaaagtgatacttgacacttaaaagtataaataatcacaaaaattatataagactactgctaaaaattaaacttaaatatttatttataatagaaagttagatttaaatgtttagagcacaaattaccttttaatttatatgtatataaattttttctaatgatattaaattttaaaagcaatagtaattaagtcgttatttattacactaagtctggaaatataataataataataaaataagaatacataaatattatatatatacttaaaatttatttaatttaaaataatttacagtataaatatttacgtttaatttttaagtgtaataatacttaagttatatttaagtgaatcaataatcacgtattaatttctgattggtcaaaattattaaatttttatttttnnnnnnnnnnnnnnnnnnaatataccaataagaaaataacgcacaaataatgacttaatatttaacagccaagtatatacgtagttacaggctcggccctgggcataggcgggcnnnnnnnnnnnnnnnnnnnnnnnnagtccaggggcccaaaaaaaaatccctttaaaaattatacaatttttttttattttgaaaaataccacatttttttctaaataagggctcaaataaattttttttctatgacccactaaatttcaaggtcagccctgcgtagttaggtaccattaaaaattaaacgtacgtatttatttacaaatcgagagttaattaacttaaatatttacaccacaaattaatcttcaatttatatttatttgattttttaatgatgttgaattttaaaagcaataataactaagtttttaacaaaacactacgacagatccctcaattagcggtggatcactccaccgataataatctcattttcggccgcaacatgctattatagcggcggaagtcccccgctagtagtcgctaataatagtattaggggcaaaaaaattatgcctatgtttacatgacattataattcattcaaataaataaataaataaattcatgacattataatctattattcaaaagcaaataattttatttaaaattagtaactctcaacaaattatatgcacttggtgtattttactaactttttagacaatagtgtataatatagatataacttattattattattaataataataataaatattaattattttattctgtaaaaaaagtactatatattttcaacatataagacataaagacattaatatatatttgaagataacaaaaaaatcatttgatgaaaacattcaaacacaaatataatgtctaaattactataaatagagtatttctcctaggaacatatacaaatattttgaattattattatgaattattaacaaaaaaatcatgaattaattaacaaataatcaaggcaacatagatatttttttttaagaaaaaaaaatgtctgcaaattttgtgtggttcaagaactattaccaataagtatattcaaccaatgaaagcaaaaagattgagagacttttcatggaaaaacaaagagacaaaatattggttttcaataataaataaaataaataaataaaaagacaaaaaatattgtataatacttatattgtgggtcccacctagttataactagctggtaaagctactaacattatagtctactgttgtgattctctaataaattcataacacactttctcaaagttccaatatcatctttttttttaaaattaaaaataaaaaaaaatggtcaacaatgctttgatgattaataattttttttatataatcataaattaaaatatatatatatcatttgatgtatatataattacattcataataatatcactagtcttttttagtattttgttaactaattaaatagaatttacttataaatttgactatttattgatgggaaattattaaagtaaatttattagacaataaattaacatgtgatatattaaaaaaaaaaaaatcatttattagacaataatggtttataattagtagaaaataaggtcaagatatatatcctaaatcgtttcaaatgtttaaataataaatattataaaaaataaaaatgataaaacttctgagttaggtctcttgcatgcatgccatgtcagctaaaaaattattaaattaaaattaattctcaattattttacaattataattatctcataacacatatattaatattgtatctatatatcgtataacggttatatatatatatagaaatattagcattattagagaggagtgaagaggaaaaagataggaccattttcaacaagcgttacgtatatatatatatatatttatataactcccactaaactatatatgggcaaaaagttcatacatttatataaatatatatatatatatatacatacatgtatcatacatatataattaaacaaacctttatatataccatttatagcttttatgtacatagttttcatatatacatgatatataccttaaaagaactagaaataacagtctctatgaaaaatatcaagatatatatatatattatgtaatatatatatatatatatagtgtttaaatatagcaaattaaaacaaaaatcgtatatagtgaaacactcaaacaaaactcatgcatgcaacgaaaaatccaaaactaaaagaaaagataaaactcaaacatacaatatatataaaagcataatatgtaaaataagaagaatacatatacatatataatatatcttatgcacataataaacataaataaatttaa

SEQ ID NO: 16931 - DNA, 3801 bp, Cannabis sativa
tttcaaatataaatatttaattttttcaaataaaaaatttgtaatctttaaaaataaaatacattcaaaatcttaaaaagaccaaaatcgaaactaagcaatacgtggctcggcacgtacattcacttagtatatatatatttatataggaaaagagggaggagaaggagagaggaaaaaagggtgaagataaagaattttagttaatagtactattttgggtgaaaaaaaaaaaagtgaattattaagcatattattacgtgagatattattgtagacataaaatctcaaatttccaaggtggagagcagcagtcatggcattcaatggaggttcaaatgaagatgaaattctcatcaatgatgacaacgaccttccatcgatcctcatccaccgcaaccctgcctttaatttccttcctttgactaatctattgaagaaccattttcgcttactggatccgcaccagtctcctgatctcccactccacagcttctactctcgccatgctcactccgtacgcgccctagtcatttttgggctctgcccagttaccgaagacactcttcgccatctaccttctctcaaactcgtcgttggctcctcagccggcatcgaccacgtcgatttgtccgcatgtcgcctccgaggcatcgccgtcaccgacgctggcaaatcatttgctgaggatgttgccgatttcgcagttgctctgttactcgatgttctgcggcaagtttcggctgccgataggtatgtccggtctggactctggcattctctaggagagtacccacttgggtctaaggtcagattttggtgttggtttttgttttctattcttaatctttgtgttaatataagctatttcatcaattttagtgttagtgtagaatgtacattgaaatgacaaaatggtttgttcatgtggctgtatcactaacagaatgcttatacttggaaagatatgaaatgttaacatttgattagcctttgcttgttatgtagtgtttaagatcttaactgttctaattacagataggagggaagaaagttgggattgtggggctagggagaattggcttggaggtggcgcaaaggctctctgctttcggctgtagggtctcttacacttcaagaaagcagaagccatctatgctatttccttacttctcaaatgtatgtgaactcgcaactgaaagtgacatacttatagtgtgttgctctctaacaactgaaactcatcatattgtaagcaaagatgttatgaaggctcttggaaagaagggtgtgatcatcaatgtgggacgcgggggccttgtagatgaacaagaattggttcattttctaacccaaggacaacttggtggagctggtcttgatgtgtttgagaacgagcctgatgtgcccaaggagctgtatgttttggacaatgttgttctttctccacataatgctgttacaacccaagcatccattgaatccctgagcctactagtcttagaaaaccttaaggctttcttttcagataagcctttgttatctccagtcagctagaacaaattaatgtatgtcattattccattcaataaacaaatctccaggtacactgtcatttcttattgacagcatgtaaatgttataaatttaaaactgccttctcattttaagatttgtctttacattttggacaaatcccattaatggtttttagttttcttaggatatatttaatggcagctcgcacccaaattaccaacttaccatgctaactaactagccatgaaatggctaaactcatgagcaagaagatgaggctcacccaaacgggtactgaggacttatttagcgcaagttcttgagaggtatgctcttgtaagtttggtgagttaagaaccagatcagtgtgtctgattcattttccttgagtggggctttaatggtgagaatgagggtgcacttttacgaaacttgaatatattttgttgttaagaatctcacgagcatctccaaggtaacctcaaatttggagttacagtaaaaaaaatcctctattttaacagcatatatgcagttttagctagtacactgcatagacagtagtactatagcaactgcatttttttttatttattatattagtattttataacttctttgtatattatttaatattaaaatatattatattttattaaaaatatattataataataaaaaatgtattttttgtgtgaattttagtattgtggttggaataaaaaatgatagtgacatattagtctaatttttttattgtagtgttattttgaaaatatttatcatgtcgaaaacaagtttaaattatttgttgtacgcgtgtcttattttatataaaagagtttattgtagaagcactttttaaaaaattaattaaaatttttagtgtaatttttggtgttataattggagtttttgatgccaaatttagtaataatatgacactaaatttaatgtatggattgaagatgctataagtagatattattgattgcagaactttgtgtgttatttgtctctctacatataattattctaatttattctcttttcaattgcctagatctgttatttgttcgagtagtattttaacattggtatattggatgatacacgttttagttatgttgttattcaagaaactctaaaatcagtcattaattcttgtgagaatcaatgcttcttaatatttgaaattgaaccttgctactctactatctttactgtttattaatgtttgtcatatcatagctagtgcagtatgcaatgttattgttgttgtttttttataaagagtaaaacttcattaaaaaccaacaaaggagaaagcaagtctgcactaggagcaactcttgcaacaatgggaattacccctctccacttagcacaagcttcagactctaaagctgatttggctaaaataggagcaactaaattagtttctctaactgaaaacaataactgcttacaatcagacctagctaccaaactattaagaatcaaaatcaaagcagccattctgtcctccattactagcatcacagccttcttacaatctgattcaacaataaaattcttgaagttaatatcaattgcaaactttaccagtctcgaataatttggtgagataaactcctgcttagcagcaaggccgaccttgagaatatatgggattcgaactatgacattgtataatatgtcatacatttcaatcaactaaactatgactatttattgtttacaatacacttaattttactttaataaaagtctaatatttttttttttattttgagcccccaaaatgagtgggccctaggcacgggtctagcccgcctatgcctagggccggccctacttagcatccaccacttgacctctgtgatcgcgtataaaatataaataccataagggcccgtttggtacgcatgattggactgaaaaggattagactagactggacaagattagattatgctgaaagtaatcatgtgtttggtttaagaatagaatagactatttcatttatttctttttagaaaaagaaaaacttacattaaaattaaaatatataatcataaataaataaataaataattcgcagcaaaaaaatcaaaataaataaattataaaatataataaaataagatatctatataatcaggtatatatcatagggtgattttataatgccccctcttaaaaaggatgtactgatgcacccttaatttgtttcggcatccagaagaattttttagtcta

SEQ ID NO: 16932 - DNA, 3373 bp, Cannabis sativa
ttttttttctcaaattaactttattttgcagaaaaaaaaaacagacttaagatttgaaacaaagaaaaaacagccgtgaaacagagaaaacatcctttatttttattttcttttggaacatagtgtagtgtagaatcggcattaaactttttttttttacagatattgtataataatttctttctaaatgcaaatcttcattcacataatgtgcaatttagtttagtttaatagaattatagaattctatatccacaattatcttaaattggaaggaaaaagaactagcataactaacataaaataaaatattactaaattacaaacaataaaaaaatgacaataggcaataaaatattgtgttttccttaaacaagtaatttgatgaccctccaaacaaatgtgcatgtgtttgtcatgaactgaaaagatttgagttggataagaagagatttggtttaataccatatgttggaatttttaaactaaaatctacaacttttgatttatatttgtcattttgaaacctgtgattagtgttatacaattttaggtgaatctgtaacaacaccatatatttactttctttttttttttttggtagaattcaatatcaaattctctggtattattgagaaaattcccataacaaaacgagtttattcagatgaaacttcctaatgatcaatttttttcgaaatggctataataatctaatagaaagaccatatattatatattacattcatatatttgtgcaaagaaaaacataataaaatatattaccttctcattatttgtgcaaagaaaagaatactgatcatttacagtcacaaataatcacaatataaataatagtttcttattttgcaattatcagtcaaatttaaaaataaggaaactccaacatttgttattacaaacaaaaatagatataaaatactagcctgctttcctttgggtgaaagaaaacactgtttaacacttggaaaagaatttttgccaaaattgcaaaatcagtacaagatagttcagtgataaaagtcttgactctcaacaatctgactaccaacagatacaagactattcacataaggcaaacacttaacatattcatcactcgttatgctattatcatgaccataactaatgccactcaatttcatcttcctatctttcactttataagcacccaaaaatcctcttttagaaataaccatcacaacctctccattaacacaaggcagaaccctcaactcgccattggtttggcttggagttgaagaatccagagatattctgtacttgaaactcatatcccatcctccatggatgtcaattcttaatccatctatattttcatgaaccacaaagtaacacaactccccattcatttgtgtcaaaaagccttgtgatgatgatgataaggatgatgatccagtggtgggaggtgttattaacataccatattcctcatcactcaaataaaatgccaaaattgtaccacaacaagtttcccaaaaggccactccatttaagcaaaatccatctcctttaagcttcaaagcatcttcttcataacattcagtacccgaaattctccaagagcctgatctcgaagagtaaatctcgaaacaaacaacatggttttcgggtacagccacagcacacacaagctcaaaactcgccttgaaattgaaaaccgaagggtggaaattgagagctaccgcggctgagttttgccaatggtaaaacttcggttttggaagctttttccattccttggttgcggggttgcaaatgtagtagcgaggattgtgtgtgaagatgctttggcaacagagcaagccgtgggaagcggctctgatgaaaacagattcgggtaagaaactgagggcggaactctgaaccccacaagccgaatggtctaaggagatgaaaaagggcctttctgaaagagtttgacaaaaaattccagagatgtcttggtaattgtaagagtgtaagtgagctagaaaaggttgagtgatccagtgattccagtctttgcatactaatctgaacctgcatagtgattttgctgggagaaagcaaagaacatgttgttttacaacattttgtatagtcatttcctccttattatcaactgaattttggccaacttctttgtctggatgtaactgttatcatgaaaattgcacaaaagaagtgaatcaaatgagtgagtgcacaaagaaaatgtacatcttaaaacttttctttaaagcatgcatgaatccatcaacttctagtagaatttgtcaaactaacaatatgtaaaataactacattaatttttcactaagtaaatttatttttataaggattaattcactatttaaaaattttcataaaatcaatagacacttttctttttttttgagatcaaacaaaattcttaacaaaaataaaaataagtttaccaacccgtttacaataaattagaataaaaaagttgaataagccaccaacaaagaactaagaagcataaaaaaacaatataaaatatactaagttttcaaatcaaatattcacctacaaaatactcaaaacattatatacaaccaaagttatttggagtgttttataaaaatagttttttaaaattttttattagcaaaaacaatcataatttatagattaatattatgcgacaatcatggcatataataataaattaagtgagattattttacaaattttaacatttcatatcgttaatttaacgaatttcacttagatcagtcagcgtaatatgaatcaaatatcaaaacagatcaagccacaacaaataatattcaactgcttccaaacccaaaaaaaaaaaaaatgtaaagtacttacaaccaaaatatatatatggtttcgatatgaaaacgtaccttgccacaattcgattgaaccattgaattggtatgaaagtcatcataagtagttagactttcctcaaaagtattattattattatcattttcagtcccaccaattgtatcatcatcatcaccacacttcattcctctcatatccaaaattttattaactgaaacaaaaaaaaacgactttcatgtgagaacaagaatattcacacacaaaacaaataataaaaattgaataaacaaagagaggatacatttgttgatagcctagaatatgaatggaaggagacgagaaattaagaagtaaacaaacagaggttacttgttggggaagtcaccgagtagatttcttctaatattcaaccaggaaagcgttgatgatgagatatatataaccaactgttagcgttttctttaagttatatatcatgttttcaagtcaaccctattataatctc

SEQ ID NO: 16933 - DNA, 5035 bp, Cannabis sativa
  modified_base (48)..(63): a, c, t, g, unknown or other
caacataaaatgttatttctgatgtttattaataagtaaatctgattnnnnnnnnnnnnnnnntatttagggcacaaaacccaacccgaatatatgttcaggttcgagtctctgtcttggtccccattgaggtcctgggcttggtccgagtctggttctagtcttaggttttagtttagggtttagggattagggtttacggtttacggtttaggatttagaggtttatggcttagggtttagggtttgggctttagggtttagggtttaaggtttagagactagggattagggttaggttttagggttcaaaatttatggtttagtgtttagggtaattaaatataaacatacttataattacttatcattaatgataagtaacgattagtaatgataaagctaatataagtaataataaggaatggtaagtaatgataaaattaatgataaatagatttattttttaatttccctaaatcttaaaccctaaaccctaaactgtaaaccctaaccctaaatcctaaaccctaaaccataaacctaaaccctatatcctaaacctaaaccctaaatcctaaaccacaaacactaaaccctaaaccataaacattaaaccctataccctaaacccttgaccgtaaaccctatcccctaacccgtaaaccctaaatcctaaagcttaaaccctaaatactaaacccctaaaccactaaaccctataccctaaccctaaatcccaaaacctaaaaccttaaaccctataccctaaatcctaaacccctaaactctaaaccctggttcaggtttaggtccgagtttgagtctaggctaaggttcaggtctcgagtctctgtttgggttctggtcctagtctgtgttcgggtttttgtttaggtcccagtatgcgtctgggtctaggtctgggtctaggcctaggttcgggtctaggtccgaatgtgcgtcaggtcccgtgccccaattctgttctagttctgggtctcgagtttgggtttgggtctaggttgtggtcagggtcctggtctaggtcgaggtctgggtccgagtttgtatgaggttccccgatcaaggtttgggtatgggtattggatctcgatccaggtgcgggtcccagtttaggtccttggtgtcaggtctcggtccgtgccttggtttgggtccatgtcccattcttaatctaggtttaagtttgggtctagttcaggttcgggtttgggttctgggtcccaattttgccccacatcccaattgggatcctggtccaagtataagttcgggtcccgtccaactttgggtctcgagcccgggtcaaggtctaggtttgggtcttggtctgggttttggtaccgattcaggtctagggaaaggtctgggtccaggttcaagtttaggtcctggtatggtctcgttttagggtccccgtatagtttcgattctagttttaggtcccgagtttgggttggggtcctggtctgggatttggtccggctttgagttttggttcgagtcccatgcatcagttcagttttggttcttattttgggtctcgattttttattttggtttgggtcctagttcaggtcttggtctgggtccaggtttggatttgggtccctaatctaggtctgagtttgagtcctaggtccaagtctgggtgtaggtccttgtttgggtccttgtttaagtaccctaaaccataaatcctaattactaaacgctaaatcctaaaccctgaactctaaaatctaaaccgtaaaccctaaaccctaagtcgtaaaccataaaccctaaatcatcatccataaaccctaaaccctaaatacgaaaccataaaccctaaaccattaaccataacccctaaaccctaaaccctaaattttaaaccctaaaccttaaaccctaaacactaaacccctaacttataccataaaaactaaatcctaaccctaaatgccaaaacccgaaaccctaaaccctaaaacttgtaccctaaatcgtaaaccctaaaccctggttcaggttcgggtcagcgtctaggtctagattcaggttggggtctcaggtctcggtctaggttcgggtcctggtctgggttccggtctttgtctatcatctggtcttggtctgggttttagtctgggttcgggtcctggtcaaggtttaggtcctagtccttgtcttagtctgggtctaggtctaggtctgggtcttggtccaggtctgtgtctgggtttgggttttggtccgagtttgggttcgagtgctggactggattggggtctgagtcctattttgggtctgggtacaggtctcaagtctcattctactttaagtccctaccttggtttgggtctgatctgagtccgagtctaggtccaggtcctgagtcctagtcccagtcatggtcgaggtttgcaacaaggtttgggtctgggtctgggtctggggccgagtctcggtcccggtctctattcaggtcctaggctgggtctggttctagttccaagtccgagtttaaggtttaaggattaggatttagggtttaggaattagtgtttagggtttaagatttagggtttagggttaagggtttagggtttatggttttagggtttagggtagagggtttagggtttagggtttaaggtttagggtttagggcttagaatttaatgtttaggatttaggattgtagttttaggatttagggtttagagtttaggattttgataataaaatataaagttatttataattactgatcattaattttatcattacttataagtaataataagtaatgataaaattattataagtaatgataagtaataatgagtaattaatataaataataatatgtaataataaggaatgataagtaatgataaaattaatgataagtagtgatgattgggtttattttgaattaccctaaatcctaaaccctaattcctaaaccttaaaccctaaaccctaatcccttaaccctaaaccctaagccctaatccctaaaacctaaaccatgaaaactcaacactaaaccgtaaatcctgaaccattaacaataaatcctaaaccgtaaaccattaaccctaaatcctaacccctaaaaacctaaaccctaaaccctacaccttaaactctaaaccctaaaccctacacgctaaacttctaaaccctacaccctaaacacgaaaccctaaccctaaatccgaaaacccaaaatcctaaacctgaaaccctatgccctaaatcataaaccctaaacccctaaatactaagccccaaaccatggtttgggtttgggtcaggggctgggtccaggttcaagttcgagtctcgagcctcagtccctattcaggtcttggtctgtgtttaggtctaagtctgtgtctcgctccatgttcaagtttggttcctggtccaggtctaggtctgggttcaagtctaggtttgggttttggttcaactctaggttctagttcgggtctcgtgccccgatccggttctggtttttgttcctaggtgtgggctttggtctgggtcctggtccaagtactggtccgagtctgggtctgggtctaggtccatgatccaagttcggtccgagtcttggtcctggttccaggtctgggtctttgtccaagtttgagtctaggtcccagtctgggtcatgggttttgggtctcagtccgtatttgggtttggctctgggtctggatctcgatcttggtctggtctaggtttgggttcatatttgggtttgcgtcctaagtccaaattttgcccaaggtatgaattcaggtctcggtctgagtttgggtctcgatctagttttgtgtcctaggtctgagtgtaaatcttgatctcagtatgggtttaatttaaggtctgagtcccaattgtctaggtctaggtcttgttcacagtctcgttttagggtcccaatatgattccaattctaattttgggtcacgagtttgggtttggatctggttgtgggttctggtccgggtcccgtgccttggtccaattttagttttggttctcgagtctgggttagggtttgggtccaagtcagggtcctaatctgggtctaggtctaggttcgagtctggttccccaatccacgtttaagtcgaagtccgggtccaggtccttatctaggtctgagtctgggtccatgtttgagttccagtttgggtcttgggtctcaggtctcagtccgtgtttgggttcgagtctcgagtcatggtctcagtgtgggtataggtttgggtttgggtctcggggtctcaattcaacttcgtgtctagatactgtgtttaggtcccggtctgggtcagggtcctaggtcccgggtcccaatccctgtttgggtctaggtcatggtctgggtcccgtttcgggtctagggccgagtctgggtctagtttggggtcctggtcccgatctaattttagggtcccagtacagttccagttcctatttcgagtcttatgtttgggttcgggtctgggtctgggtcaaggtcttggtctgggttctagtctgggtttgatattgggttcgggtttggttatgactcccaaatccaaacaccgactacgggtcgggtccaagccccgagtctcgagtcccgaatcttgagtccgtatttgaatgccagtttcgagtcctggtccagttttgttttaagtcccaagtcccagtacgggtcctaaatctcggtctacgttcgagaccagggttgggtttcgagtcccagacctggttctaggtttgggtctgggtccccatggtcaagtcttacgtttcagtctaggtctaggtccgaattcgggttcaggttcgagtattgggtctcggtctacatttggatctagatcggggtgcctatccttgtgtgtgtccagttttggatctggatctgggttcgggtcctggtccgattctagtttaagtccaggtttggctcctagtccagtcccacggtcttaggtcctagtcc

SEQ ID NO: 16934 - DNA, 2344 bp, Cannabis sativa
ttaatttcttaatagcagttgttagtggtgatttttattatattataaatggtattgcatttacttttgttaacctctttagacaaacaatgattcaatgagattttctttcaaaaatatataaataaataaacaaagtttatatatatataatgtatatatttgcagattgagatcgtttttttttatgagggaaaaaagtatttgattatatagggacataggattattattttactgataatttaatcaaagttaataggcgaatcaccccattaacctatagttaataaatattttgaataccaagccacactagccaccagctagttgtcttgtaatatttatccaatcgtttcattgttcaaaaaaatatttatccaatccattttgtcagaaaaaaataacaaaatagaaaaagaaatcctacggtttgtcggttaatgcaacagctccgcaaaaaatctaaccatacacgtggattccacccatataaagatgcatgttaatttactgtcccatagtagtatgctgccacgtgtacatagacgtggcaaattagtttctttcagatttatcagggtgtctgattatacccacttatcttcctacgtggcatgatattattggttattagactgtatttaccggccgaaggtgtttataatattctattggccaagtttaaaatatctatgtacgtggtcagaaaatggatcagaaaaatgcagtagccaataaagaaaagtgtatttctctggacaaaataataaaatatatgtaccagcatacgtatatgtctacttttattacataaaaaaaataaataaataagagtttactatttctatatttttaacatcgttcatcaattattcacaatttcatattaataaaagttatcttcgactgtactcagaaaaataaaaaaagttatcttcgacctatcactatatatactatgaatgagtgatgatttttttttttgttttgttagccaactctaaaaaaaggtaatttttttttttttttgagaactggtagtagtaatattaaagcaataaataataacacatcaagtcatttttaaggataattttcactaaaaatcagaaaagaaaaaaatatattaataagtttgtaaaaaaaaggggcatatcaaaccattttattggttttaactatttttatacattttaggagatcgatgtatatattttccaaaatattcaatatttagtcatataatttcttcctactgcttacaaaacctaataagttattgtaaatatattttctttttttttaaaaaaaaaaaaaagaagaaatagttatttgtcactaacgtcaaaaaaatatctataattcgtaaagtaaatcataaattctaacattttttttttcaaataaatattttgaaaatatacatatatttggatatatggcacacatgccttgtttaattacaaaaaaaagaagaaaaaaaaaatctcaactaatattgtattgaaaagaggagataaaggattaggaaatagtacgcttttctagaagagctgattgaagctttctagaaagttgtagaagaaggaagctagttatagtgatggaaattcacaatagcagaagaagcttctagcacaatcatattaatttcatatgcttcccacttgtttccgttctcacattccaggccttttatcatttttttctttctttctctcttttttattggaaattatatatataagataatacaaatggaattacataaataattataatttaagaaaaaataaaataaaataacaatcaatcaaaatatttaggagtgtaagtaggtcgggtctgatccgactatgatttgacttgatccagatcatgtaaggatctaccccgcccgctcctttaaatcagatactcggattggatcagatccgacccgacttattcagatcgaatttgatccgacccgactctttttttttaaaaaaaaagaattttaatattaacttataattttatatctatttaattttgtattagtattattaaatacaatactatgtttggtattgacatgtataaatagattgtgtaaagatctgggtccgggtcctggtctcgggtcccgagtttggtcttggtccaggttcgggttccgatctcggtccgggtctgggtctgggtcccgggtctaggtccgagtccggggtctgggtccaaactaggttcgagttcgggtccggggtcggggtccggaccaggtccgggtaccgggcctgagttcgggtcccgggtctaggtctggattcgggtccgggtccgggtcccgagtccaggt

SEQ ID NO: 16935 - DNA, 3338 bp, Cannabis sativa
aaatgtttaaaattccgtaaaaccatatttttattatttttgtgcatttgtgaaattaaccatttttttaaaaataagaataaagataattagagttcatgatgattacatactttttaattatatcagagaatatttagcaaacattcatttagccacattataatataagctacaaaattacataactaagaaatctttacaaaattacatcttaacaaaagttataaaatagaaatactcctactgatataattatcaatatcacatcttgataaaattcctctaagaacattgacagttacttctaatcactttcaattatcacaaaattatagtccaaaactattgaagtctctaatctaatataaattttgaaataaaaaaatttaaaaaataaaaaatattataaattatgaaataataatattaagtgtactaatataaacgtgccacatgtacaagagtagacccgaccttaggcataggcaggctaagcctgtgcctagggcccacctagctcagggcccaaaaaaaaacttctctttttaaaattacacattttttttattaattttaaaaaataccacattttttaataagggcccaaaaataatttttttcttatgacttattaaatttcagggtcagtcgtcaattataaaaaatagatgacactttaaatttgttaataatttaatagtttagaaagtcttatcactaaaaatttaacttagaggattaattacaaacaaagtaataattgaagtagtttagcagaaaaaaaaactttctctaaacatattttaattctttcaaaatactaaaaaaaagtatttataatagtctttttataatatagattctccaaataagaaaataaaaaaaagggaaaaatgagaagggtatttatgtcatttcatttcatacataggtcctttctttgtttctcctcttggatttgctatctctgatttctgaacacaaagctcacttccaaacatcattaacctaaaaacagcaactttgcaggtttcacttaaatcaaaatctaaatggtcaaacctcaaaatctcaaggtcagttgcttctcttaacaacccttgattttttccctctttttttttttaatgggatattacccaaatgaatgaatctaaatcagtgattttgtttgttgttgtgataattagattgttcatttgtgttgtttattcatttttagtattctgttctttgttaattactattcacaatcaagatttttgtataccctttttataagttggtgattggattgctcattctgaatgttttgttatgaaggtgagtttgaatgatcatgatttatagatacccttttgaaagttagttaattgttctgagatttagatttgttcatatatattcccattatgaatggtttgtgatgaacttggcttgtttaattgtttaaattattgttgggtttgtatgaataaaaacaattttatcatttctaaattcccttttcaaagttggtaattgttctgagatttagattgttcatattgtgtttgtataaatgcttagttgaagttggagttgatagatggtgttattgaatcaatccataaacatttttatgaacttttgtttgatttgttttcgatttttcgtctttgtgtaacagtttttcgggttttgctttacatttctgtgaagcatgaacagtttttgtgaggctgtttacacatggaaaatgcttcaattatagctaagccttgtaaacttggggaactaggaagaaaaaatgatacaattatatgtttgaagaacaaagaagcaaaaccagaatggttctattctcattcttctattcttgcaaatagaagtaaatactttgctcatcagttatctcttccaaacactggtaatcttattgaacttcaatgctctgaattcaactatgatcaccatatcaaacttttgaagttgttatatctcccatcacatttgattttggattcgttgaactcggttgcatcagctgttggtgttcttgaattagctgtttcttttcaatgtgaagagattatacagtgttgcattcagtacttggaggcagttccttgggaagacaaagaagaagagcagattttaaaatcggtttcaaagttggggccagtagctatgcctatattagcaaggattgagcctgtggattttactgctacaaaaaatgttttcgtgtcagctgttcggtttgccatgtctattaatcaaccttgtcctcctttcggtgatgagcttaaaacctctgctcaagaacaagttgagtacatgctcggtgaagatgaggaattaccattggttactgcagatgatgaagtgagatcagttgtaatagagggtctttcgaagttatgtaaatcgtttgaagatgaattgagttccttgatttcggatcctaatcttgtatttgaaacagcagaggaaaaattgttgcattctttatctgatcttgaatggatgtgcaacatacttcctaagatggatttaatgaaagattttgtttcgaattggactgaaatctctgctaatgtgttaggcgttgttgaagatcagaaacttgattttcttatgtggggtttgaaaattaagctcatagaaattactgctaaagttttggatgcagttggttatgggaatgtgattcttccttcgccataccgagccatgttactaaacacatggctcccttatataaggaaaatcaaacctattttggattcgaaagggaatgaagagactggttttccttacaagatggacgacgaattatgtcaaagcattgaaggcgcgattgtttcattggtactgtcactaccgtcgaatgatcaagctgatatttttgcagattggatgaaagctgatcaaattcggtatcccgatttgagtgaagcttttgaggtttggtgtttcagaaccaaatctgcaaaaagaagattggagggtctaaacaaagttgataatgctacaataagcctttgaactctcaataaaagttccatttttttattattgttttcctatgaaagattataactttggctgcaaatgtataatttcttgttaacaatgattgtagtatatgactaatttgattagaccttcaaagttggtatcactttgttattttcttcactataataatattcaacccatctaaccatttgaatagtagaattcaaaaatcaagcaattttggtatgaaatgatgttttgtattttcaaactagctccttatttaaattcataacatgttataatgattggtacacatattgtagtacaaa

SEQ ID NO: 16936 - DNA, 3989 bp, Cannabis sativa
cgtgaaatatgttttgttattgaactgtgagcacaatttcagcttacttattgttctgtgactgcgcttgcctttggtattagaggtctcttagattggtttgagacccttaataatattaagggtcatgagtttattgtactaagagttttcatttgtctagggataatgtagcttattgtgtagctagatttgcttgtttttctttttgtataaaagcctttagataggttgtatttctgcttgttcctctcttgctattgcaacagagttgtctttgttttattaagaaaaaaaaactttaaaattatataatttttttgtaaaattgtaattttttatttttttaactcgctgtaaatgaaaaatttaggttgtgaaaatgtacataaaagaaaataatatatttatgaaaaaaacctatgtgctataaatgttgttatcatgtgcccaagttgtaatcattaatgttcagttacctttcaaagattatgtacacacaacattattatgtttgattattgaccatatgcgtataacccgatttattactgaaattgtacataatatacataatattttaatcaccgctaattcatttctaaacatgttcaacatgaacttaactagaaaataataataataataataataaaagaaacaaaccacgacaagagaaaagataacgaaacgaacaattattatgagatggaactctactctctcgggtgattgtctataatatacttactaattaattataaattataatgtatataaggatatacaaagaatgtaccttatcattatcaactttttatttaataatcatatagttacaccaaatacccgcgttattaacattagtacaatagtactgctattgtgtaggttgcacgtattaaaacgactccgtatgcatttatttaatcctattactattaagtcgtttaagtttataggtgataagtaattcgtataagtttataactatacttaaaaataaaagaaaagtaaactattttattttccggaaatacgtactgggggtttcttacaatcttttttctggaaagaaaaggggggtttcaatttgaaaatattggatgaggatatcaaaaggttcaccttaaggaggagtactatacacagatgaaaaagaaaattggtgtggtcaacaattcattattgattttcgtttttcatgtgtatatatattttcgtttggattcaaaaataccaaaactgataataattgcaaagatattggcattacacacatcccaaactgcttttctttgtttgaagcaaaagaagggtaccattgttgtggtccaaaaatattaatgacctttaccataattagttactcaaattcactaaaaaagagaaaacaaatagagatatggttcatcacatgtttttcctctggatgatcatccttattatataaatttatatatttatatatataatatattattccttaacaaaaaaggaagaaagaaaattgaaagaaagtcgataggtttagctaagtatcaagctttgacacacctctaatttccaactgctctaagaactcttaataagtcttaaagcttccaataatgtttttattcctcactatgtatcctatctacctatctctccataaggcagctttagtaataaaaagctatttcaaccactcaacttggactctatttttttcaacattagtaaatattgaacctttctttgctagtcctttgcccttacacggcactgactatccaaaagattagaccaattatggaatatataactttttttggtggaaaccaaattaaaaggatcttttggttgcttaattttacactcctttaattaaatgtgcttaatcgtcattggttaactagtcttttgccttaaaaatcattatgttttcacagttaattaagtaatcattcgtttgagcagaaggtctaaattactactattctttcattgaatcgttttaccgacaaaaatgacacataatgaattctcctcttcataatatatctggacaattaacccatagatgtgagtgtccattcttggacttttatatatatatatataaaaatatatatagatacccttataataataaatatattatattattagatgcttttcacggtttgatatttatttatttactctttgtcatcttattagtgcttatacatgagatctgcatgctttttttatgtttgttttttttttctcttattgacaaattaaatggaaaattattgaaagtcgcccatgtgcacatgtgatttgatctgatcagtatatcattcatgtataagagtcattaaattttattgctaaattatactcttctcatttcctctaatggaggaaagagaaactacactaggctaaaattcaaacgttacaaaaaaaaaaaaaaaaaaaactaatttagagtttaataagctaagggcttcaaattaaggtaattaatctgaggtaatttggatataaagaggaatatatagcatgcacggtcttttcacctttatgtgagtgtgaaatatatttagtggtccaaaacgctgtcgttttcaggacagtatggaatgatacagattttacatatccacgttgctatgtgtacataaaactttatgtttaccattattattttttcttgcacaagcaatgaaaaacaaacattcgacctctaaaactacgctatactacgactaaaaagaatttatttctctttaatttaattttcactttcaattttactcttctttctttaattacccttttcttcttttttccctattataattatttcttgctatttagcttcaaaccctgtaaaagctgcagatccactcgattgactacttcacatggcatattccctttttatcataatacttcataatagctagaaccaaatttgaaatactcaaacaatttctaatatatatatatatatagtaaattaccattttgaaactcaagagaaacagaataataacaattttttaggcgaacattaattattccctgcagtgatacaaatatgtaaatcttggcagaagtacttgtagagacgactttgcattaaatcaaccatgttactcatgcttaagtataaaattttagatatatataatagagagaatatataagcacataataaattaaagatcatggtcttcaaatttgaaactatgtgggtacgactatgtatatcatatcattcatctgggtccagatgcgtaataattatctttgtcgaaggaactaggaaagttcacagcagccattggatgccaaaaaagcaataaatctcctagtactcctagtagctcttatttaataattcatagtattatagcagccacgaaggtctcttaaaaattagatcaaacggttatactttgtccaacacgcgctcccaaaaatatcatctaaattcattgaagcttttaaaaaaaaaaaaaaaaaaaaaaaactggttcctttttctgtttatattgagtttccctttcgtaaataagattcttttactctaagatagacaacgacggctattcaaatataatgtgaagaagtggaattatttaaaagaaaacaaatatagattaaaaatattaagaagataataaacccatgttgtctgtattgtttatattattattatataagagcagttgatgactagttcttggctcactgggggaatccaattaggctacaattggagactaaatattggttaaagccagctagggtgaccccattaattgcattaatcaaaagtaaaggccaatagagttggtcccttctgacagctccacctcaacgactagctctcactataaaaacacgccctcatctttcctttcatatcagaaacaaatcagcttctctctctgcctctcccaacttctctttctctttggatagtatatccaagagaatagtcttca

SEQ ID NO: 16937 - DNA, 1730 bp, Cannabis sativa
actgtagcgtgccttagcattagggcgttacatgaatggtcatggctaagtaacctagggccaagcatggtcaagtgacccttttcattggctttgccaagtgacagcttgaatggtcatggacgagtgacctagggttcttgttcaagttaccttgacccaatccatggtcaagtggccttcaacctagggtttggtcgaatgatctttcaccaaaccctttagccaagtagcctttcatcagaccctggttgagtggccaccctggctagggtttggtcgagtagccccaagatacatgcatcgacttggtcatttctcggccaactcttaaagtcgatttcttcacttcttgagactaattattgactaaccccgagaattagtccaggaaatttttagggttaacataacttatgacaaattttttactgttaaataatgtgcatcataaatatactatttcatattatatattttccagttatatttcttgaattcagattcttaaatttagagtgataactaaaatactaaaatattctgtataattttgtaataaatcaaacttataacttatgattagtttctgacacaacttattataatgtgaatctaaacaaattatagaatttttaattaaactatttaacggtaattaattaaaaaagaattcaaaaaaattataatttgtaaataaaatactgacatattatttattaaaatgtaattaaggctataacattaataattgtatattcagcttaattaaaattgataaaagaaaaatcccttaaagaatgaattagtaattttttagtatctaacaccatcacaaagtaacgtcttgcaaataattaatactttttataataattataaaattaaaatatataaaactcaattataataataacaatattataccttacagttacggtcatgttaggtataataatattatacttcaggaaactatccctcactaagtggctcaagtttctttatgagggtagtcaaactattgctatcattgcggtaagcttgaccacacctttaacaaatgtggaaaatttctccatcactgtgatcatcacccatttcctcccagtttaagctacaaagatgccctccgtgcccctgccaaatccatttataagaaaagtatttttgaactatcgacttccattccttttgaggaacaaccttccctttctaacattggtcaccctagccttcaagaccactcagaccatttaactgtgtctaccatggctgaccccacttcccctgctgtcacttcctctccatccactacttttatccagttcactactgctcctgcatccaacattaccacttccactcagtctccatctttgcactccactattcactgtcctctcccaacccaccccattatgacttccaccacccgtcccacaacttccaaaggtaaggcacccatgtaccctcagccatctctgcctttcctaagcagtcctcctttatcaagcctctgtattaatgacacccctactgtcccttctcctaccaggatgcgttcttttgctaggcagaattgtcaagttcgttcttcggttcacagcatgctgaaaagagctcgagcctctcactctgatttttcagttgttccatccatgtctgacaatgaggaaacggcgggtgttgctcagcaaccccgtcgagaaaaatgagtcttctcagtt

SEQ ID NO: 16938 - DNA, 9448 bp, Cannabis sativa
taaaactaattaaaattaagcaaataaacacattttcactactcttctcacaatacttttagtttaaaagcataaaaataactctataccatagagttatcataatcttatctatgattattgatttttcatgatttggtttttagggtgctcttaacatgaatttatgttgataaattcatgaatgataggcttgaatttttgtgtcatttgagattggcaaaaccaagatttttaggtcaatttgttttgctgagaagtgtttgaactttgagcatgtttttaagcttacgtttgtgcttagttatctaagctttgattatgtgaattaaaagataattgaacttgattgtttatgtgctttaagcatgttgtaatttttttttgaatggtgtttgatatactctgatttagcttgaaaaccaattgcacgacttatgtgaagtttggtttaaatttgtacattgaagtttggcgaaatttgggatttttgggttttcagacccacttgtcgcgaccagacttatggtggtcgcggtgaggccttgcccaaaaataggggataactcctgcctgaatcttgtaactagttaggcacgttacaatattttctgttgctgtgcacgccttttttaatcaaagagtttattgaaaaacgcgaataatttaaacttttaaaataagacaaaactaggttgggctcggtgaataaaatcaagagaaaccctattaaggccttatatatgtaaagtaaacgagtgagcgtagcacatggtgtctatgctatataggcattagatgcagaggcatcattataaatgagatagtgtaatacactagtgcagtggcacgtttaactacgtaggggtgtattgtatgttatatgtatctaatcttctcgtgttctatttattttataattttactgggtcttgactcacaggtgctctattgttcaggaaaaggtaaagcagtgtcgagtcaaccatgagctcgagggttttgaagatgaattgtatatgttcaagccaagctagaccgagagggttgggtccaaagggggattgtatagaaatcctattttgccgcttaggtcgacttgtatgtgaatgacttgtaatattttagaaaatatttttatgcgatctcgaatatgtatttatattattttgattttaagttaaagataaattttattattacaagttattttatttaattaagttattttgctttactcaattggcttattgatcctgattaacggggattagcataatgtaaggcatgtgatgttcctttaatcatgacgtcacaacaatatataataaaattacaattttactctttttggttaaaattatgaaaataccattaacacacaaatagagtcttaaattcaaatattctaaaataatatcacataattgattatattataatataattctacattaatttttaattaaattaattagggttgctaatctatttttaaattttaggatattacaataataataaaggttacaaattaaattgtggttttaattagggcataacccctaattaacaaatacggatttccttcatggagacttagaagaaagaattctaatgcagcaacctaaatggttttaagtgaaaggaaaagaaggtcaagtgtgcttgttgaagaggtctttgtatggcctaaagcagtcctcaccgcagtggtacaaaagatttgatgagtttgtcaacaagaaaggtttcaaaagaagtgcatatgacagttgtgtctatctaagaaattcaaaggtcgtggtgtacctactattgtatgttgatgatatgctaatagctagcaaagaccttagagaaattgcaaaagtaaaaaaactgttagatagagagtttcaaatgaaagatctaagatcttcccagagagtcctagctaggaattgaaatcatgagagatagactaaatatatagaatactgaaattatcttagaaaagctacattttgaagattctaaacaggtttgggtttctctgaggtaagatcagtctgcactcatgtaggacttcaattcaaacttttaaactctcaagctcccaccacccaaattgattagtacatagagaaaataccttataccaatgtggtggagagcattatgtacctaatggtctgtaccagaccacacctatcttatgggattagtattgtgagagaaatgtgttgaacactcaaatgtagttaaaaggataatgaaacatctcaaattaaggtacaaccaaagtgagactcatctatgaagacaacaaagtcaactttgatgttattggttttgtggactcagattatgctggagacttgaattcaagaaaatgacaaagaaattatgtttttcaattaaatgggtgcactatatcaactagaaagctaactgacttgcaatcaatagttgccctctctacgacagaagttgaataaatgacttgtaaagaggttgtcaaagaggtattatggctcaaaggcatcacaagagaaattggcctaaaccattcaaaggtaacaatcttttgtgattgtcaatgcaccctacatctcataagcaccaagtctttcataaaagaactaaacacattgatgtgaagcttcatttcattagagacttcatctcagaaagaaaaattcagttgaagaaagtgtcaacggaatacaatccttctgatatgcttactaggacactactaacttcaaaatttgaacatttgtttgaatctcttaatgtcttttctaattgttttaggatttatattagctttcaaggtagagaactgttagtcctattagtgacagttaatatagttaaataagtgtttagtttggctgtgtgttagttaagtggctattgtctataaatagtcaatctcattcattttcttgtaataactcatttcagaggaattagggaagctaattaagattgaatgtgtgtttggttgatcgagtcaagtggcagacatacattaacatttctttccttagatcttccttaattctttctaaattttctcaatctttattaattacttgatttaccataagtttacacaatatattatatatatatacaagtctatacgtaaataagctatagctaggctatatagtatatatatatagccaactccctttgactttgaattatataattatatatattctcctgaaaattcttgaagcaataagaatacgaaaacccacctccgcctgcattgtcatttgtcaaacacatataatatatacatatatatatatatatataaagaattgaagacgactgagaaaaatttttccctttcaaacacattaacataatctaataataaactcttaattttggttgacccaacataataataaacagctagatatcgatccagaataacattattatttcccactatagatcctatatacatatagttagggtttttatgaagctgtcgtagtttatattattaggtttttaaatatatattttactatatataaacgacatcatcttaaatcgtacatattgtttgatttgttctaatttgtcacacgttttctcagttatatattatatcacgattcatgatcaagtgctataatacctgatctgaatgaaagaactcatatgtataacatcatcatcatgatcatcataatatatatatatatatagattaataaatagtattgtatgtgggaattaaatccattaagtagttattatatatagtatagtttagttaagccgacaaatataccaaagcgcaaatacccacttgctagttgccgcgtcacctttccaagcgtgactattaatataattaacttaccatatcttattattattatttaaaattaaaatgactgatccttaataatcaatatcaacttgctaggtcgaccactactactattatcctcacttttacttctgcatatagacattttaattatgaggtcatgcatataattagatgtttttaataataattattaaactaaaataagtaaaatttgatatatatatatatatatatatttaattatactaacagtttagagacaaaaatcactgatgccctatatcagtacagaacaagaaatcaacattactataaaaatagcctagaggcgattatttcgtcattctaaatcgattttgaagaaattcggaacctggcgttgcaggggtttagaaacactcaaaccacataaatgcaaaaatttggtcaagcacttcaacaactatattttttttttgagagaacaattatatttttaattatcattcatgtatattaaagttaaaacataattagtaagtagtcaagagcgataatattggaaataagagtttggctatcattttaaaagatttgcaacttttttttcttcacgtcatctatatatgttgtaactttattttgcatgtacaaaaatattatttgtcacaatactatttaatctaacactatactataaataatataataataataaatattaatttattggttatatataaattaaaataataataaaactcaaatataccattaaagtattttataattctacaattaaaactattaaaaaaaatagtaaaataaaagtatacattaacataaattaaaattaaaggaattatacctcatatactatttctgtaactttttctttttaaatttatcgtttaagttgctcttgtagtttctatgtagattgctatactgattttaattacgatttaaattgctccgttaattgctacaagaatttctgtgtggaatttcgtaataatacaaaaaaaaaaaaaaaaaattaactattttcaaatataaaaatgaaaaaactccttaaaattcacaaaattaactactataacaatagtatagatggtcatataaagatagttgaattatatttctttcttcaaatacagaaaactacgaaagtgacacacttgctcggaagggagatgtgaattaatttaagtgtttgttaggcttagagggcgctgacatgtccaccactattaaaacactttttattactattgatttgcaaaccttaatggatacatacatacacacatacatatgcaaatgatatgtatctatctatgaatgtttagttttatgtaaacattaatgtaataatataagcacgtgtccgccacccatttgccactttcaaagtcagacatcacaggcgccaaacgtacttccatccctcttcaaccccagttaggcaccaaattataacttttatattttattttatatctatctatatatatatttctctagctgcgtggtactattggacatgatcaccttaaccttcttgtttatacatgtcatagatatattagttatggtgatgatgatgatgatgttcaattctgttttgttctgtttcttattcttttgttgttgttcttcatcatcattagctgttgtttcaagccattataacaatggtggtggtggatcaatagatggagatagagttgcattgttgtcattcatgtcacaaatagtttcagaccctcaacatgtttttgaggattggaactctttaaagaataataataataataatgtctgcaactggtttggaattcgttgcaatagcgaaaaaaccagagttgttgagcttgatttaagtgggaaatcactcaagggaaccatttcttcttctctttccaatctttcttctttgaacattcttgacttgtcaagaaactcattccatggccatattcctagagaattaggctcccttttggagcttggtcagttgagtttatcgtctaattttcttgaaggggacattccttttgagttgggatatcttaataagttagtttatcttgatttaggaacaaaccaccttaaagggcagattccattttctcttttttgcaaccagtcttctaattctctgcaatatgtagacctttctaacaattctctaagtggtgagattcctcttaagaatgaatgtcagctcaaagagttgaggtttcttttgctttggtctaaccaactagagggtcagattccaccagctctttcaaactcatcgaaactcgaatggctcgatttggaatcaaataaactcaatggggagttgccttctgagattgtccagaaaatgcctcagttacagttcctttacttgtcatataatgattttgtcagccatgatggtaacaccaacttggaaccttttttcacttctttacttaactcttctaacttccaagaactcgaactggcgggaaataatcttggtggggttataccatctagtattggtgatctttctagtaccaatcttgtacagatgcatttagatgagaatctaatatatggtaatattcctcctcaaatttcaaaacttgtcaacctcacactcttgaacttgtctagtaatctcttgaatgggacaatcccatctgaattatgcaagatgggaaagttagagagagtttatttgtcaaataattcactctctggagagattccatcagctcttggtaacactcctcatttgggtcttcttgatttgtcaagaaacaaactttcgggttcgattcctgatagttttgctaatctttcccagttgagaagactattgctttatgataatcaactctcaggtaccataccaccaagtctaggaaaatgcataaacttggagattcttgacctttctcgtaatcatattacaggtgtcattcctgatgaagtttcaggtttgagaagcttgaagttgtacttgaatctttctagtaatcacttacatgggcctttaccaatggagctgagtaaaatggatatggttcttgccattgatttatcttcaaacaatctctctggtacaattccaccacagcttgggagttgcattgctttagagtctcttaacctttcaggcaatgccttaggaggttctataccgatttcgattggacagttgccttatcttaaacaatttgatgtgtcatcaaaccacttggctggtcaaataccacaatcttttcaggcatcatcaacacttaagcaactcaacttttctttcaacaatttctctggaaatgtatcaaacaagggggccttctcttctctaaccatggaatctttcttgggaaataaaggtctttgtggctcaataaaaggcatgagaaactgcagaagaaaacacaatgatcatcatcgccttctcttcttgtcaactctcttgccactatcagctgttcccattttctgtatgctttgttactcactaataaccaggtcaagaattcgaagtcaactttcgattttcaacaaaggggatatagaggaaggtgaagaggacaaaaaagaacttaagtacccaagaatctcataccaacagctcattaatgccactggtggattcagtccttcaagcctaattggttcaggccttttcgggcatgtctacaagggtgttcttcaagataacacaagaattgctgtgaaggttttggatactaaggcagctgggattatttcaggaagctttaaaagagagtgtcaaatactaaggaagactaggcacagaaatctaataaggatcatcacaatctgtagtagaccagactttaaggcacttgttcttcctttgatgtcaaatgggagcctggaaaggcatctatatccaaaccatggattcaggaatggtttgaatcttattcagctggtgagcatatgcagtgatgtagctgaggcagtgtcctatctgcatcatcattctcctgttcgagttgtccactgcgatctcaaaccgagtaatattctccttgatgaagacatgacagctttggtgactgattttgggatttcaaggttggtgaaaggtggtgatgagaccagtaacattgctataaacgattcgatatcattcagctcagcagatggcttgttgtgcgggtctgttggatacatagctcctggtttgtactccttctgttacttcattttttccttatttactagaatcaaaatattatgtcctttgtactttttggtcttgatatttcaaacactcattaaccaattcaatttcactatttcctggtggattttgcaaattattagtgtgtgattatgactaagttccaaaatattaattcaccttatctaaacttcagcattattttatggtcaaaagagcatgtcttctttacaatgcttcaatcctaatagttttattgcattgattttgacaaactgcagaatatggattgggaaaacgcgcttcaactcaaggcgatgtgtacagtttcggggtcctcctgctggaaattgtcacaggaaaacgccccactgacagtttttcggttgaaggttcaagcttgcatgaatgggtgaaatctcattaccctgataggcttcagccaatggttcaacaagcactagagaagtatgctccaactgcattagtcccaactcattacacaagaatttgggccaatgcagtgttggagttgattgaattaggactcatgtgcacacaatacactccttcaacaaggccaaccatgcaagatgtggctcatgaaatgagtaggttgaaagaatatctctccaacccttctgcagttttgattgaagaagaagttgatccaaaaatctaatgaattcaattctttgtatgttagtaaaatcaattctaatgactctaatagcttgggattttttgtaaaaatatttttttttgtttttgtttttgtatttgtatttaccctcaatctgcaatgtttaaagggtagatttaaaaggcttaattttataaatgcctttttcataacattttgtaaaaagggtactcaataaaagaagactttctttctttgtttccatttattaacaatgataaaaatgtgattaacatgttaatgatattcatatcatctattgcttttgcttgccttaagtgggaaccaatcaaatacactttttgattattattattataataagaagtcttccaatagtgatctaattagtgatcaagaccaaaatttaattaatgaaatactatgaagaagattacaaccaatctttccatatcttggcagcctcaattttgtatataatatttagtattattattgtgtttgtggaagtaacacagattgattttccatgatccaaatgggcactcaaaatatctcttttggcctaccttgcaatacataagaatatgccttaataaatatgaagatagtggaaggttttagtatgaaatgaatacaatcatagccatccacttgaaattttttaactctcacaataggcattagaaagttttgtagcaccattatctcttattttaggtcaaattgtccctagcaatggcaa

SEQ ID NO: 16939 - DNA, 2294 bp, Cannabis sativa
aagcttaaactcacttcaatatagtttagtttttgtgccaattatgaatccttgaaagtgttaattcttgtatgaagatgctaaaaacaactaaaatcaatgtaaagttgtgtttgaaagttagaatttagtgaaagtgggtaaagatcagaaaaataaaattaaataattttttattggatctccaaaatatatatatatttgtaccctttttccctttttattagactgtaaaaagatgaaaaaaaaagtaaaattacaattttttctctattttcttctatggatctaaaaaaaaatcttcctttttttttttcttttttggtgaaatccaacatcaaaacacacccaaaagaaattacaaaacaaaaacaaacaaatatttctagtgctttgagaaacaaaaataaaggaatgagaagcataattctatttctagtgctttggggtccaatttagtcccctaaaagttggtctaaaaattatgcacacaatcaaataaatacacaaacaaatccttacaaagatttaatcctagtaaatcaaatatcattaacaatttttgtgttcttccattggttcaattggtcaaataattgactcttttgaaaaatttcaaacacaattctatcctatgaaacttttgtctttgttttttattccaagaatttagttattacaaatataagagagagaggccaagcttgaaataagggaaagtaccaattttccaacatataatttttaactaaaaatagaaacaaattggcctaattttccattgttcacattcattcaaacaaattaccattcatcacaaagaatcatccatttccattaaacatttttctttttattatttctctctgcatgaaaaatctcataaacttatttttttttcacgtaaaaaagaaaataataataaaaaaaaatgttcactactttttctatgtaaaaatgagtgttctatagaagaaaaaaaaggctaagcataaaaaaaacacacaaaattcaaacatcaaacatggcgagtacaccatcaagcccgccaaagaagtcgtcgttggggcgtccgccggtgaaatttgctcgtcgaacgtcgagcggccgcatggcgagcctatctcgggacgacgatttagaaagcatatcaagcgaattctccacccaaaatgactacataaattacacggtgatgatgccgccgacgccagacaaccagccagtgaccgaggagaattccggcggtggcagtgacggaggaggaacgaaaatggacaggagaatatcggtgatgaaatcgaataataataataataataataataacaagtcaatgttggtgagaacacaaactggggattttgatcacaaccgttggttgtttgagactaaagggaagtatgggattggaaatgcttattggtctgaagaagaagagacttatgaatcagatgttagtatgtctgatttcatggataagccatggaagcctctcactaggaaggtcaaggttcctggtggtgttcttagcccttacaggtttatacattatataattatatattattatcattataacaatatttattctctttaattactcattcataaccgaaacaatacttataattggtttgcgctaaataaatcaaaatgtgtaagacctgatattgaaatatgaataatatatgtaatattttttaacataaggtacttctaatttatcttgttaaagagttacgagtactagtggtagaggtgtatgttttattggatttcggatttttgagttcgggtgtatagaataagtaatctgaacccacccgtttgtgtgagtttttgggttttgggtgtaggtggatcaggttcaggttgaaccgggtccgggtgggttttgaccggtttaggctgaccttttttttctttcttttttttgaaaaatatcatttttatacatttttcataaaaaaaatactaaaaaaatgaaaagaaaaaaaaaataaaacaagaaaagaattatatttttttttgttttaagtttatgttttcatgtaaaaaaaaaaaattgtatatattcgggtttcgagtaagtttgggtgtaactcgatttttttagattttgaattaatgaaacccaaacctggcgggtgatgagcaaatcatatgccacttcatttgtaagatgtcatcttatttatgtttggtgtttgcttttatgctcaaaactgagattaaaatatgaaattaatcaacaatgagtatggttaagcataataatataatattaaaaa

SEQ ID NO: 16940 - DNA, 10079 bp, Cannabis sativa
ttattattattattattctcttttaattcactagcttgcatacattttacatgatattttacacaattatattagaaatcattagtgatcaattcttgtttgtgctatttaagtatatattggtgaatctttaattttcattttcatactaaaattagagaaagtgtaatcaaaaactaataaaacatataaaatccaatctatttatatatcaagtataaatatgtgaaataattaattatatatttatattttttttttttgtatatatcaataattatcaaatatttatactatttatagttttttttaaataatatagtaataattttttagaagcaaaacatttataacaataataattgtaagatttaaataaaatatattattgaatactttagtatttctcctaagatttttattattattttttttcattattttaagcatagaaatttatattgacagatatttttctcccatttaacttttttttttaatatctgacacatgcatgtttttttttctttatgtattcactttattttaagtgatcatttcatataaatggtgaaaaactttcaatacaaaaggatggcgcaaatctagctacaaatatgtatatatggattccactaggccactaaagagtttgattacattatcttcaatcccaacagaaataaatagctataagttctttccttcctggttttaataaaaatagataataattgttgaatttgatgatctcaattaatgacatgccagaaggattgcctccttgcgtgagacaagctttaatgtctcaaaaaataaatattcaattaattcagtgtttttattttattaattaataataataataacactaatgatttcttttgtgtaataataccccttcaggcctttaatacaatctttcttattcttattgtattgtataagctaggtcataatacatcaccttgttaaaaaggttgaaataaagtttcagtagttttcaaagtcaatattattagatttactctgggcattttgttgttctaatcactttaaccctcaaccaattacaagaggcttgctcaattgacaatataatatataattatgatgttactattatctttaattaattcggttcttggctgttatcaaacaattctattgtccaataatattcatgcttatcctttaacttaactacttcttataggaaagccaatgaggtttcatttgatgtttttcagacaaataaacaatggttttcaagaaataattttattgtatcccaccataatcccaattatggatctcaatcaaggaaggtttgattttaatttatttaattaattatgatactacataagacaaaaaggctcgattacttgtgtcatgcttttgctccctaacatgggtttttcgaataaaataatatgcagaccatgttctccatctatattcatttcccccactctgctctaaatatttaatataattttaaaattttctttgctcattaataataataaataaatgattgaatttgacaaaccgtccacttaatcatcttaattccatttctttctaaattgttaggttattgaccctctaaaaaaccaaacagacggtggtcatgctaccaagaagcataaatctcaacttatatgattccaattttctattatagttctatgagatggcattgttggtgtgttgttaatatcatgtgcacatgctcatttttctttctaagttgtactaatttatttaccatggtaaataagtaattgactgttattatgattttacatattcttactataaatacatatatgtgttcatgactcatgttcaattattgagtctcacacatatcaaagtgtagaatagaatcacaataagttgattcactttgaccatatgttagtgttaccttactttctcatccatttgtgtacttggtcacttttcaaaaattaacctttcttctttttctttttttgtcaaagtttgaagcaataagctctcaacacgacaagagagctagctgagactcattatggataaggaacaagtcaaagaacaaagccaagttgcataccacaaatccatatcattaaattattgtaaagaccatgtttaggatagaagatagacatgggatttggtgaaacaaacgcgctttacaaagccctaatctaagtataatacaatatactacaataatcaatgtgtttaaagcttacaatatttcttaaaataaatgcccacctttcattctcacatgattttgttaacagctttctcaaaagatttgagtcccatacaatggcttaggatgcaaagagtgggtggtactctgttgtctgttttattaatagaaacaattatattacatatataaaattgatcaaacacaataatggactatggatgtaatcatttaatcgagtagaaacaaaaggtgcacgagtgcgtgccttggtaagcaatctatctcatgattatgttaacaacaataatgataatgattattaatgttaacttaaaacagcaattataaacatacatacattatacatacatacatttatatatatatatatacttacacattaatggaaaaagaaaaactgattggcaccttgtattcttgtaaaggcctgttactccaaagagcaggtcttacctggtaatttataaagttgaaataaatattgatggttttaaaataaactaggtttgatactgacataataactgataaaaatatgtaggggtatttgcggcaaaaattttttaacatttgtaattattttacatatgactataataaaaaaaaagtagcggcaaaagtaatttattttacaattttgttataatcgcattattttttgattgttaaatattaagtaaatccgttaagtgccaattcggaaacacgtgacgacatatatctttaatttatttaatacgtaatctaaaaatatatcgccacgtatttctaaattgacacttgatagccaaaaaataatacaactgcaacaaaactgtaaagtaagatatttttgccgccattttttattagtcatatgtgtgacaattgtaaatgtaaagaggatttcaccgcaaatatctcaaaaatgtaatatacttttgcccacacatagattcgaaatttttgttcctgataatagtgtttgacctaccaaatagtggattaactatctcttgtttttcctaaacaaataccattaaactctttttcttgttgtacaagtaactaatatgaattcattgagtttgtttaaagctttcacatgataaagtggcatgaataaactaattatagcttcccatgttattcccaagaataggtaattgatcaaatatttgttttaataataagcgttgcgttgtcaaaataattatatggataatccttgtactatctagatcatattgtctcttaattctgtctttaactttttaaaagatgtcattctctacttatttaggaaagaaagaagggtagaacaaaaaaatataaaaataaaagctgtttaaaatccaagcaatgttttcagcgacaagtcgtttgtatagcaacacaaaaactaatgaataatgatataatttacagcctaaaatggggtcatgtaacattcaaataaaaaaattactcatttcatcgttttttttcccctggtaagtgttaaaatgtactattatctcctataaaaagcagataattatactaattaattaatttttagcttaaatatatgctctgacatcttattcaaatatgaggttgagaaatgggaaaaatatgaacaaatgataatattttcccgtgattgataaaaaactgaaattgttgtatgaatgactactagtactacaacaattgcttacgtcagatgcaattcaggatagtaaactatgtaagaaattttaagatcaaagtggcatgactgagtactatttggaagccaatataaaaataaatccaaagaaaagcaagaattttctgcgatccaaatgtcgtttcttaagaacttctcaataaaaagagtttaaatgacagcaaattctaaacaatgttcaagtaatagagtaagctcaacttcaaaaatatttgagcgacgtctagttttcattataatgcagtaaatgtttgcatgaaaaacaagtatattttacgaaggcatgcttttgagtttgacaaacaatatgaaacttactattcagtatttctaataatttccctctgttttttgtattatatgtgtattgtgtgtgcgtgtgtacttttctgtaaattaagtaattttaattaagcattttcaagaccagaaatccaacaagtgatagatagaggccttaccatttacacaaggatcaatcttaaggggcaactgcaggtaactgtaagctgcttgctgaagtttttggcttaacaagaaatggaagtatgatttcagctgtgctagactccccaactttctcaaggaagggtacttcaaacgacagcgattggtataaacagacctcatcttctttgcaatagtaaacctgaaaaaaaaccaaaggaaaactgctgagttggtattggaaaattgagcctattggacagtatctgatatcagaaaataatcacttcagcattttttttaaacaaaataaaaatagatatgtatatatattgaatatttttgttatatggatcttggagtgagctatatcccacttcagcagcatctgaaaactcaatgtttaacttctttcagtcgttttatatctttagaagagaaacatttccagtaagacctctgagattgtgcattagaaaaacaaaatatgggggtcacaatgtcacatttagtataatgatgttatcaaaggctcacaaaactcatgttataagtaaaaagtgaacattgtatggggtttcattagaatacgtaataactaaaaattcctccaggtcatgaatgatataaaataaatgtatttgcttcgaatgttttatgttagtgtatgttaataaaatgtttgtttagttttaaaccaattataagacatgatgaattgggaagaaaaacaataagaataacgagagaaagtggattagaattgaaaatgtggtgagaataagacaatataatgaattcatcttttggtttatcttgctccgtaagaacaattgaaaactaagagcatgtttagtacaccatataaatttagtaggtcatttatgatattagttcaaaggctgtatattaagtatacaggtcaacctaaacatggttaataaattaagaagaatatgcggtgtgccaaacgtgcccataatgtccaactgttggcatggtggtaactggtaagaaggagaatttgtgcaagtttatagttgacatttaccatagaagtgtgttaccttgcaatttatttttcccatcgaagctgatgatgaagatctcttaaaatgaattgttgcagatccttctggactaaggtatccatccaaaggatcaatagtcaacgcattttcaggctcaacatcaacactaaatttactgcgagcctcctgcgtaagaaaaaatgggttgatacagacaggaatattaaattataaacgtgaaaatctttaggaaaatagttataaacaaacagtactaataacttcatggcttttgtcttgagggtctaaagaagtaacctttgaaaagtgatattcttcaggcaatgatattttaatgagtaagtttccttcgctggatgaactaccatcaactttaataatttgtgcatctgatggtgctcgtctcctaagccgctttggcaatttagattttttattaggaggctgaacacctttcagctctaaagttagaagttcaggtacttccttgtttaagtccagataccttattatgctgttatttgtatcagcaataagcagtcttcctgtaagaagaagagaagaatgtataactatatattggaaaaaatctgatccaaaaattaaaaagaggtcaaaattagaaagagttgtccagcaagctttcggtggagatcatgcttccctttcttggatgacaatatgtttcatgaaatcaactaggtacgtttaaatacaaattcgattgtctaagtctacatggttgaatgagacaaggaatatgaaatttttgagtcaatgaagagcgttgataacttgtaggggtttgtaagaaattaagtctgtttcgaaaagaaaaaaaaaggttttccttaagcacgatgatatatataattttgcaaaaaagtagaagctaatttgtgatgctgcatattagacagcacgtcaactaaaatagaactgcaccattttctacttcaatgattcctgacggctctgaaagctgcaagaacaccagaaaagcattaaaaaaacataattagctaccaataatcaaagttatacaatcactcagcttagaaaatagtacatttagtgttgtcttgtttcattaaacttctccaaaattttagtaatttgttcaataaagatagaaaacgttatccaacctgagcttctagggctgttccatccttgaaaccagctttccctgtacctgctatggtagtaactcttttactggcaagatctagcttcttgatctggtatttagagggagcaaatcaattaaaaagttccaaggggcaaatgatgataataaatgtcataataaactctttaaaaagtaagttcctcagacattgaagtaattgcaaggtatccaaaggactggtatcaaactatcaatgagttaaagatacaaaaagttattccaataaatgaaactaaaagcattccagatattcttttcaagtttcaacaccaggactatatgaatctcatttacttgaaataggtgtacagatcaagaactaagattacacaatgtataataatgcttaagagggattgatggccaaatgccaaaggccacattagaagctgttattgacctgccagccaaatacactttaacgaaatgctaaatccttgttctaatgttaagatgtagcattgatgacgaagtttcttgtaaatttgtaaagcttatgctatattttgtaccacacttggcatagcaaatttataaatatgataaaactgtttacttacaaaactacaactttgtatctttaagtattggtgattggtaatttggttatacttaaattggttattaacaaataaaaatattttattgcagaaatgatcttcaaatgtaagagtatttctatggcatctttagtcatgaacaatcaccttgtggttgtagctatctgctatataaatttgaccatcttttgcgcaaatgacacccaatggatgttgaaggagtacttcagcccctactccatcatggtctccaaactgcaaagggtttcaacaacaatagagaaaagaaaacaattcatcagaaagaatattccttccaaagaggatgtggtttccaaggttgaacgaaaagtaccttaaacaaattgtctgagaaaaagggatcaccaccagctaacaattttgatcctccagtcttcagatcaagtgctcgaattgagctactctcactatcagcaatatatgcctctgaaaagtctacaaattatcacagaattcagaatgatagattgagcatatacatagaacaaaaattatgatataaaacttcaagatgtctttgaatgttgcacatcatatttaccattagataacgaaattccagaaggctgtgcaaatgatgtggtggttgagctggctcgatggaaaaacaaaagagacagcatcaaagtttttccgagtatcacattaaagagaaatgaaagggaaaaaaaatgttacattaaattaagcacactgcgctataaatgctgataatggtttacccactgatgtttagaaagcaacgtggagaaattttcaacactgaggttgcatttggttggaggtaatgaaatgaaatagaaaagaatcaagtttcattccattcttttatttggttgcattttaaaatattggaatgtcattccaatggaatgatttttccaccattttggtggaataactattccattttaaaatggaagaaaagttcattccaatgcaatatgagaaaaatttaataattttttttatcaatttttgtatgcattttaaattttattcaattccattcctattcctatttgcattcttattcctatgttttcattgcttccaaccaaacgcaacctaaatttatcttattaatgtcaagttgggtctcagtgaacctatgtgctttataataagatttagttgcatcacataaatttaagcagatatacagatggagaaacaaatttccaaaatcttcccaaacaatttactagcacaggtccatttcctttgaggatatagatcaaaaggactcgcatataatcttatgtagttcaatgttattcgataaattgtgcaagtttttcactgcattcagtactgctgttcagaaaactgtcattacccaccctatcaaagatctactcatacctggggccatttaagtttctttcgtaaccatcaccactgaatgttttggtactcccgtccaatgtattgtgcacccagatctgatgttggccagccatagcaatgtaaactttctcattgacgggctcaaagcaaacgtcccacggagagttcaggagctgagaaaaatatgtcattattagaatattgtaggaacaagtcctcattaatcttttaaaaagaaatatacgacagatataccaaaaaaaaaaaagaaatataataagcaaataataatacagaatatctgattggttgatcattgtagctgagaatttcaaacaaattaaattgataatctcagttttacctgtgtacttccatttcctcctcctttatagtcagaaccctttgttccattaccagctagagtacgcactgtctcattaacaaaatcaatctccctacattaacaggctctaaataattacaagtcattacagaagataataaccagacaacaataatttaaggtactccaaaactgtagtgaggataacattaccttaaagcatgattttcagtatctgctacataaagtaaatttttctttggattgtacgcaaggccctagaaatcacataactccagggttagcgtatttatgtctaatttgaaacatgaaactcaaatattaatgatcaaaaataacaaagtacttgtgtattcatgcaagcattcatgagcaaaaatgatactcacaaccaagttctcattattgttttcagttcaagatgtaagcaaaaatgtatatatctttctagcctaacttcgatatgcatggactgggtaaatgctgtttttggtgtaattaaatttctattagaaaaaaaaaaactttgatatgcatgggctagctatgctggaagttcatttttcagtctaagggccatgattatacttgaagctcctcacctgcggccgattgaagacagcatcatcaaaggtaccatcacgtaaaccttcctcccctgtgcttccaatttggacaataaaatttcccctgaggtcagtcacaacctgaaattcaaagaccccaagaagaataattcagtatcttgataggaggaaccaaatttatatatatatgtacacacacacataaaacagagagagtgagaaagagtactatgcggttgtggttactatcagagatgaagagcctattgttgaggacatctattgccagcttccccggaaacttcaatggagatgtaagcaaacgaggatcgttatctttttctaaactcaatggtaaaggagtgctgtttaagattttctttccatcgtagtactgaagagctgcctccacgatatcgtcaagatccttcaagaagtttcttgtttattgtacaatatggtttttaaagacaattcatgcattgataatcagatacaattaaaaaatctgtacctttcgacgaccttcacctgatagttgtgcaatgag

SEQ ID NO: 16941 - DNA, 2243 bp, Cannabis sativa
gaggtgctggtattaattcctacaattggggttaaatattagtacattatatcacttattagcaatgtttgtttatcttttctccaaactacttggaagttgtcctgtcaaattaacgaactctccatacaatattcttcactatttttcgctatatagaatatgttttgcatatatatcttttattttatttctgactgtgaagtcttttctaattagatgaaaaaggaaaatgaaatatatagggtacaaactatatatatatatatagtgatgatctgtgtagttatttctttattcatattactcatcactctgatcatctattatatttatataccattctagctagttgggaaagacagctaaatagcaaccaactttattaaaatattaatagccattttgttttaactttattaaaatatagcaagagagtagtggaagattataaataagggtagataattatttatttatttaccagaaaattaagtatgatttggagttagtttcttaaaaaaaaaagactataaactgctttatattctgatttctacataagacaccaatatatatatccaagctagattgattccttttttattgaatttcttaaacaacaaaagtatctatatatgtaattaaccatgctcttatatatagatagaaattacacatatattgaagcttattaatggcctaatttaataatgaaaaaagaaaaatgatgtctaataaaaaattaaataagaagaacatataactagtgagaatgaattggtactttcattttctgatcaagagatgaattttctctttgtacagtcatagatatagacgaggagcacacaataaccaagtaatattacataaaataaagaaaacagaaaacaatataatgctcaaaagacatattatagtaaagaggaaaaaaaataaaaaagaggagagagagaacaatagagagaaattcagaaccttatctcatcatgaaaaacagaaaggaacacccccaatacgaaaaacttattctagctttgacaatctcctctccatttttccaagccatccaaagtgaagaccaagaataacaaacaaaaaaaaaaaggagataatgttttgtggttgaaataattaatacatcaaaaagccaagcattagacttgcctagaggttttcatatccctcaaaagctcacctctttagtcatacacatacacatacacatatacatacatatatatagtgtgtatatatatttcttaatgtaatgacaaattaggccatggatgaaagctacgcactgtatatctttctgggggtggagaggcttcaaagaagaaagaatcatcatcatcaccatcataataataacatgttgatactcttctcaactttgaaagtgacatagatagtgataataaattcctcggaccccaaatattattcaacaaaagaaaaagagagagaaagaaagagaaagaaagaagaagaagaagaaggagaggtagagaaagtctttggagtcgttgggtatatttataataataataattatatatataattgacaagcatttgttgaatatttttctttttcttcttttattttttacatttatttatttattagggctacaagagacggatcaaacaaaggtgtcgggcaaaaaataattagccaacgtacaaacgtgtccaatgtccattaactgggcctacactttcatcttcatataaatatatgtatattatatattatatttatatatatatatcaatattagtaaagtgaaaattccaataggcagagaactgcttatataaacagttaaagaaatcatgtttcttctaatggatgtatatatatagtacaataatattataatattattatcaacaaaggttgtttggtgttcatgatcaatcaaactatatatatgggttggaaatcgcaaggtggtacccggtggccttacgcatactatatatgaatgtatatatcattatttattagtttagttccatttttatttcttataataacctatattaaaaacatgttcattgtacattcttgccgtggttatactttaatttgtaaagcatgaccagcaataaagtttacatacaatttgatcttatttaatcatttagtactttataaaaaaaaacactactacaatcttggcctttagaggctgttttttcactcccacttataaaaagggaagctaaagg

SEQ ID NO: 16942 - DNA, 1628 bp, Cannabis sativa
ggatctgttgtcattctccttgtttgtatttctggtacaatttctttaactaccactacaaattttttaattgaaatatctacttattattatgttcctcattatcataatcaatctttacaaatttcacctttagttaggtaactttaggcttaggccctttggtacatgtttagtctctctttaatctttctagtcttttgatcaatatcataaccattcgtgtctttttcattattaggattatgattattattattattttaaaatttttatgctcaactttggtcaccatctattatttggagattcttattgtttgatttggttaatgagaagtacaaaaatgtcaattttattggaggctatactaaggaatttagctatagtagtccatgatttctaaacatacattttaatgaaagatagagggataaccacatattttaatgaaagatagagatgataaaacgattattaagactcaattaaagtagtaaatgcataacttttggatttccatgctttataattgagtttgagacattaaaattacaagaaaagcaatgtttttgtctaacaccaactgatgtatcattccatgttgcagtgattgaaatcactatcaagaataagatcaagtaaacataacaacaataacatacatacaaaattaaccaaacaatttgtaaactaaactgtgatgagagcagaataaaacaaatgtaaaaccatattgaattgattaaaaatgagaaataacattgaacaatgaaaatacttttatttgaaatcagtacaagtgcgaatattagattgaattagattggatcgtgcggattgaattggatcggctattttatgaacacccttacacaaaattgggttttttggttttgtcttcaaaaccttgtggctgcttcataaggatgtgaaagattgatattcacccctgaatcggtttgcaatcttttaatctttcaccattgaacttgtcctcctcaaattgtgcttgtgtttcttaatctcaaagaatttcttaatctcaaagaacatgggttcttgatttcttttattctcctcagctctaataccacttgttctttggtacctttccaaaagacttcattgtatgcccatccttatatacccataatcattcccatttctagtcaatgtaggactttgattggacacccaacaattttcccctcaaacatgaccatatagcctccgctcaacgatcttccatcttgcactaccgctatcatcaaacagaacacgctgcttgatcttcattgtgaagaagactttcgacacaaggtaccattcatatcttcaatcgtgaggttacacaaaagttcatcaccttaagaagattcaaagaattcattcacacggttaatgttgtgatctgattctaataccacttgttaaggacgccagacaccatccatctctactctaggtatgatattgttcgttttgggcttaagtcctcacgattttatttttgggcaccttcccaaaaggctctatacctatagagatatgcccatcgttaatactcatgatccttcctatttctagtcaatgtgagactttaataattttgcacacccaacaat

SEQ ID NO: 16943 - DNA, 9133 bp, Cannabis sativa
agagagagagagagagataaatatgagattttttttttggtttgaggagagggtatttttgggttaaaaaaaagtatagttaaaaaattattaggggggtggcataactaaacaccatggctaatattttagcatggtttgtcaaatttccctaccaaagtttggacacaacacgaacacgacctatgaacacgaattgctacccctagactcactgttactgtctaacaacattatatatagggaatgaattttgtcccactacgaaatggtcccgtaattatcgtagtcattataactattggatcaaaattgagttaatccaagagcactcacatcaaatgctttaaaatagagaatattaaaagttcatattagttacatcaaatgctttgtaactaatatatttttttacatcaaatgctttaaaagttgagggacatatttatgttatgttaatcttacataacacattaatattttttatctgtttaatttaaaaataaacagatagtttcaaatttgtcaattttataacttgtataacccatcattgtttgattaaaagattaatacacttgctacaacaaatttataatttatttattaatatgtacttattcgtgttaaacgtgtcaatctcaaatttaattgattaacttgtgtttaacttgaaatttaatcgtttctaatcgtgtttagcctattttaacctgatcttgtttatgctaaaaccaaacttactaatttcgtatctttttcttataatgtaatcatgatctatatttcgacagttgaaactgttgtttctaaggtttgtacttgattgtttcttttattctggaaaagaatgttaacagataactgatcattgatgattatccaggtagataacatatttttagtaaataatattggatccaggatcaataattttgctcactatccaggttttctgtatataaattgtacatgatagaagtttgagcaatcaaaaacttttgtattcaaacttgaacttgatgtagagatcagttctttacaaaataattagacttttttttctaacaaaagaaatgatgaccaaaattgccaccgtattgaggcttgaggcaaaagaattgcctgcttactattaactatacatataaatatatagatacataatgctaacagagcagttgatcatctgataatggttgatcaccctcttatttctcataattaaatttgacctttcaaataaggccagtatatgaataaactctgggaagtttttcatcatcctcctcagttctcgtcatctttgaatatatattcttgcaatggcttacgcagaacaaaatgcttctactgttaaacgcttgagcacgcccggacaaggatcagtgccaaagtttctactggaaatagcaacagcgcaatctccacgacctttgcatgcctgttaaacccaacaacaaagacataatgttactacaataatttctatgaagatgataaggcgcgaatttaagtttgtagctactgaaactatcatagttagttgggaaagaaaattgccttttcgataatgtaaagggagtttggtgaatggcattttccttgctggaaattgccacaacttccaaaaggggttccaaaacttgcaaaattaatgcttgatattgtcttccctggttcacacttgagatgaatcttagctgcatgatccatgcttgatccaccttcactttcaattctgtagttttcaatggtaggatggttttcaaatgcatcagcgcagatacttgtcagcgatctttttactaaagatattttggacgcgtccccacctagctcctcaaaaacaaccattagatttcctctaggctttagccaggatcttggaacatgatacctaagaaaaatccatcaatattaatttgggacagcttctacataagtattttatacaagcaagtaaaaaagctagtatcagaatccaacaatgtagaaaacagtaccatctttgggttggtccaccacaatcagttaaacactttgaggaccggtatgtcccagcataattacaagagctgcagccatctttcgcgtaagccatccagtatcttccgatactttgaccattgatccatacttgaccctttcccatgctctgcatgtctaagcccaaaggctcatttcctccaggtgcatcaaaataagcctgcagttgcaccaaacatttcaaattgttgaaaaagttctccattagtaaactatgttggggctttatagataggtaaaaatgttatgttattctatgcagctatgctttctgtggctcttcttagttccttaccttgtgccatctcaaggcctgctggcttccggttgctagtgatgctcggacccagtcaactgatttggatccagctggagagaccaagtttgatgactctccttttaggccaacctgtttaaaaacatgccatgagactgagaccttgacaaaataatatggcaagtccaatagaaaagagatgaagacttttgttgtctcacctggtaagaccatttctgaaatgtcaaatctttctttccatggtcaagaccagtcaacaaaactggaccctgtattcctgttttccagttctcaaagtgcattccaatattcttcaaaccaaaaagattgaattttctcaattagtgacttgaataacttgtacataaaactgctacgcttaagatttttgagtcctaacttaccggtaatccaacagttacactgagaagtgaaactttgttagttccagcatggagatcaactggtccagtaaatgtaaattgtctccgctcactagtcccgaaggctgagcctgtacttaatatgagaatttgtgttaaatttccaatcactaaaggtttactgaaaactcaatagtacatatgcataaatgtgtagtttgagagaatatgattctaaaaaattacctgaatatttcccattgatgaaaacatgaacagcatcaccagctgactgaacactaagggttggttttcgtcctcctcgaagaaatgattctgatgagggaatgttgacactgcaagaaaaaagaaaaaaacaaaagttaaaaagaatagaaagaaatagttatatcaatctttttaacaaggtatggggggtatgtaaattgttatcagcagctcacctggttatgtaccacaaatagtcactagaatctctagtgacatttatctgctccaggaggccaacagttgttattgttgagctctcatccaaagaagaaagatcttcatcataagattcccatgagagcaacttagtacttgtgggagacatttgcatatgtgatatttgagctcccacctgtataggaaatgacatgtttgtcagcaagttaagagggagaaatcttctttctattatcattgaggagaactttgaaattttctcacccttgcagtgttatatactgcgtttttgcaatctggtaggatactaatagaccaaggaggcagatcatagtgcaggttattgaacatcactctggcaggtgagcttggatggatgtttgaaagaaaagccgcacatcttctagaccccgaaaatatgtgagcctggcaaaagaccatggttgaataaggcttgctgtttttctttttctttgcttcatctaatatctaacaaaggagataaaattatgaagaataaagtaatctcacctgctgatatgttcctaattttgtaatagttgcatctgaggatattatggcctgttgacttagctttattgccttatgaagctccctgagatggctgtattttggttccctaatcaaacctggaaacagtgaagtggttattacactgataaaatagcttaaaacataaggttaaagaattctatccaagagacagaattcttttaaggtgttattaacttattatgagtagtgttctaattttaccatattcatctattggagcatcatagtcatagctggttgcaacgaagggacctccagcactgcgtccgaagttggttcctccatgatactgccataaagaacagatgtagaaactcaaattttgctggaacatttttttgggatttaaaacacaaaccaggtaaacaaggcagcctaccatgtagtagttaatatatgagccacctgattgtatgaagcgagcaactgcaaatgccaaatcttcaacaggacgatggggattggctttaccaaactcagaatacctatttcattttgttaggaacatgaaggatattcaaaagagtacttttcttattcactcagtaaacactcactctaaagtagtatatttcctaggcatatacagaatacataccagccactccaagcctcagtccaaagcttaggtttgtaaggtttgttgggagtgaaagaatcacagtagaaaccattacatgcgtttatctgtagccatcccatgaaaacacaaaacttagaactttcattttctaataagaaactaatgaagatgtaataaaggagtaatgaaaataagcattagctgtatagtttaataaataatatagtgagctcaccacaggatcaggggcatcatcttctttgcacatcacccatggaactccagtatccaacccaacagccatttttgcagcccaattaacatagtttcgtccagcagctccaagctgcttgctctccaccccatactcattttcaatctttgaatacagaattattaacaaaagtaagtaaacagacaaatccttagtattaagagagaaagtattcaaactaacaagaacatacctgagaaagaataattggaccaccttgtgtttcatatagcttttcatttttcatcatctcaacaattttctgagtgaatccttgcattgccgccttcaaaaccaaaagtgatagaaaaatatttagaatcaaatccatattgattgactgtgtgtgcaatgttaataaatgtagaaaattttgcaaagttgattgagccaggttgagaaggctttaccttgaaaggtccattatctgttctgaagctgataccaggcacatacttcaaccacacaggaaatcctctataccaaagagaaaatgaaggtgaaatcagaataatatagacacatttatgaaatggtaaaatactacgcaacaaatttttttagatatctataatcatttacccaaaattccattcggcacagacataaggtccaatacggagatgaacatacagccctactttctgagctgtctttatgaaccgtacaagatcgtacctcccctcaaaattgtactaaaataaaatattgaaccgatatatattaaagttagaaggtaaccgtgtttaataattaataatgaaagagaagagaactgaaattgaagagacagaagagatctagtgaagtacattgccaggagaaggttcatggacattccaaaacacatatgtgtcaattacatctaaaccaccatctttagctttctgtataagatcttcccacatctaaatacaaaaacccatttcatagaaaggaaaaaaaaacatgtaaggaaactctgcatgcaaaatcaagatatgaaaaaggagaaagagagacagaggaaagttacttctggggtgcttcttggatagtgaatggagccggaaatgaggattttcctttggccattgatgagaatggcctttctatcgtaagttacagtgcagatcataagctcaggagccatgaacaaggccattaagaacaaagctaagagcttggaaaatgagaaagtttccatctttctctcactctgttgtcttttttggtttaaaaactctgtggagggaaataaatttgaaaagggttctcgaatcaagaaaatgctttcagaaagagagaaagaagctctgagcttctgatccactacagctctggaaacactgtgaccattgtgctctggtttggattatagttattctggtcacttgctcaaccgatctacttgccccccattaaatatgatagtgtcagctcaaaagctcaagtcttagttaaaacttttctattttttaatattatatctttcttttttatttatataataaagaaaacaaaattacaaaggctgccaagatttttaattttttttttcttttatcaatgttaatattatgcaacatattcaaaaggaaaaatgaaaaaaaaaagttgtgcatggattttttgtaaatcaaaataccaaatatccatggaaaaacgtaattttctttttcttttgataagttacatatatcaatgattggatttttttttttaacttctccttaatgcactttatagttgttaatagcgacagggcagctaatcttcataatggagaaagtgtgagttggaatttttgagagtgaaatttatgcaatcaataatagatgaaaggatgtataagagagatccatacatttataattattgctggtatttacgtatcatctattatatattaactgaaaactacaaaaactataaacaccttattatataaataaataaaaaaaaaggtcagtttttcaacaatgcattaagtattttaacccactaaaaaaaatttatgcaataaaatatatatattactttataatgaagataatttaaatgtttgttataatgcgaatttcagtagttcaaatggaccatgctgataattaaatacgaactgatagacagtgaagaatactttgaatgaggaaaccaagctttgcatgcagaggttgtctgttttcaataatatataacaaaaaaattaatatttgttttatttatatatgtataaaatacaaaaaataagaaaagatttcagattaattttatatttgtcaccttgagaaaaattatctacctttggtccctaaatgcatgttccaaagttttgtttgggcttatgtgctggctggtaccatgtggcatgtgctatgttctctcgtgatttttctttcattctactatttcatttataccctaccctactcattaattagtacaagtcacactacaccaatttttcaatattttttcttttattttgataattattgtttcacttccataaataaatatatatatataaactatatagccatatataatatctaataattaagttgaatgtgttgctcacccaaaataagttacaaactcatcatatcacttaattttcaccttgggtatgattagtaataaatcggcatataataattccttcatatacaatatttcctaatagtgcaaattttattaatgctagctaaaaaacacttttgactgtggttctaatatgggtgaccagaattaaatatatgtatatatgtcaaacaaaaaacacaaccatccattaaaatatctctacttttgcatcttaatttcaaattaaactctacacatattattcttttggtgaagtgaaatacacactacgtaaaaataaatagttaaaaaagaaaaacatatcaaatatttcttttaatatataatatatatacgtagataataattaataattggaagagctagggaagaattgaagaaagccccatcttcacgtgaagagggttcttatatatgaccaatcgaaatttgatacctattcagtgcacctttcgcggcatgtttctttcttttgtctctccccacaaaaacaaatattcaaaaagatgagtttgtataataatatatatataaaccctaaaacagtgggacataatggctcgaatatatattgtgattgactccaaccctttgagtataaataaggacaaattaacttatccacaccactgccatagtccatagtccataccttaatacctcttcaaaattaatggtaccattattatttgttccgcttttgttttattattattatttgttccttttaaaattacagatattgttgtattgttttgttttgcttaaattgaaaatcaataatctttgtcacagaaaaatatctgtttctttttatatacatatatatcattaattagagctatatatatatgcttgtttctgtaattgtttaattaaatagccacggtgtcggtgtacatatatgcatagtagaatgaagtattgattaagcaacaaataaattaattaaaatccaatttctttttgtcccacttattataaaaagaaccaaaatagagtttaagcctgtacgtggcagttatgtactagctagtatagtcaactttattttctctttttcttttttacactaattattattgctggtcctactataacctaattttggattttcacatatgattcttgtggatcgtcgtcgatccaaattaattatttttaaaacttaaccttctctttgtttagacttaacaacaaaaaagaaaaaaattatgtacacataaatatatgtaaataatgtctcttatataccttcccctctaccttttcctacttggtttacctaatctagatcaatacgatcattattaaaatagagtagatcacgtacaacaactttaatttaaacacactaggctagcatatgaattcgttgtgattatgtaaattattatgataacgtaacagatacctctactcttttcaacaatttttgtgtacctactttcgtgtcataatagactcatatatatatatgtatgtattattaaatgcgctgtaataatgtatatattatcgatgttatatatgtatattataataatgatgataatgttaaaaataatttttaaaaaattaataatattattattagtagagaaatatatattaaaagatgttagtggtgtctagtatctttatatgtattaatattaatattaatttaattaaatatcgagttttatataatttactataataatttttaacaagtattattaaccaattataaagtgattacatgtcttgtctagaagtgttaggtactattagaattaatatatttggtgcaggtgttgtaagagcatctctaatggtagtattctttaaggatgctaaaaatttatatattatttaaaaatataatattttttttgacaatgaaattaaaaatatagggttatttgcgg

SEQ ID NO: 16944 - DNA, 5341 bp, Cannabis sativa
  modified_base (163)..(165): a, c, t, g, unknown or other
  modified_base (268)..(281): a, c, t, g, unknown or other
  modified_base (5275)..(5297): a, c, t, g, unknown or other
tttttacagtttggggaaaagcagacatatgatccaaaaattgaattgttaccattacatccacagtggatattactggcactgattcatgaaggcttggacgattgatgttgaaatgtataagaaattttcttccctagcttatttttttaggttaacttgnnnttagatttattaacttgttaacacttggactaattttaaaatatttgtgtaatataattataattttttaattgtttctatgaaattaatttaagtatattgnnnnnnnnnnnnnntaatttaaataatatttaatttatcttttaaataataaattaaatagtaatagttattataaattaataaatatatgatttaaataaattaaatttcagaatttataataggttttaaactgaaaaaataaattaattattaaggatttggcgttggttatttttaaccctatagcgtctcttggatcagcgttgatagcccaaatttgtagtagtggcttctaatttccacatctaaatacgtgttcattacatctacattgcaccctctaaaaaaggtgcatcgatgcatcccatgctgttttgacattgagaacaatttttctttttatgacgtatatgttatagttaatcaaaatatattttttttttttgagaaattcgttataatttacaataatatagaaagtgattttaaaacagtttatttcgcacacgtgtaaaataaaagagtcacgcatatgtaataaactatttaaactctatttttggtgtgttaatttttttgaataatttttttaaattttataaaatattttaaataattaaaatgtactctattaagaaagattatttgttttaaatatcaaaataaataagagtgaatctggtgaaccccaaatatttatatatagttacacgaaaaagctctgtgggagttagtattttgttttttctttttaacggtttcaactctatcttcatccttacccctcgttcttcccttcctttcccccttcgtaacttcctatttctttgtatacactttttaaaatttaactgacaatcgttccctccccaatgaacattcaaaattcaacttcaaatcctgattagttttcttcaattccgttcttttgtttatactatacatcatggataatctactatatgatatgaatcaaactatgaccttaactgacagtgaaagagatgtccaaacagtccctgcgcctgcaacttctgggaactctgctgcccagaactacatcctctttgtacgagtagtttcatctcgtgatattaatcgcaaaacattcagaatcaaaatgagtggatattggaaaggccaataccctatcatcactctggtcttttcttagtcacttttggctgttcttgtgacttaaaaaaagtattgttaatggagccatggcactttcagaatcaccatatcgtcttatgccaacctactcctctacagattgcttctgcagagtccttacatttatcccctttctgggtgcaacttcatagattgccttttctaagcaaatcaaaaatctgaatgggcaggaaatatggttggcacttacattgaagaccacgaagattctttaaatgaaagaaggggaccttttcttcgcttccgtgcaataattgatatctctaaaccgttgttaagggggaaaatggtcaaacttaaagattcaagagatgaattctggttataattttgctatgagcgactaccaaaattttgtttcgaatgtggtacaattggcgatccatttgaacactaccatcaattcttggaacaaatttacaatggtgttgatcccccattaccctatggcgcttcaatgattggctccccacttcctcaatctggttacgatagatatcagactgatttctctaaaggagaagtttggccattaataactagattggccaaaaaaatccttcacagctgctataccaaatatctcatcgagacccctaccatatcccctctattaactgagagtgaggcctctgttaaccctgtgccacgacattctcaccacacatccaatttatccaatatacacatctcaaccatttcaactactaccaccaattccacgactttatcaaataatgataatgaagccattatcattccaatcctgccatttttacatggttcacccatgtttgctacctatccccctctgcttccaccattaaccccaaccaacttcgaaacacactgacttccccactcccaccagctttactcacttcatccactaaagtcaccataatcccaaaaaattccactatccaaccacgtgatgtttccaaaggcaaaaacattgtttatttagatgttgaaaaagaaaattcaaatcccaacaaaatctttaaacttcaattgaatgctgattcactttgaagtgtgctcaagcattgtcaatccaattccactacaggtcagtcgggaacttcagactcgaatgactctcctgctttgtatgtttctagttccttagattcagctcagcacctttctgaaagtgtggcgaatgttgctatgcaacaccgccccagccatgaatttcattagttggaatgctcggggattggggaactcgagtgcattcagacatctccgcttgcttgttcctgggcatgctccctgtttgttgtttcttattgaatctaaattaaaagttggaagtatagataaagttcgtcatacacttcattttcctcatggacttgaagtccctctggaaggccaaggtggtggtcttatgttactttggaaatctcatgtctctgtttcactcaataactactccactaaccgtattgattacttcattgaaagtcttgatggtccttctttgcactttactagactttatcaccttggcttgtcctaggtgacttcaatgaaataatatcacatgaagataagattggtggttcaacaaggaatttagcccagattgaagcatttcgatcaacagttgttgattgttgtcttaatcaattacctattgagggtgaaagaactacctagagtaataaaagtcaaggaagagagaatattaaagaaatacttgactacgggtttgtgaatgactgctgggactccaccttccaaacatcatcacttcaacatctcgactattacaagtctgatcatcaagctttaaaagtgttagttgctgcacatgatgaacaaccagaagagagatgctttaagtccagatttcaatttaaaaaatttggttgaaggaagactactgctctgaaataatagttgataattggtccaatgattctacaaatcacattacacaattgactaaaaacatcttcaatgttgctgtgaaactccaatcttggcatcagtcaacttttggacaactaaagaagcaaataaaagagacccatggcacacacgggtcgggttttcgggtggtcgggttcgggttttggattttaggtgtttgaaatgcacaaccaaacctgatttttgggtggttgggatggcgggttttgggtcgggtataatgggtttgacgtgctcgggttcaggttttattgggctgagcctgaatgttttctgggctcaaataaaatttaatttttaaaaatgccatatttttttgggcctttttttatgtaattttttttttttgatgaatcaagtatgtgtattgctcaaaactttttatacaacctaatagaattctccaagtaaggagaatctaaatatctataaaactttacaaggcatcaaatcattctttctcacttttagttacttttttttggccatatacatgtaattcttttttcataatgtttttcactttagcaattacattctctacatttgtattagaattttgccatcaaacattgtttcttgtgcgccatatttcataaacgaaggctacaatgacagcaactaaaattgacttcttcaccttgcttaattttgccctcctaatccaccttacaattcttttttttttttttttatgtaattatcacctcatcacatcactcaaaattctatctggattattacctctgtgagattagattacgatctcagtcttggtttccctaacaagaacaacaacctataatgaaaagatgagaccaaggatcattactacggaatgaaaaacaaaaattcttataacgaaaaagaaagacaacaaaaaggctacatccttttatcttttaccaaaatattattgcagcagacaaaaatttcaactactgtaaatactaaaccttctttttctaaactgaaatccatcatattccactcaactgtaggagcataaacatataatccattataggaagtataatacaacaacagttagaaattgataaaatgacaagaatatttcaaacaattaagattataattctgtagttgcaaagagaagaattaggctgaatttcgggaaacaaaaaaatacaaggaagaacaggtcgaaagtcgttggttatatttaattatttatatttaccttttaaggagaagggaatactttacaccgctaaaagaaagcttcagaactttgcacttcacctctcatcttttgtgtgaaatgctccaacgtatgtgcatactcgttcataatattattattttttaatataataaaaaaattatttttttactgcttgttcgggttacgggttagaacctaactaaaaaaacatccacttttaacacccgaacctgaaacccgtgtggagtatttttgggttagacccaacccgaccacacgagttttcaattttttggttttttggcagcgggttggggcgagtgatcaggtttttcaggtttgcgggtctaaatgtttccttaagacccataaacatgtttcaacactccacaactcaccaagaaatgatcaagaacaccttaaagccttacaaaatttagaatccattctagatgacttattggcaaaggaaaaggactattggcatcaaagatccagaatctcatggttgcaatcgggtgattccaacaccaaattctttcatcaacatacaagctccaggttaaaaaacaatcggattaaaaagcttactgatgcaactggtaacacccaaacaaatgctcctgctttattgaaaataatctctgattattatcaggagctttttaccagccaaggtgttgatcagccttccattgatgcaatcttggacataattcctgttgggttttatgcccnnnnnnnnnnnnnnnnnnnnnnntcagatttacttattaataaaaatcagaaataacattttatgtt

SEQ ID NO: 16945 - DNA, 6099 bp, Cannabis sativa
ttttttccacagttctgctacagctgctttttcccacagcacagctacaactgcttttccccacagcacagctgtgccaaactggccctcaatcatctgactgtcactaaagatttagctttggtgttataatcatccgttttatgacaataaaaggaaacatttattttagcttttttacaattaaaagaagaaaaaacaaatctatgctgttagctctttgttctcccattctgaaaaatcatattttcttgaaggcactcgtatgtggagaagaggagctgatccagatggttacgtggcaaattttgtagaaactgagcaaattgtgcagttgaatgggtatacagcctcatttgtgcaggtgaaagttactagtgctgttatattttatatcgtattttctgaacttggtggtgcacttggacatatatgattggatctcaaacatcttatcatgtttgattttgatttgcaggttcggggttcaattccattgctttgggagcaagtagtggatttgacatacaagcccaaatttgagcttgttaaagtagaggatgctgtgagtttgtgattactttttccttactagtcagtttgattccacacctaactgcttttactcggcatttgacctgtgcattaaacttttattcagcccaaagtagcagagcgacattttttggacttaaggaagaaatatggggccgttttagctgttgatcttgtcaacaaggtgcatactttatttttcaagccatttaagtatgtcacttttcatattatagactgtccatcaaaactttcacctgcatttgtaccattagaactaatgtttgtggtttgatttccattgctgtattcacttaaatgacattttcattttttatcagcacggaggtgagggacgcttgtgcgaaaagtttgcagctgccatgcaacctatcagtagtgatgacgtgaggtaaaatttattttcctctcctctttttaagaatgtttctttaagttatttagtttgtttttaacgtgatagctatggaacattgcagatatttgcatttcgattttcataaaatttgcgggcatgttcattttgagcgcttgtctattctctacgaacaaatttctgattttctcgacagaaatgggtatgattttatggcttatgagcatagctagctgattaatgtactgaattagatatgtctgtattacatcttttctcctaactttctaaactgaattcaataggtatttcttgttgaatgaaaaggctgataaaatgaaggaacagcttggagttgttagaagcaattgtatagattgcttagaccgtacaaatgttacacaggcacgtatacgttaattatatacttaatattgttctttctggcatgagaataattctcacattgtacatcatatattggtcacctttacaattgcagagcatgataggtcgaaagatgttggaatgccaacttaggaggcttggtattttcggtgctgacgagactattagctcccattcaaactttgatgaaagctttaagatcagtgagtcgttctactattattatgcttttcatgatcatgttactgattaaataaacgtgtctttttgtaagcattctattctaacccgttgagtgtttatatgtctttagtgtgggctaaccatggggatgacataagcattcaatactccggtactcctgctttgaaaggagattttgtcaggtaattttggaacctagctttgtactcatgcatgttatgagatgacttagatttcattgcttccttactgaattgctcaatgtggtgttggattgtcagatatggccagagaacagttcatggaattctcaaggatggatggaattcccttgcacgctactatctaaacaactttcaggatggagcaaagcaggtttgttttaaagttaaatctgacatctttctcattcatccatgaacaccctactattgaacaaacattatttaataaacagaacttggttcttgttctgctatgagttatattgaccttttttttaatatttggtgtgtggattcatttggctcataaacaaaggatgcaattgatcttctgcaaggacattacattgtttcggtcagccgagacataagcccctcgcctcaaaaaggaggcctagaggctgtagccgtgagttttccaaatgtttgtttacttagataatattactaaacatcaatatctcttttctgagtatgtttgctttgatttcagtcatttccactggctttcgcattcgttttggttggcttcctgtttgcgaccatgtcacttagacaaggtattaaaactaatgctagaattgtgaacaaaagaaacccaaaatcatgactaatgatttatcttgttcgtttccttctggtgctcatttcatctcttatgcagttcggtacgaccttcgacacttattcttttcaataatgtgggcaagcctcagcgtggccttagcagcatttgtgagggccaacggacggattttctgcaaccgccctcgtctacacaggccacgccattaaattcagtttctattttccaatgccaagcttttctgtgattgttactcgttaatgttatttcagttcattttcataatttatagtccacggaagagactcactcattgccagagttgatttttgcagtaccctctaatgttaacattaacattcttttttgtataaattgattttgttgtgaccttttcatactatctataattagtcaagcttttacaattttatgtcaatctgtagtctcaataaatatctataaaatgcattaaagcataaagtgtggacttttattaaacaacaaaaggtaaagattttccttctaagcagcttgaagaagctgagtggcatatggaggccagtacaggtgaaattcaatcttgtaagtgacagtgatgcctttgagattgaccggtgaggatcttacgtagccttggacgaaggtgaagtcccctgtaccgccaaccacaggatgatcaaggcttaatattgtgtgtgccaccaacaaccgaaatcgaacccctgtggttcttcagattcaaggtgatcttggcaatggaaatgcttcgaagcccatctaagccggatgtgatggaggttccttctgcgattcccagtacttttgaagatgtgctgggcgtcacggtcatgggatcctggaaagcaaatagggtgccaaatggtgttgttgtctgactagtatcaggtccagccaccccattcactatgatgtacccggttttgtttatggtttcgtgttggaagagagcaaagtgaagggacttgatatggctatggtggtggtggtggtggtgagaggtggagatgatttcgatagggaaaagagctaacatcagaggtagaagaagtaagtattttgggagaggagaagccatttttaatgtctcaagtgtttctcagccttactaagatttatagtggtagttggggagagataaatttcttgtctcaatatgaactcttgactcgttcaaaacaacacaacacaatctatgcccttagatgtaaaatttggctggtacaggggtttgatcaagaccccccatagttggggtaggttagagttaaattgaatgaaaacaggtctcttattcacattgattggaagccgtgaaagaaaaacaatacagctttttgttgaagcttactttttcaaaagcagccaccaaaagggtccattcacaagtatgagtgacaaacaacaaagccaatcaaaatggtcccttgagaaactaaagattgactcattcaaaggagattacataaatggtcatatcaccatcatcagcatcagattttttttttagattctttgcaaataaatatgttataatagtaacagcactgactgatctttatgatatagttctatcgtaaacaaaggttgttcaagtaaagttaatacccaaattgagaaagaaacaaagcaaggaaagataacacatacattttcagggaatttgagtaaattattatgtatatcaatgtatgaataataatactgtataggaaggaaaccaataaagttatgtatctgttatatctttttcttgttcttctccaaatattggtagcttcgctggaagttaagaactgcccaaaccaagtgccataaacccaactctggccacagagcagtaggagaatacaatggacagttggcagtttgccaaagaaggaaattactcagacgggtttcgccagaacttcgtatcacaatgtctggatcaggagctactgccatgtacatgtgcttctctatatctactaactttagagtcggaagattcatttgcttctcacatacttcactttcttctatcaagccattgcaaggtttagcttcgtgattctttggcttatcttcgtgttcttcaagaccgccatgaacaacaaaaccattcatcttcttatcactgctgccatttcttgtttgaatgtcataaattttggattggcaggattcttgaatagcatgaacgatctcatcacacgatgtataggccacacaaaccaaaagattagccttgttgtttttggcagtagctttcatgactttctcagcagcaactctcacaggctcattcaacagtttcaaattaccaataaaatatacccgaataccatattggtgcacaatactttcatgctcgagaaaccccttcatcttttcgagcatcagatccattaaacactcaacttcttcggggcttctcttgaaattgtcaatgctaaaggcatatactgttacatacttcactcccaactcataacagtagcctagcatagagatgagcgatgaatagcctgctttatggccagctatcgtgcgctcgttctgcttcttggcgtaccttcggttaccatccatgataaaggcgatatgttcaggcaccggaccaacagatataaccctgaacaaacatttcattacaaatttagttaatcctccatatagttggcctatctttccacttattgtctccatagtatgatcagcagtctgcacccaaaaggggaaaataaattattgttatgagttcggaagttcaagtgcttattaagaatagaaaaagataaccaaattgagttaacttgatcaggttacagaccaataattgtttttacattagaaatccattcgaaaaaaatatcatacaaaaataatagaagtctcaaccactgaaaacaaaatcgagtgttcgaaattgaaatagttgaagtagttaaataggaggatcactataactatagtctatagctcttggtgaatttattaaagacgaaaatgatttatttgatattatggatgactgttgacggagggatagttttgttttgtaggttggtccgatctattgctctttccttccttgtgcctatttctcttttaaagggttggttctcaggtacaacctttgtaacttcatggtatacccatggattagcaacttcctatttgaagttgataagtaaatttagaattagaaccataccagaaacagtacaatatacaataataagcaagataaaaaaatggaaacaaggaaaaataaaggttagttcttcatttttgttactataattcatccatcacaatagcatagtggggtttatttaaataatacaacacaattatttatgttcattatttttctatttatgtttgttgtgattaactgattaagatgggttagattcatcctaagcaaaagtcaaaagccaacattaatggcatcaacaacaaaggcagtatcactaggtggcatttggttgggaggaatcaaaatatagaaataggaatagaaatgggaataagaatagaaatagaatggaataaaatttaaaattgataaaaaaaattgataaaaaaatcattcaattttttctcttattacgaatggtctttccttctttttaaaatggaatagtcattccaccaaaatagtgaaaaaagttttccattggaatgtcattccaatattttaaaatgcaaccaaa

SEQ ID NO: 16946 - DNA, 7270 bp, Cannabis sativa
tttatttttatagcttttatttttatgagtgaaatcgttactgtgaggctcaaatttggttaacgaaaatctgtgttaacagaaagctcttcactttctcttgtcctttatcccttgggatttttgtgctatttcgaaaattcaagctctccaccatcttcctcatcagtttttactagtgggtaagctttcaaattttgttcttcacttgtttatttggatttaccacaattgcttaaaagcttttcttcgctttgagtagtttttgattttgacattagattgtaatctttttggtattttgatcttgatgatagttttagaatgcataaagtgtgattttctgaggaaaaagatttgattttgacctttgttgtgattcttcactctttgagtcacgaagaacacaaagaacatgtttgagtttttgaaaaacacacattttgattcatcataatccctggccagccgtataggtcttaatcctttgaatcctaggacactacaaaatgtgacttaatcctttgaggtgcatttttggagtggagtcaggaaaattctttggttttatggtaaaccaacggggattgaattttttcaaataacaaaaggtaactaaaagtttcaatggactgataaatgcgaagaggcttttcaggcattgaaaacgcacttggggcaaaccccgatactatccaagtagaggcctggagaagtgctttcaatctacctggcagtgtctgaatacacgattagcttgatgttcatctgcaaagaccaaggtagacaacatctggtttactatgtaagtaaatgcttactagatgctgaaacttgctatccacaaatggaacgataggtatttacactagtggttgcttctcgaaagctgcgaccatattttcaagcacagagtattgaagtactgacaaactatcacttacgacaagtattgaccaaacctgaagtgtcagggcaactaaatggtcaatattaagtcaatttgacataagatacgaaccacggtcggctatcaaaggccaagcccttgctaatttcattctggaattttcaaatgacgagctggctatcattacagaagagcgagtcgcctgaggtgccatcaagagaaggatgaaatttatatgttgatgggggcatctaatagcaaagattcgggcggtggaatcatattgataagtcctaaaaaatttaaagtacacgctgctttaaggtttgaattccccgtcttgaacaataaggttgagtacgaagctttttaatcacaggtttaaagctcgcatcttaagatgaaagtcgaatacctcgaagcattcaacgattcccaaattgtggtttttatttgccaagtcaatagtgaatatctggccaggggaggacactgggcgaaatgctttggcccaattggcctcaacgagagagaagcagaattagtcgatataattcttgtcgacgtgttggctcatccgacaattaattgcgaagaaactgtgcagatcgatgttattgaacaggtcacttggatgaccccaatcatcgcttatttaaaaactgatgaactccctaaagataagcttgaagctaaaagattacatatcgagctgctcgatatgtaaattatgacgacaagctgcatcacgggagttttagccaaccgctgcttaaatgcatcgatggggacaaatgcgactacattcttcgagaagtaaatggtggtatttgtggtaatcataccggtggtaatttcctgccctcatcattttctttaggaatgtgttgtgaattttatttttcataaaacaaaaaagaaaaaagaagtgaaacactattatggagagtaaaatgaataatggtaagaacgagaaagactttgaatatagaagctagaaagtataattattaatagagaaatggtaaaggaaattagtggtgcttagcacccttttatatgtcaatatggctatgactaattaagtatcgggtctcgtataatttaatgtaataacttttaaggagtattgctaaccaatcccaagacgacacgtctagaaggtgttaaccactagtgatgcctaatagtaatgctcttattcataataataaacaaatttaagaaattaattttgaacgaaatccgttgtacaaattaacgtaacaagttttgacaacacatgcttaagaaaataacgtggacgtattaaaattttggtcggccgattaattatataatataatatatataaaaatatatttcttcaatattactgccaacaaacaaccaaattaattattctgatcactagctaggccccattaaagaaagatgggcagtacacaaatatatatactatacacacacggcaatggtacgtattcagatcaaacctgctgcctattcaataagaatcattattttgagacgttttttatggttattttccatataaaactctagctctttggttcctcaatcgaggcgagaaagaaaatttgcaaaatctagctatatttatagatttatgattatgaggatgagggtgttggcagtggtagtggttgttagcacaatgctagtagttttggtagagtctggagtggtagaagtgggtgttaatgttgatgatgatagtcataataacactgagaaacagagtgatgttataattgactacggtcgagtacgaaaagtggcagcacgtaataacgtgacttgcgtgttagttttcggagattcgagtgtggatccaggcaataataacgttctttccaccacaatgaaagggaatttccctccttatggtaaagacttctttggtggccgccctactggcaggttcagcgatggtagacttgccactgattttataggtatattatataactatatccatatatatatatacacattttcaaactgcaaatgattttatagtatctacatcacatctaatttttgcttaagtgattttatatttaaagagaggagaacaatataattaacacacatatatatattattatactaacaaaaaaaactgaagcttaattatattttaaaaggcacatcaaagattgtcatatacaagcatacattgcattttatattgtagctaaaattagtaatatatatttgaatatttctgatgtcattcaacaatgtgaacaactaataaagaagggaggtatacattttaattcttttaattcttaatgctgttgtatatattatatagagttagaaatgatgttctttggaatcaaaaggctccccttaataggaaaattgtttttaatataaagaatacaatttatatagattttctcacattaaacatgagaaaataagtagtgtagatcatttttggtttggtgcccttgtagaaacttgtaaagagtaatttagttgtataatggtttatgttggagaaataaaatttatctcatttacaaattaaaaaaaaaaatcatataaaaaaataaaagaatattatgctaaagagagataaattatggaatggaattatatacatataaattatatgatataattctacattttcttttttgatggaatgtttattattttattttttttgttggagggaatgtttattaattaattcatatatagttcaggagaattgtctttgaaatgcaatcccaaagatagagtttgcttttacctccaacaaaaaataatacctgttttttactttcatttattttattttttttattttataaaccttttatactatgtcatagcccccaattttattttatttttttaaaattacgtgtaaaatgtagttaacaagtaaaaataaataacttttttatatatataaattggccgcttcccattaaatttgggctgattccaccattgtataaagtgatcaagttttatatttttgcagccgaagcaataggctacacaaagacaataccagcattccttgacccggatctaaaggatgctgatatggtgcatggagttagttttgcctcagctgcttcaggctacgatgatttcactgccaatatctcggtacgtacgtatgattaaatctttaatgtgctctctcttttacttataatttacaattattattttattttttaattatataatctgtgctcttgaaacagaatgtattacctctatcgacccaaatcaagtattttatgcatttcaaattgaaactaaggagagttttaggttacaaaagggcagaggagaccgtaagaaatgctgtatttgttattagtatgggcacaaatgactttctgcaagactactacttggacccaactcgcccccatcagttcaccattggagcctatcaaaattatctcgtcaataatatggcccattacattcaggtagatacagaattcaatttctatgagtacaaaatatctttcctattaattataatattgttttcttaataaaatttcattgggtcagtctctgccatcaataataatataaaatggaaagaaaccctaccccactgccatttattgagtatatcagccactttgatgaattaaagaggaattgtattaccaagtagtgtccaacactagtaggatgtagcattttaggaatagctagccattcttaataatatgataattgtttcaaaaaaaaataatatgataattaattaattaattaattatactaataataatatgacactttataatttataatagtgctagacattattaatatattttaatattaatgtgtatcaatgcattacatgagtagtaattaatgcaagaaaactgagtttattctattaagtactattagagtgtccaacaaaacataggatgcactctgtattaattagttagaaatttccacaataatctatgtagattgcaatacttaattatatataatctactaagtcatattaactgcttaagggtttaataggattttgataattgtgtaaatataatgtgtattgtgtggtttaattttgtacaaaaaaaaaaaaaaaaacaattatacttaattatgcttaagggttttaataggattttgataattgtgtaaatataatgtgtctttcaaaaaaaaaaatatataatgtgtattgtgtggtttaatttggtttaattttgaacaaaaaaaaaacaattatacttaattataatactagtatagaatcttgtggcagtactgttgatactcgaccaaaataaagttatatttcatatattattggaaacttcatgtaactatagctaggatcagtgctagccagctattatcatgtgatttagtgatgattcagtgaatagtaaaaatggtatatttaataaccaccggttgattcaatgaatgcaagtttttatatattttttatgtaattcttttaaaatattttttcttataatatattttttaatatattaaatacaattatttaaatttctctctgaatttgattccatcaggaaatgcataagctaggaggtcaaagattggtagttgtagggataccaccaatggggtgtatgccacttgtgaaaacaataatggacgaaaccaaatgcgtggacagttacaacaaattgtctgcctcattcaactccaagataagtgagaaacttgtctctcttaagtcaactttgaatatgaagattggcttcgttgatccttacgccatatttgtagatgccatgaacaacccacaaaaatatggttagtatatccttttcttacttattttatttctagatatctatggtttgcttagttgtcacttaataaatgtactgcaaataaaaattaattaaagtttcccgatacaatattatggaaaattatcataaatgtactaatactaacgtataatttgaatctgtttaattaatggaaaactacgagatgatcagtacgtactaagtataaatattgattataatatagtatttacactgatatacacatgttatattatgtacaggattagaagaaatttcaaaagggtgttgtgggactggaactatagagtatggtgattcgtgcaagggtatggacacttgcaaagacccaagcaagtacgtattctgggatgctgttcatcccactgaaaaaatgtataaaatcattgcagataacgccgtcgcagctgctaataagaaccttttcatgaaataactaatatatatataaattcccggctcaatttctgtgcaaattctggacgatattctggaatttgccatttgctatataaatatttatatcatcttttgttgtctatgatcatattctattattttaatgatgttaattctttgttttatcaatggattatagttttcggaatcttctcattttgtttattgataagttctgggcatctccaaagtagcccaaaaagaggtttaaagtggacttactatcaataacaaccaatcaaaagaaattatttctgtgatacaatttaatagtgaatcttatatattttaatttaaaattaatttaaagtcaaatatgttagacaccgcgttggaaatcgttgatatgattttttttgttttcacatttattttatatattattgtgattttaattatctcgaatgatgtgaaatatattttataatgcgcggcaccatgaagataacgtccctactgctcgacttaattagagtaaacatactaaaatatattaagaatgaaattccatttgtggagtgaccaatcagttagaagatcactaacctggtcagacaagtatagacataatgaaaaatccatgaaatgaaataacgtgactaagaattaccggtcgagagattttgtcaatcaagatctgcaaagatagcacttgaaaccctgaagacttggtaatttatcgacactatgatctaaatatttatagcttttttttttttttttttgaatagaactatggagaattcattaaagtaaataagatggaatcataaaaggggatccctccctatcaaaaaattcatcaccaacattccacaatctagccctcttggccaaagcatcacattccaaattgtctttacgagataaaaaacagaaaatacaattaacaaaggtaaggacaaactaagagtacttctgttcatggaaagccttgattagcaccatggcatcgaatgccactgcaattgacttgaaacctcttctagtagcaagctgcagaccccaccgaatcgccagcattttcgcttca

SEQ ID NO: 16947 - DNA, 7217 bp, Cannabis sativa
gtcactttacaatgagattatctttaagtttaatatctataattaataggaagtaaaaaaaaaaaaaaacttattactataatatatccttaaaaaaattatatattttggcaatttttattttgaaagagcaaacaagagttccccttctactatatttataattaaatattaattaatccactttgccgacttatacttctattataacaagaaagagctactagtacttattaattgaattgagtttggcctttaattaaatactctaaattaatacatatataatactcccaaagttttaaatcaaatcattaggtcgttaagtatgtgattgaccacctaacattagttgttaatcgatttaaagctaaatggttttgtcttgtcaattggataatgtcccaaatggttatcattatcatgcatggcgcctgtgtttttatccaaattaattatacaattaaaaagtaaaatatatatttaaacgatttccttatattatccatatgtctaatctaactatgaaagattcaagtacttccatattgatttgatgaattaatcaaaatgtccccaatagtacaaattaatctcttcctagctagctagatatgtatgattaagacttcaaggttttacatacaaagcatgtaatttatattcagaactattggataatttttttcagaacatgacaatgagttcagggatgttagggatgtttcatggaataaacataataaacatatatatatatataattatatatattatattatttatacttatatatctcaatggaggtaaaaattaataattatatttttttggaaataataaataatatgtcgagtaacgagtggccggcaagttctaaaaaaaaattataaaggtgttatttattaatttatttattttttggttctatgtatgtatatataatactgattaaattttgcagacattattatataacatttattctaagtttttttttttattaaatattagtaaatattatttttcgccctgtcgacatttactgcaccattaatgctgcaaaaaaacttatataggaaaaaaatgatataaaagaaaaaccttgctagctgataagtttctagtgacagaacctttttattagggtaaagtgttcttctttcttctatattttatattttataaaggccaagtttgggagtagttcaaacacctttcaggcattatatactttcattcaacattaaataatgatatttagtagtataataacacattttcttgtacataatccgaaaaacaaaaaatgaaaagtaaacaaaattataaatagcttctatcgaaaataaataaaataattgcattaatatatactttattttttgttcttaatgtatatatatttatgtatacacagtggccgaggaagagttttcaaagtggaagtccaaattgtgaagaaaaaattttgtgttgctaattattatataatttaattttttttacatatatttaatatatacaaaaatagataatttttttttggagggctatagccccaactcaataacggcctccgtgtgtttttttcttttgagtgtaatataacggcgtccgtcaaaatatatgtatattttttatgaaagtatacgtacgagtaataattaatatctgtggccgttgtgactattacatcaagaaaatttggttcgccgttaattttcaactaataataattaaaagaacaacatacaaaataggaatatgtatcttcatattattttgtaatattattcaattagatagagaatcagaatgatggaattaattaataataatcaagagggcctagagggaatgtggttcacagaacaagtagtattaataagatattatatattaatataaaaattactaaattaatattagagaaataaaatttatgaatgtttctcaaataaatatagagaaagaagaaaaactcctctgtactacaccacctgacttaaatgctcttgcacatggaggggtcttcaattcatgccctttctgagtagttcttttttgggattgaatggtctgcaagaggttggagatgaattaataatattattcaaacccatcaatctagctacttttccattacttaattaattaaatgctttaaataattttttatttatttatttgtgacaaaaattgtatatactctcaaggggtgccaattaagaaacctacttcatccttatttacaaatttgaaatctaattattgaaccctggccgtttgcatatataatattaattgtatcgatcaatgtataacaaaacatttacttgtataatacaatacatgtttttttgtttaataaagtagtaattggctggcattattggttattaaattagttccttcccacttactacgaacctttttttttttctttttcattaacatgttgtttcatttatataaatataatattatgcaaagctagcttagggtttgaaaaacaactaatttcaaggagaatgtttccgcagccagcatcaacttttataattcttgatttttagtacctaataaagactccgagatgctctttattatatttatatatatatatatatatatcttctttgttttccaaattcatgaaccaataatgactttgttatctaacagacctagtcctttactatttatttatatgaatataatactacaataaatattgaataattcgtcgtgattagaaaggaggatgtctaggtttacacgtatagaagatatatttatatatgtttgtatgtatatgtatagatgcgtatgtttatatagatacatatgagagagatcatcatgatcttttcgctcgtttataattatgtttaatttcaaccgatcgatctatacataataaaacaatatataattaacattaataatttatatataataacataaccgctgtcaattatgataatgacattcacatgcattgttatatcttgccttcttatttatgtagttactgtctactgattagacaacataaatagagccaaaaaaaaatgttaggacaatacatagtagttaattaattaatttacattaaattataattgatgagaatgaaacatattacaaacaaaattaattggaacatattaacaggaaaaggaagataactccttaatttatgtttaatttgtacattgtcgtaaggaaaggcgcgtgtactgtatggaacacaaacagaagtatattctacatattggagttaattaatatatatatatatatataaacaaaaatcaattaaccaagataattcactaacatggacatgggaaccaaacataaccctcttttctttaagtctatacactcattaattggttcattgaaatccactacactcctttcttctgatccttgcatttctgaatagtactctaatgtaccacctcttttaccctacgaacacatattattaattccacacacgaaccgaattgaaatatcagttatataattaaaaagccgaattaaattatacataaataaaaccgtttttttctttttctttttatgggtataatagagtttaacaataattaccagagaattattctcaagaaaatgatcacccgcgtgtttgtttttcatatcaatcccccgtttcagatcaccaacctaattaaatatgttatgtatatttattattatatatatatatataaagaacaaaaacacacaaataaataaatcagcacaaaaattaaaattgtttgtaaaatagtaaacgtgtaaggtataaaagaaaagaaaaccaatatatgatatgaccttgggactattgactggggaactagcagtatcttctaaagaatcatctgaagaaattactttggttcttgttctcttaaaagtcagcttcttgggcggtggccgggatcctccggcagcgatggacgggttggtccctgctgggaattgaagattgtgatgatctctttggttggagattttccatgcagcataagaagcagcatcagagaccaaggaagagccatatgagatcaaactcccttcttcatcatcatcatcatttttatgatcaatattattattgttgttgttgttgttggagaaatcttgaaaataagctgtccaaccactctcttcactgtaatattctgaattaggagaggaattaattggtttggtcatggaagatgagttgctattatatttctccatatcaaattaagaaggaagaagaaaatatgatgaagaaagagaaaactagagagagggtttttctaaagagagtagttgttttataactgaaatagaagaccaaagaagggagatcaaaaagagcaaaacctaccccatattcataatattattagaatctgaaagtaggggccacaagaaaactaaggctttaaaatttgatatgagagagagagaacgtgcaattttataaaagaaaatacaaaaatatattcattatgaaaaagagtaatataatgcatagaagggttgacctttgtggttccgaatgggatttaacacgacacttagagagagagagagagagagagagagagagagctcgtttctatatgatggactctcacctttcaactaattacaataaatgagtcaattccaagtttccaacattatatgcttccccatagccacaataagtaggatttttttaaggagaaaaaaaaaaacggaaaacaattttattgattaagaggtgtaatttttctttgccccgcaaagtttattgattaagaggtaaatgtctcaaatgtcacctatacacctaacgagtcaaaatgagacattttttttttcgaaagaaatgtaaaatttattaagataaatttgttgttatagaacaactcaaaaaacgaggacaagcatctgtccaaacatagtcttttaaactagtagcagaggttgccagtatatgggcaatactattcgctcatcgcggaatgacactgcaagaattaccaccaacaacagctaataaaaaattgatatctaataaaatatactaaaaataaaataaatgtaaagctattaatccaaccaattaccacagtggaatcactattaataatggagatattgaaaccaaactgttgcgcaagaaccaagaccagacaaatggtaagcaactccgccacattagcagagaaatcatctaatacacccgatgaccatgccaaccaaactacaccctctgcatcctgtatcactccccccaatccaacaaagccccttcccggaatcaccgaagcatccgtcgctagagtaaaggattcaggaggaggtggcactcatcgagtagctcggtttacaattgggttcacatgcaaggcccagatccaaatgaaaacctcacctagcatattccttaaactttgtcagatggttattggctaagtctagagtaatatccaatcttgaccgcttgttgcaaataatactgagttcctatcataccacaaccactaaaagattgtgatcattaattcaaaaacctcacgggatagtctgtcaaagagtaataggagaatttcctgcactggcccatatgcacattgacggagcatcgaccacacccccaaccgatgccacactggaatcaaaccagaacagaaaaatagaggtacccaactttccaagagataagttgtgttgctactagctaagccaaacagtacatgcgacaaacatacactttcacctttggtggtagattgagattccatactccattcaaccaacgagttatcctagatgaatctacaacttcattcttaacctggagtgacaaggccaatgagtagccacttttgacagtataaaccccatctttatcgtagtgccaacaccaactgtcttctaccttaccccttgctaatggaatagatagaattacgtccacatctattggcaaaaaacctattgaagcttccccacgtcccaagtaccagatggaagaataaattcactcacccgacaatcactagtaatcctccttgtaatttgctgaaaagacctcggtcacgggagccatgggtccttaaaagccctaacttgtattctatctcaaatagatctctaaagcccacacttaagcaattctattcccagatcaaactcaaccaaagatgagacgaaccaactttttccgtggcctcattgatagagcaatttgggaaatatttatgtttcaaaacacgagtaggcaatgaattggatatagaaataatctccaaacttgcttggccaaaagagcttgattaaaaagttgaaaatcacaaaaaccaagcctacccatcaccttaggttgacaaactgtttcccatttcacccaaggaatcttcctttcatgatctccagttgaaccccgctagaattgtcttacaaatgactttaatttttcacaagttttctttggaagcttaaagacgctcatataagttggaatatcttgaagaatagatttgataagtacttctctagttaaaaagaaattctgattccatccccgcacacgcttcctaaccttttcacagattcccaatgcccgttgtttgtttctacgtaccaatcatcgtaggtaatcccaggtacttgtcatgcgtggccactgatgtcaaccttaaaactctcaaaaccacatctcgatccacctgttgcacattcagactaaaagtgataacaaacttctcaaaattaatcttctaccccgaggcagcctcataagttaaaaggatacgctttatagttttagtatcacctcccttagccctaccaaacacaaggctatcgtcttcaaagaacaagtgtgtaacacgtggtcctgatctaaagcaccaaaaccccatcagttcagatctggcttctgcaagggagaataatgaagacaaagattcggcatagaagataaataaataaggagataaaggacatccctggcataaccctcttgtcagaatcactcggcctttagggcgcccattgattaacaaagtgtactctggggtcatcacacagtcaatgataaccctaacccaaccctcagtaaagttaaactgtcgcatcatactggctgggaaccattccacccggtcatatgctttactcatgtcaagcttgagtgccataaatcc

SEQ ID NO: 16948 - DNA, 4365 bp, Cannabis sativa
  modified_base (1410)..(1411): a, c, t, g, unknown or other
  modified_base (1586)..(1588): a, c, t, g, unknown or other
aaaaaactggtcacaattaacaccaactatacaagctgtgaaatcattgtttaagtgcaaataaattacaattcagcaaaaaaaaaaagtgcacataaattacaacttcttatccaaacattcaaacttaaattcaagaattataaaacaaatttaggaagtccaacattaaagaacatcaaataatacataaaaatacataaaatttgtagctctcaatccctaaaacaaacacaaatagtagtgtaactaacaagccatgttggaactttagtaaaattttacaaaatcgttgaatgagaagtaaggtgtgtgacagtgtgagtatattgagtgatatatgggataggaaaattttattggaagtgtatataatgtgcaaatttaacatatggattagggtcataaggggtatccaattttgtgcacatgggtaatgactcacatatcgaatcaccacacacgtgatactgttgctgccgtctgatcgaccgtgctgagttgggggtgtggtgttattttattttttttggagaaaatttatttattaattattatttttctcgtcctgatttttagcatcattcccacggacctacattctaatgttcccatgatcaaaaacgtctttctttccgttactactttctgtgcattccccatataatgcatcagaaccaacggtacatttttttctcacagaaaaaattatatacactaatatacgattatattacaaatgtattccgagcaatagtacagttatatcgattgtggtatttcgatagttctctatcgtgtaataaagctcttataaagtgtttactgagctattttatcctgggaacgacgagactgatagtctacttacacagttctagacagtgccgcgaacgttttaaaaaaagtgacctaattcgcaactcaacctagacttttaaaaactcgttccttttattttctgtagccaaaataaaagtatctctgagtaaaatgtttccccaatctctgttgatatcttggaatgatttgcatattatattactaagatttcatgctatattactaagtagtttcattgattttcttatgtcgtaaggtaagttttagttgttgattcgatatggtactgtgatatacatattttataaacaacaattaaggaactgccttagaagcatctctgttttggtatcacaatgcctcattgtttctaaagtgacaaccaaatatcataataacattgagaataaaactaagatcaatctattagatgtcacatacatagactttatgtgtccatagaaaagatagtattttaaaaggaaacttacaaaaatattgaaatttgggttaacttttacaaaaatactgtcacacgaaaatcttttcaaaaatactgtgtttttnnaaaacactagtagaacacaaaacagaacaactcaaaacaacaataaaataactaaaaaacactagtagaacaacagtgaaaattcaacacagtatactgtagtatgaaacttatataaaaaaaaaacacagttaaaaagtaaaaaataccacttggcagtatttttgtaaaaaannngcaaaagttagtataccatgtaaacttcccattttaaaagcatacaacaacaactcggcccaactagactaaagtcaaaagtaaagtctcacaaggttttatacagctcagcccaataacaaagaagaccatcccaaaagatgtaaccctaattatcaaaccctaataaaaaaagggtaggagcagtaagaatcaaaccctaacacctctcctcttcactttcgctcttcttcttttcttctaaagaatagcagctgcggttccaagtttttcttttcttctaaaagtagctgcccaacacttgggttcttagtcttcttctttctttctattagcagttagggttcttagattatagggttctaatcttttcgttcttcttccctatttcacagccggataaagctatattctaaacccaaaaatctattatctcatctctctcaactctctcggtccaaacacaaacacacaaacacttggacccagagaaaactcacacactcaagaactcgagctctaacccaaacactcaaacttgaaccatgttccaaaccgaaaaactcatgtggtttagttcctccaaatgaaaaggtctccacaaacattatttctaggaaattgttcactcgttgttgtccatcttggaaggagttgtgtggaatgataattgagttcggaaggaagttctcgaatgactatcatgtccattccaggttcagtcctcaggataactagctcttctctagaaaggagttccagctggctagttatctttcctggaatagtagttccagatagctgactttgtagtcttacatcctatctggaagcgtcttcagcaagggtccatggtcttcgagcccgaaagctcgttcatgatcttggaggccctgatgcttatgttgacgtggagacttcgctaaatgaggagttggttgagttagtattttctaactaacttaacaacctcgtttcttgtagacgctgactttaggatcttgatcctaagcctataaaaaccaccttggctcaacttttgaagacacaattgagatacaagtttgagaactctgttcagaggagattgagagagaaaagattaagaggtagagagagaggtgcaatctcccacttgccctaaaagcaagatggccatctcatgtagtcccatattattaccataaaagattttgctggtagcatctttgtgaatggatctgccaagttttattctgatgcaatctctaagactgtcacatcacctctctctattgtattccttagtagatgatacttcctctcaatgtgcttacttttcttgtggctccttggttccttggagttgtccaccgctccactattgttacagtaaagcaccagtagttttttacttctagaactacttccagagcagtgttgaattttttcaaccaaactgcttccttagttgcttcaaaagctactatatattcgacttccatggttgaatctacaatagtactagtttgtttaatgcttcttcagactatagctcctccacccagagtaaatactaacccagatgtcaacttttgactatttttgtttgattgaaaatcagaatcggtgtatccagtatgatttaactctccaccggaatatacaagcattagatctctcggtctctgaagatatttcagaatgtgctttacaactattcatgttccaaacctggattagattgataacaactaacaatcactatatcgtagcatatgtcaggccttgtacataatattgcatacgttaagctcacaactgttgatgcataagagtactttctcatgtcctctccttcttaaggagtctttgaacattgatccttacataaaataattccatgtctagacggtaattttcctttcttggaattctccattgagaatctttctagcaccttatcaatataagttgcttgagaaagtgctaatgttcttcgctttctatctctatagacttttgtcccgaaaacatagtttgttcctcgcaaatccttcatttggaatttattggctaaacacttctttacatctgataacctttctacattgttttcaataaatagaatgtcatcaacataaagaactaggaataccactacattacctttaatgtatttttatacacaggtttcttcattttgttcgaagccatactcttcaatagttttattaaacgtgatactccatgatctagaggctttattcaatccataaaatggatttaagcaacttgcagacatttcgatctttccttggtaatacatactctgctggttgttccatataaatgacttcattaagattgccatttagaaagaagaaggagaatggatatgaatattgccacaggagagaaagtttcgtcatagtcgataccttctcgttgtttgtctaccttgttatcacttgtgacttgtacttcagtatttttttttttttgaaacatacttcagtgtttgattaattgaaagttatttttttttaaaaaaaaaataaataaattaataaaaaatacaatagaaaggttaaagatagaaaataaaaacactcacttttaatgaattaatagctgccgctgtaaaaattattagtaatttcttttccgtattaattagatttgcatatggttggagtcttggagaatatcctcatatcatattgtttttcaaaaaaattagtattatatattcgtatatgtattactgttggagtaaacctccacttacactgata

SEQ ID NO: 16949 - DNA, 8200 bp, Cannabis sativa
  modified_base (81)..(82): a, c, t, g, unknown or other
  modified_base (1744)..(1748): a, c, t, g, unknown or other
taagaactgataataaattactaacattattttttaaaataaataaatataaattaaccaattttttttttttaaaaaaannaaaaaaaaaaaaaaaacaataaccactctagaagttcagattttacaaatataaaagataatgttcccaaatattatcagcttaattagcaaaattataggttgaccacataaataatagcactagttactctcatgtaaggttttcctttttctagagacccaactaatgataaagaaaaaaaaaaaaaaaaagacaaaaatacacttgtaaattttaaaattacaaacatacaactttgctcagcaaaaaaataaaaataacaagaaatcaatctcatgaaaaaaaaaaaaaatcaattatatataaactataaaataacctcataacaactataatacaactataaaaaaactataaaataaccaaaaaaacagttaatattattactgaagtggtatttttgtaaattaaaaagttcaacgagaaaatgaagttttttaccgtgttgatttatatttgtaaattttgtcatttatgtaaaattttcaagaaaaaagcttataaaccaacaacatcatcatcaaagtcaaaatgataaaatggaaccactcaatagactcattccagctttacccgatccatatcattgatcaccccttcaagcttgacagctcttcgttaatcatcacaatgaaaccaatttaacaatttcatgaaaccttttcacataaaattcattgcgggaacacccttctaagtttccacatttatagaaatgcatttctgtttgtgaaatttgcttctagtcaggcctatggtttattcaaataagatttaatactggagtccctcttgagttcctacatagcaattgcaaaaaattcttgttccccaaatatataggattagactaggcgtctagttataaaaaaaattgagctctgagcttaactcttaacattttttaaatacataagctatagcaactgctgagtacccaggagagactggaatgcatgcaaaatcaacacattaaaaacctaggtagcccgatcaaaagttaatgatcctgacaaaacataccagcattaacaacttattggcaccatctgaaatagcagcaaggctgtcatattgatcaggatcaaactcattcaaagcagcagtaagatattctcctgctggggtggtttttctctcaggatccactttaaccaaagcaactgtaccatcagttttctcaccagttaatggggatgtagcagtatcaattgaacgacttttattatcatttctgtataatttggaaaacagtagctcagttgaatagccaagttaaaatttggaacaaaataaaaagggcaaaaataaattaaaccaatattaaatcagtaccttccagggtcctgaggctgcacatttaccagtcctttggagaatggggttgacagctaaaataaatgaaagtgaagtcaggaatctgaatgacttatgcaaaccaaataaaccagtggctcaaaagtactaccaaatattaatgtaagcaaaacaaaaattgaagtaaaatcaatataatatatatatatatatgtttcttcaacaggataacagggaagagatttcacctgtggtgattcagacagagatgctttctccgtcaatctgtcaaacaatttctcattttcttcatgcaatctctggagagagagagagagagannnnnagagagagagagagagaaacaaattagttatctattcaacaaagatctgtgcatgaactgatatgatattacagcattttggcaaattggttcagatttttcaggtaagagaactgtcataaacgcatgtcaaagggtaaaagaaaaaatgttagacatccagtagttcagaatgtgaatgattgttacgtgaaatctctgtctgaatcaccacaggtgaaatctcatacatatcataatttatattaaaaccctaggcaagtactagataaattaacactagtagtacaagttagatatatttttccagtccacttacagccatgttgatcaaactaaaacaactatagcaaaaactaggcaatgatcagatttcatggatatcctatataagtcaaagttgcaaaaataagaacttgaaatacgtaaatcatcgaaagaacatgaaaggtataagaaccactaaagtactaaagaaacaaggcaaaaagtactaactcatcagctaatccaaaaagtcaaaaactaagcgataagagttttgtgaaatcttctacaatattaatgggtgatatttttgaacttcttgtagacaagaaactatagcaatggctatacccaggagaaatttgaacataaaactatgtgggagcaaaccacgaactgtatgtctgatcatttgagccacttgggtgtactacaaatattgttcttttaagatgctatgagcagaaatgcagtttaagaaggcaaggtgtccaaaattataaatatccatcaatcaaatgatcataattatggaggaacattttactatttagaaagagtcatcaatgaggtacaacatagagatatagcacaagaataggaaaatagcccatgcctcaatcaatgcatcacgttttttgagttcctcttccaatttcctagttactgtagaagaatccacactctctccagtttccttagaaattgatgaagctctagtccctgattcagagctgaatgtagatcgagcttcattgagatgggattcaaggcttttaattttggcctacacagaattttcaaactaagaataatgaaatgatttcagaaattatgtcaaataacagtcataaaccaactactggttcaaacgtccatcagatacccatattcttacctgttgattttagttgcattggaaaaaaatagatatggatgcaattaataatcatcactttttgtaattttaattatgttaatattttggtcaatagctaaatcacattgcaacacatagacaaatagcaacctgtaatgtctggacagttgaatctcgatgttgtatctgcaatttctgctcttgctccaattgtaaaagttgagcaacttgatttcgtagctgagcattttgttctttctcgattttatgcttatctgcaagcatattactctctgactgcatcaagtaacaataacaagagtcatagggctacatagttaatcaaggagaaattaatacatcattcatcatcatacacagttacacctctcaaagtaagagcagaactacaatactgtgagaaactaggtaaatgcttggattgcatgccaatggcaaacaaaattattttgtgaactctgtttacatgaaaacttgctaaaaaccaaattattattgttcaaaatctcaataattttcgagtacataagaatatattgaaaatagacggaatacattcctgaggacattccatgacaaatgaacaaaacgtttaattattgttcatgaaatccagttagctctaaaaaatgagcacatgttcaccaattcagagttcttgaaaatacattaccacaccaaaagaatgacaaaaccagaaaaggataactttgtggacaataataaaatctcattctcttcaatttatacatttaacaccaatcacttcacaactattacaggaaagaacaatcaagtgatactaaaaatgttaaaaaaaaaaaaaaaaataggagaaaatatgtcgtaacagaagtcaatagaaaagtaatacatagagtcacaaacctttaaatccgactgcattgtttgagaaactttccatgccttctgaacctcattaaagagtaaaatacattgatcattcgcatcctttagtgcatgtttaagacccaaaacttcctgcttcaagtcttggatttccttctccttgtcatataactctttgcgtgcatcatttgcctgcaaaagccatttaaggggtcttcaatcaacagttgatattaataaaaaattaacctatacaaatgaaagtaattcctaattacttcaagagaatggataattttatgtcagctctaggattaaacataaaacagctatctctattctcaatacatcatcttttcttctctgtgctgctacagttttggtaactaagttcatattactgtccctaaagtacagcatttaaaagccaccggccattcccacctagtcaccccagcaaaaactagactgcacttgttgaatgcctgctttcaagttcttctacaaagtagaaacaattcaagttaaaaaagatcaaaacaaacttactatatctctccatttcttaattgtatcacgatttccaaggcttaggactgcatttcgagctcttgcaccgaaattaagtgacgatattgtctccttcaaattcaaagcatttggacagacattaagcatcatcaaagtttttgaagtcccacctataggaaagaaatagaacaatgacacatcggatatagtttacctcaaaattcatagaaaatgaaaactagaataacatatcaaatgtactgattctccaaaaaaataaatttcatatatatatatatatgttatttccatcttgatcttgaaaaactcattatgattggtggaatacctagggagtctgcaagcactttagttagcattgaattctcgtaaggaataatatccttttttgaagtcaaagaagccaaaacatcacccaatctacaagaaaaaagttaagtggtaaggtcaatgaacgaatggatagcgagagtgcattgagaaaaagtaagattccggacacagatgttatttatgatttaatgcatcacacaaaaaaatcaataaatgagtgaaaggacagcttcatgccatccagcatacacaaatgtcataactcaacaacttagttatagtcatatttgccaaaactgcaaatagttctaactacatgaaactgctgacaaatcaaaataaccataatgataaatccatatcgggcaaagagaaaacaattcagttgtcaaaaaaaaaaagttattcataagattttagtaataataacaccaagaggaggctaaaatggtaacgtgtgtgacttgctcttacatagttggagttcaagttcctcaaatattgtagtgtagggttgagcgaagtgtctagtttcacaaaatatatactaagtcacaaaccagcaagcatgcaaacaaaaaatccagtaataataagacaataaaatgataggataatgaaagaaaactgatttagcgaatgcaacatacgctgaaagtgatttcatgacatgcagcaagtccgtcactcgctcaccactttcatcctctgcaatagaaccttcacttccagccaagtcaacaagagacagcttgctatatgagttttctccagtgattaaattgttatagtatatgtgcaaagtaagaatcctgtcaaaaaaaaaaaagaatacacttaataaaacaaaaacaacagtaacacagaaactaacatggatcaattttttttaacaataaaatgaaccaaatctttaaaaaattactgtagcttttttatgagtttatacttggaattactgtcataaatgcagctagtatcctatttttcctctctatattggtgggctacccaaaaccgcattcttaagttccattttataaaagcttaatgaacataataaatttcttttaggagttcaatattgagaatgcattatgacaacagatattgagaatgcatcataacaacagatattaagaatgtgttatgacagcagatatcttagaatggtacaagattttggtggagaagaaatgaataggtttcatggttattataccacaaaagcagaacatgtgaggtgctagcttagcaataaatgttttttaaatcagttgcgtacattcatataaatatatatatataaaagactaaaagccacttttaagaaattccaaagaagtaacgaaacgatataattcatgtatatgtactattgctccacctacagtcatagagatcaatctttcacgggctaaccacagtattggaattcaaattgccttaagtatttgtgcaatcaaaaagcccaaataaaaaagaaaaagaaaccacttaaaagaactttagtatgaaaaatacaaaaataataatgatcacttaagatatattttgaggcacataatgttggtcttacaaatgagacacggtgaactttgctacatcattccctcggttctgaaatgcagtttttaggactctagagaagtccaatggattatcaactgtttcttgcacaagttctacaaaagattcaggagatcccaatcgcacctttggtaaggcacctcccaactctgagagcagatccctcatctactacaacattaaaaaatttagcaacaatttgtgatgattccatgctcaaaaattcattaaaaattgaataaaaattatgaataaaaggacctgttcgttgtagagctcagcaactgtaaccgagaatttaaatctagaagtagaagttgaatcagagttggctaaatcaaacagctcctcaaagcaacgagcatataaaccacggtcatgactagatccttcctgaaaattgttaaaaggaatatatcacagacaatgagatttacatttgtggagaaacatggtcgggtgaattatccatgctataaagaaatatcaatgaacctacaaacatgcttaagacacaagaatataacatataattagaactgtatataagagaacacattaagagtactagcagtaaaagaaaaatcaatgaaccaattacatacttgaaacacatttcaatcaatttaagcgccaagaatgaaatatcctcaaaacaataatgaagaaaattacaaagtgtcttcaaaaatcacttattctagcatagcatctgcttgcatcgactttgtatttgcataaatgtattaaacacaaaaacagataggtcaaaagggatcaattgaaagagtagggtaatttaccatagtatgcgtctttcctgagtacgtttgtccataagcaaatattgaaatgttatatccatccaaagctgattgtaccaatggctgaacatcactgaagagctcagctgcaaatatgtgaataacacaagcacaatatcagagtaaatagaaaagtagtaattcataagaggagaaaaggaaataataataataatgttagaatattagctgtaaaaattaggagaaattgtatttagtagattcttatatagtctcctagctttgtgtataaatatagctattctatggaatagaatacacaattcaatcaccatattttacatggtaccagagctgattgtgggattgagaatttgaaattagggtttatcacaaatttgggtttttcaattggggttctttttcgaaaacatatttagcgggatctcttgttcttgttgcaaatggtacttgagttttagttaatttaccttcagaaaaacggatcatagagtgcaaataagtgtttacagttaaattcaattaagatgaaacaattcctcatttaaatgttcgtcttgttgccaagggttatgctcaaatctatggagtgaactattgtgatactttttctcctgttgttaaactcacatctgttcaactgttcatttccatggcagctactcatcattggtctttgcatcagcttgatattgaaaatgattttcttcatggagatcttaaggaagaaatgtatatggagcaacctcctaggttcgttgctcagggggagttagggcgagtttgtcgtcttcgtaaatctttatatggattgaaacaaagtcctcatgtttggtttggtaaatttaatctggttgttgagaaatttgctttgatgaaaagtaagtcagatcattctgtgttttttaaaaaatcaacagctggtatcattttgttagtggtgtatgttgatgacatcgttattactagaaatgatactgaaggcatctcatcccttaagtctttcattcatatcacacaaaggatttaggggtacttaagtatttcttgggtattgaagttacttggagtaaacaagatatttttctgcctcaaaggaagtatgtacttaatttgttaactgagacaggaaa

SEQ ID NO: 16950 - DNA, 4804 bp, Cannabis sativa
caactcatcatcttatctttcatttcagtagtattcttattctaaataatcaagaagacaagaagaatccaagtccaaggcctggaaactgaaaagcgacaaaacaacaccctggaagtcaacctaggcacctagggttttcacccaacacctaggttgacatcccaaactagggtttcatttttcgggtccatcatagtgcaaatggcttaaactttatacttaagcatgaataatgacatatttgaagcaccgaaatcagaattagaacagttacatttttttagcatctgaggcatcaggtgcctagggcacttccaatcacaatattgaagaagtatcttgagcattttatatgtctccatccaaaacgaggaaacaagtgctttcgagaaagaaacaaatcaacttggaggccaaagtagggacctagcaccaaggttgacacttcgtcaacctaggcgatttccaacaacaattcaaaagaagtcttccagatatattcttcgttttcgtcactaattaagatgtgggtacttttggggaacaaatgaagtcatctgggagccagaactgagactcagagcccaggttgacctaggtgctaggccaagtgcccaggttgacatattgtcaacctaggccatttctaatcaacttttttgagaagtctttcaggcatattctctattttgtgaataactaagatatgagtgtttccaagaatcgaacagaaccatctggcggcaaaaagcttgacctagcgcccaagttgacactggtgccaagaaaaattaataaaatatggatacgacttgtgatagtaagagtctcatgatccgtaaggggaaagaccaagtaaattgtgcaattccacatcatatagagaaagtcaagtgtgatgattctaaaattgtgcagatatatgaccacacacttgaaggtgacttaaatgaattgatagatactacctatatcaacaaaatggctatttttttggtagtccatcacttaagaactccaaagttaaacgtgcttgacctgaagcaattttaaaatgagtaacttcctgaccagtcagcattttagaaaacagtcaaaataacgtacatgtgatatcatgcacgtatgggactatatagctgaatcgggtgcataatattaacttagtgttcatagcaaactcgcatgtagtgatccaaattatcaacagtacacatgaattaatacaattaattacaaattttagtaaaattattgttgagtgctctcagttgcggctatttctgctttccaccactgcctagataatagtatatcagtcatgttttgtttcagaaggatgtgctcactaataggtgttggtctagtttatatcagtgcttgaaacgaaaaccaaacaatgttatatcagtaatttctctttttcatttgccaatgatccaagtcaacaactaattctaaggaacattaaaacagcttttgcacaattttactttgttgacaaggaaaggttgcatctaaactcttctattagagtggttgtgaatggcagcgccattgttttgaccaacttttcctctcattaagttgggctgattctccaaaccccatattcgaattgtccgatcatcactggctgaagccaacatttgaagatttgcagggctccagctcacacagtttactgctccagaatggccaggcaatgacattatcagctcccccgagtccctgtgccatatgtacacctgcagccacacaatataatttagccatctaataacttagggaagttcaggtagtgaatttatttatagcagatttatcaatttacattttaagttaatttctcatttaacaatgtgttttaaataaagagtacctgggaatcttcactgccacttgctacaaacacttgctcaagtccaccgaaacaagatcggatgatgaaccgagtacgcttatgacctttgtacttggccaaaatcttaatttcaccatccaagttccaaagatgaatttcttggtttatgagactgaccaataggaacttgttgtccttggatagtgagaatgaagtgattacttcctcctcttcaatcagcctctcataattggcctccctatcaagtagtagtatggcagtttgtctgcatatgcttatgatcttctttccatcaccggttacagccatgtctgatatttttagggtccgttggcctttccaacactccagctcttttccatctaaatcccacaagcaaatactcttgtcagtcatcccagagaatatcccttgaccattcgcaaaccatccacatgagaccaggccaatgccattcttttcataaacatggaggcaatcaccagaagttacatcccagcgcctcacgacctcctccagtccacatgtcagcagctgatggtcatcaggactccatgaaacaatggacactggtttccggtgaccagttaatacatgttttaatgacatttgaccatcttctttaacctattaaataaataactcaaaatcatatagattacaatatcttgaatagttttagcatgtctagctagtgttgactaatacactatactgcaaaccaatgaagtttaagcatgacttactaacattacatgatattaatatgccatgatccttcacttgattgtgataaacaaattttagttatggtagtaataccttaaatctatagtccccttcttattataaattatttagaattttcttgaaaaaaaaaataattaccaaaacgttccatatacacaagaacttctgaaagacaatctacatattagtcaaaatattaagtacgcaagactaatgaagagggaacatggaacattcattcttctacatataattaaaggcaattctaaaacaatacctcccatataattgctgactgatcctttgatgatgaagctaaatatttgccactgtgtgaaaactggagaaaccatacttcatcactatgtgctcgcagtacctgttacataagataagaaaataatgtagctttgtaaatctaaacaaaaacaaaaacaaggggccacaaacagagaacaaaacaatctgccaagtatgttactagaaggagataccaacagcagaataaattactgaccaagaaaatcttggctgtttttcaattgatagttattatgcagtgtgtttatgttatcacgaaaacaatactgtccaaacagaaaaaagatactttcaaaggaatcaaatgaatagtctgtcacatatttctccccctatcatgagtgctgcaacaaatcttaacaagctctaaattgtaagttccacaattgctgggcccaaacacaacttagatggtgagcaaatttctacagatgtaatgtaataatagataaattatatactttaaagaaacactcacctgcaatgtttgatttggaatcttatttttcccacaatgatgattagaatacaaagaaagttcacttgtcgatgtattatgaaattcacaagcatcacattgaacatcaagagcctgttcaacaagatattccaaccttctgtcaggtaccatgactgctgcaggaagcaacttctgcagtttttctagcaattttgatctagactttgcaacttctgcatcttggctcaaaagacaaagtgataaacctgaaaaaggagcgacaatgcacgcggcaagctcgtgaacccgactaatgttgatatgaataggcacaagctcatttcttagtgtacctaaagcaccatccaaattcccaattttaagaagctcaaggaacttctgttcctttattaaaaaagttgctaatttgaaagtattttcatctatgaggtcaattttttgcaatgtggctaaactatcatcccacattccatcaacaacttgctgcataaactcattaacaaacagtgagtgcaatggtatgcccgactcatcctcaagaatggcaccagttttagtatatttgagtgagtacaatgcctttgttatgattttgacaaactctgtttttcttatgattccatttgagccaagcatttcttcatcgccttgggagagaatagatttagccatcaagtctcccaaagagtaagcaatagaactttttcgactcgaatcttctaagaagatcttcggttcttccaatggatattttacacgtttcaaaggtggatcagtgtcctccatacctcccatgaaataccaaactccatgagttttctacaagttgaaagcaaacaattaataatgaattcaactggagatgtaaaactaaagaacaaaatttaagagaaaggcttaacaaaattaaagaacaaattaaaatgaaattatcagagaaaattgtatcttatgcaacagctagtcagagggaaaagcttaacaaatatccagcaaacaaaaggacttgactacaaaaatgggaagaaaaataaatgacaagcggattgaatgaacaaattttcaaacaagtgaagaaaggaaattactagcaactaataattttatatcaaaacaagaaactatcaaggtgggcaatattttcccatcctgtcattgtaatggaaggaatgaaatggtgatcaatcacccatgatctcttctttgaccaaaattgagggtataatttacttaacaatgaattatataaccacaacaaatccacattgcaagaatttgaaacatggaataaaatgcataaccaagagaattgtttgaccttggtgatcacactaaatgaagctaagagaagtatataatgtcaa

SEQ ID NO: 16951 - DNA, 4018 bp, Cannabis sativa
aaaaggaatacaaattaatttaaactaagagggagatgctcaaactttttacaaagtaactcaatttttggcacttgggatgggagagtcttctagtgtgtgatatgaagagagccccatatgggatatgaaaattaatttataagggtatataaggtgcaattttagtacttagaataaggattgaaggggcattcaattttatgtaaatgagtatggacacacattttacctatcacacacgcgccatgagttgagaaacgtttttgattaatattttgaatatttaatcttattagttttatgggacaagttcaataactcttacgattcagtttctctaaaaagaattacatagtgcagtggcgattcgatataatatatgattggactgttttataacttcttgtatatttctttacagttctaccaacgtcttaaagagagcaatctaatccaagacttaactctaaaaaatttattccattttcttattttattttcaggagtagtgtttacaacaagagagagaacttttccaatttaagtattacaaaatcaattaagaaaaagaaaaggagaaaagaagatacacaaacaatatcaaagtcacctgtgatggtgacctacctaaaagctcccctggtgcaccacagctcactcaaaagaaaagagaaacatatagaatttatatattatatatataggagaaatggaacactgtcaaaggcgcaaattgaggaatctaaacatgattgaattgtatgtataaaggctttttagccactggtgctgatgattgtgatgagagaagcttttttataattcctcatcattttttcaagattcaaagcacaccctctctctctctctcttttttctcctttttctccatacccacttctccaaattctaaaacaccaaaaaacccactttcaaaaaccatgcaactacactcccaatcccatagtagaaaagctcaaaagtcagaacttttgcccatcaaaacatagtccagtgctcaagagaaccttcaaatttttcatggtttggttttggtcgagtttttgagccaccttctacaaacaatgttggataccatgatcccttcttgttttagccagccaaacacaccaacatcctcaaccacaacatcttctcatgtgcctaatcagaacctcataacatgtatataccaaactcaactgtgtaattctccaacttacttgactctcacttggtcaaaatctacgttcactcactctctcaccatctacgcccctgacttattctccatcaccatacctcttcagccatcgactttctccttattcggagcccgacccggatccaaatccatctacttgacccaccaacattcccaaaaaatcaagctttattgggatttcactagagcagagttcgccaccaactcggccgagccagactcttctttctacgtcgctattacctgcaacgccaagctggaattcttcctcggcgatctccttgacgagttgactcagcgctcggggctcgtaactcggactcaggtactgcccatcatacctgctctgctttccagacgagagcacgtgtttggacgcaggaattacgcgtcccgggcaatgtttttggggtccaaacacgagattggaatagagtgcggtggaggaacgctcaaagtcaaagtcgacggtgaaacaagcctcgtcgttaaaagactcgcctggaaattcagggggaacgagaaaatctacgtgggtggaatcgaagtcgagttcttttgggatgttttcaattgggttagtaacggtaataacggtaacggacatggggtttttgtcttccaagttggtgatggtggggtttggccggaaatggtgggcccggaaaagaggctgttgaggaagagcttgtcgtcggcaactgctccggcgggtagctctgcttcaatggcggcttcctcttcgaattcgccgtcttgttcgagtgtgcttcaatgggctgaagagagtagcgatggaggaagaagttcatcttcttcttctactagatcatgtagtactggtagtaatggcggtttttctttgttgctttacgcttggaggaaagattgattaaaaaacaaaaaaaaaaactttaattttgtgaaaatatatggtaattattaattgtttattctattaatttgataaaatgattatatgaaatttttgttactaattactgctcgttttgcaaattatctacattattattactagtgattacaattttgttcccagactacactatttttttgttttttctatgtctttccagtttttaaaaataatctttttctttttctaaaaaagaataaatagaaaagtcgactttaaagtaagtcttaataaaaggattattatgcttaatttattttttcttcaaagagctttaaactaaagctaatttattgaatcttttgaagcttgatttgtggatcggagtctcacttttaccatgcattaatctatagaatcccccttttttttctttccaaaataaacagatttagagacttaagaacgaatggtattggatttcaaaaaaaaaaaaaaaaaacaaaaacgaatgattatggtattggtatgtatgttcaacaataatgtcttcgctttagctttatatataattatactaacttatatattctgcatgataacttgtctggaatttttgttgggtgccagccttaagataaggttcgtttgaaagctttcatgatttgaatatgaatacatcatatataaatataataaatagtccttaacattgatacattacattaacatttataatatatattttttactaggataataattctctaaaacatatgaattcagttagaagtactttgatttttgtcaaaaagtaggatattaggatttctagtgactatttttgttgcaataaaagtatttcgcttttccttttgcctttgaattagcagattttctacccttattagctatgttaacagctttaagaggttttttgttgttgttccacttctttttcttgttgggttttaaagtagaggcaatatttgtctcaggtttcaccataccaatcgtagcattactagaacttggagctttattatctcccttctgtggacctccaatcaaactctcaaaagtctgaaggttgttgatttactcataaaagtcaaaagtcaacttgttcatgacgtagtttgaagtaaagggcagaaaagctggagctaaactattcaagatcaaactcacttgagtctcttaatcaatgacagttccatacatctcaacttcttagaaataactagccatcaggagtaggtcttcacatacattctgatgaggtttcatccatgcattgatgaagtttttggtcgcatcaaaacgagcttgattcgatgccttccaaaattgttcagtatactggttcatgatctcagcatctatgagagtgttggcaaaccttgttttcaaggtctcaaccatgctagacagcataaagaaacgggctttgttgttagcattctaccaacgctcaaacttgtctcttactgtcttagttgcattctcatctgcttgctcaggagcttcctcagttaacacaaacagtgaattctcacctatgagagcaatattaatgttctctttccatttaacaaagttagctccagagagcttgttgtcaatcaacagagacacaattgagttgttcatagtcatgttggaaactacaattatcaattaatagaaatcaattataagtttatagaaattcatacacatatttaaaaattagtaaatatttaactagtaatcaagacatgtgaaaatacaaaataaacacatcttgaataatttctaaggttttaaactagatgatataaatgtcccatttaggcaagagtcaaatatatcattagttaaatagagttgtcagctcatctaaaatagacactattttagcaaccttttat

SEQ ID NO: 16952 - DNA, 7271 bp, Cannabis sativa
  modified_base (6830)..(6830): a, c, t, g, unknown or other
  modified_base (7200)..(7233): a, c, t, g, unknown or other
ataaaagtctttaaatctaacaatctcaatagttcaaggaaaatttttaacagcaaaaaaagttcagtcatgtcaaaattcggggaaaaaaatctaattagccttatataaatgaagtaaactaatctcttttttgtttttgataaaaaataaacaaatcttaaaatggcatgccaagacatggaattgtatgaaacaaaaagattaataaactagaaaaaggaaaaaataaaataaaaaaatcaagtattttgaaaaggcgtcattagtgacgagtgatggcaacaaattccataggagacaggttgggctcctgcgtgcggacagaagttaatgcacaacttcttttctcttattttatagctaatattgaaatatacattgacaacaccaagaagaagatttctctttatgaccaagttgttagttattatcctttggggtcctcaaattatatcatcaaaatgattcctaggacactttgatgaatgatactacatcttcatttttcttttaatacatgtcttttaaacagctaattacagatcacaaactagtaagcacgctatattggtggatcaaagcaatgaattagctggccactattgactaataactatactttttgcttctattggaaagaaattaaggtccataggtatacccaacattccccaaaaagttaaggtctgcttttggttaaaaatacttggactattggatgatttatatagtggaaactttaagataggaaaagatatagtatcatataggataaataagtcctaaagaccaaggaaataaactaaagcagtagtgtgacaggctttaacatagaatattaacgaataatagcgccttgcattggcttgcctagttgcctctgatcaatttggcacattgagttctaaaaaaaaaaataggcaacaaatgccaagggagtattttttttttttttttatcaacatgccaagagagttgtaactatgtgattcaacattaggaaaatgtctaggtcagcataagatattttgccagtaaggtgaataaaggtacttataagatagtaaaattatcttaatcatctcaatatagataagcaaaaacaggatgtcgcttttgtaaatttcatttctgcaaaggaaaaaaaaagtcactacaggtagcatctaaagctacagcctcccttttttcttttttttcttttttttttttttttatatattgcaccaatgaagttagtttaggaaatctgatggagtccacaacaaactatctccaattaacctgcaccaacattattgatttttatttgatcagtacaactgtctaaaaggaatttacaaagatgcaacgtagaaacagagatacaaaaatcaatgattctccctcagcccataatttacatagactattaatactatatctttcatttgttagtttgagtggaatattgtactaaatccttgtacaccaatcagacttgcattggcttaaatcttttcaagctttgttcaaagcagctaacctatatgaaaaatagttcggaagaagtgtatggtctacgtacctcttgctttcgcattctttaagcagtttggaaacagcagaagtcttcattttcctgctttactggtataaaatttctctgatgttccaccctttgaagatgggatgacaattgaagcaaatcgaccgttgattcatgttcaggcgaaagagaatacttggtatcaaaacagtcagaatttcgcgaactcctatctgcagcttcaaagtcagcagcgtgattggattcagtaaacactgcagattcaaactggtctactcccatggaattcgtcccgcaagaatagaatccattttgtccatgcctttccattgatcttaacctcagaggtttttctgaaagttgaccagctgtttgatgggcacctggaataatcatgggactttcgtttggaattcctgctgagtggcttgagaagttgtgtgattgaactgacagaagagagagagcacaagcggagtttgaggccccatatggtttgtgaatggttgctgctgtatgaaaactatagtcgtcattttccaatgaaggaactccagaagaatgaggatggattaaagatttcgaaaacatttgggtactcttgacaggtgctgttaactggggactgtaaataggctcctcttcaaacttgatgtgtccaaactggttagcttgttcgtatttttcaggagacagaatgacacctggaagtatatcagaaaatacaaacggtgttcgcttttgcaaggacgctccaagatatctggtgcctgctgcagccagaaatgttagaaaatggcatccctttcaggggaggccaaaaagaggtatagttattagaagcacataaatgcaactaattaagaaacagtcaacccaaggaggaaagccagcaactcaatcttcaaaaaactattgaaaacatagaaaaatagctcattacaaatgaagggtggagatgaaataaagtagctccaactacaggtttaatcttaaactcaaacaatccttctcttcccatctacttttagcattatatgagcacgactttttgctttaagcaaaaaagcttgtccataatattgataaaaaccatagcaaaatgcatggctcattagacatgcaacctttaaactgctccgcactcttatattttacaacttccacaattatattcatgataaatcaattattagagagccggaaaggaactccaatggtggctgatgtggccactaacttttctctgtaatagaaggaaagtctctagtgtatgttagtgactttctaatttaaggtaggtagcaagttatattcaagcaaaaataaaaagtgtcaatagtaatactaataatcatctcccccacctcttctcaatgtccctttaacttatgaaatcaatttaggattgttaatacaaaaaatgaaaaaatatgtattttatgtggggcttggcttaccactcaccagtcaagttctacttgaattaagtaatgcacaaaaataagtgatatgactggtctaagatttggcaatcttagaatgtcacccagttcattttctccactaaacaattatcacattcattagctaaggagtattcagtccacacaatgccacatcacaatcccattgagaatgtattaataaaaaatatgaagcatttgtaaaatacagagctatatggcaaggatattgacattagtacaaaagcagtgaagtcttcctgagctaggtaggacttataacaatgatcagaaataaaaaccagagttcagagttgaaatgccgatattaaattatagtaccaaatttaataaaaatggaagttgtcagtatgcaggtgataaatgaactgtaataacttttagaagtgttttcgagaaagggacatgagtctatcaagtgggaacaagcaacactcataccttgataagcatttgaaaacttatgtggtttgtcagagagaccatccaattgaggcttccttcgacgttcattatgccctgctaagcgcctacggcaactgcgcttgccatcatcaaattctgctagtagatgaaacctaatttacagaaaaatcatataaatgcttaatatactgaactcaggcatacaatgaactttgaatgagaaagctttatatagcatcttaacacaagtagacttcttaaattgccaatcagaaaagaaaaaagaaaagattacacagcacagaagcagcagatgaagatgcctttatacaatacaacccaaccaaccaaccgacacaggtagacttattatatcatggtaaactgaaatgattcaatctaaagagtttcatacaactactacaccttctcatagtttatttaagccttagcaaatcatgatctcataaagaaaggactcaaatttcaatcagcaatgaaaagaaaaaacatttcatttattccatcgtctaatccttggtgcattgaagtgggaaagggttaaatggaatattttcaactttttgtacacaactattcaaagtttccactttttctgggattttaaataattcaccctaaagggaagtcaatctcttgctgctcatggtaaacaggtcaaaataaccttgaaaggaacattcttgcggaatcatcctagatacatatataaatatgtaaacataatgaaactatgataagccaaaataaggggatgattataacaatagaaaattaaaagaataaaaaataaatatgtcaagagagagagagagcgagagacctgctgcactgctggcaaaacctttgctcgatgccattaacaatgactttggaggtcttggagtgaacatcacaaactttatgcttcttatggtaatcttttgaggtactaagatccatattacaaccatgaacttgacaaaagggagtttgagaatatgaaccccttacccgggctctcttgacaaccaaggaaggagatgaaactgtcttatcttttgaatgttcattgttctgtgagtttctacaatcaccgaacctacctagcttcaaagcaatcaatggtgaatcttggctattagattccataaaagagctcgaaaccttagagtttgaaccagattcatcttcaacaagtgatgagttgggtgaaatcaagcaagcaggagaggctgctctgtgaatggagccattacccacctcaccaccaccaccacataacatttccagtccttggctattctgaatagtttttctcaacatctcagggaaacccaactccatgtattccaagctctccactgattctctaccaggaacgagcccattttcgcattgaattaacgcttttctgtttcttgaaaatgcatcagaccaatctatgtcgtcagaaaacaaaagggctttgccttccgcagcgaaattccaagactccattgatgtgtatcagaatcccaagttgcagagactaaggaaatcaatgacagaacacgcctatcaaccaagaaattcgaataagagaacctcagcgttactctaaaggaattaaatttaaagcaaagtacaaaacttgttttaaaaatatatatcaaaatcaggaaccaaaaacgcatgagtacatacgtgaaaatactacttatcataatatgtatgtgtatatatgggcacacacaaaaattagtaacagtcgtatatctacaaagactgaaagggaaaagaaaaacccataaatcatgaaattataaatgttccaaaatagacgaattgatgttccatctgatatgctactaacatgtcatatgtgggttaagtggcaattcaaagatagaacaaaaatgggtaaaaatcatgcttttattggcttaagagaaaccaaaaataataaatgaaagctttaaactttttttttcttcctatttgccaaaaagatttaaaaaataaaaataaaaataatgaacagaagaaaatgcatagttttttttttaataaataaaaaaaaaaaaagttatatcctttttggctagtcagctttccgagcaaacaaacagagcttaacatgtaaaacaagccgaaattttgaacacccaagcccagaaaaatggtgagacgaagagaaaggaaaaaaaagaacccatttacaataaaagaaatcacagaaaggaaaacccatttttcaattttctgaaatggaagtcaagatcacattgatagacacgcatacatacttggtttggttggtaagaaagtgcaggaaaataaaagcaatcgttttagcaggctttctcgggaacccaaagtgaagaactttaaaagaaaagggggtgagtgaaaatgaaatggaatgggggaggggaaggaagaaggtgatggtgggttttgattttgaagagcagaggtaactaaaaagtgagacaaggaaagagaaagtaggaaatagagtatagaatgggaatggaatggggttatttttgtgaggtcgaagcagatacactgtgactcctgtgatgagtcaacatgatttccactaccccctgtccaaaagcatgtccaggtcttttgtagcttttgagggactttttatgaaattccatttatggacacccactcccatctctctcttttccaacaaactacattttaattcaaatgttgaaatatactaactttttatctacttaataatagtaactatcattcataagcaatcatattcaatatcttttctataataattgttacaaggtactagtagtatctagcatttctcaacatgttgtattgtaattgaatagcgatactccctaaaagttataacattcaattatatgagatctgatatttaattggaccaatagtataacatataagaatgtgttaagtattactggtactttttagcatttctctttctataaactataaaatgctccgatttttatttttagctaacttatcttcaatatgcaactccctccctcatcacacttggctatacaaggctgctcgacaaaatctactacagtcaagatgagagctgaaaagtctctatccaaccagatgttcaaacacggatttgaggagtaagtattattccaaattttatccatctgacgtggtatgtccacgtaaaccaaaactaaggacgtgtggagtacagtcttgttaatagcaggacaaagtcttcttacaaggcatgacagaatcgtaaagcaacaagaaagaggagttaagcaagacattaagaagctgcacaaccatgttcggccggtcaaagagagtacatagtgttgggttttgtgccntaaataaaaccaatttcaatataattagatttactaactaataaagatcataaattgcttttatgttgcatggttcacatgatttatttcatgattaagtttaatgtataaattctattaagtttaatgataatatatgttcaaaagttttattcccatgatttgtttgtcagttcactggatttagactgacataatcggcgataaggtatacttacacattggataagtgttatgtaagaccatggtcctatatatctgagcttccaataagtagaccatggtccacatactagttgagacaacactactcgcagtacataaacttatattcatactcagttgtttgattttgattaatcaattatannnnnnnnnnnnnnnnnnnnnnnnnnnnnnnnnntttcactaagcaagggcaaaactgtaaagaaagagttt

SEQ ID NO: 16953 - DNA, 6408 bp, Cannabis sativa
  modified_base (46)..(53): a, c, t, g, unknown or other
aaaaataccatataaattggccaaacttaaatgtgccatatttatnnnnnnnncttttaaaatcccatactaagtgtaatttcctcaaaagagagagccagcccaatatacttcatgggccttctttcattttaatccaagcccaacataactggcatgtcgtttggattgagaagaggaaatacaaaacgacatgtcgtttaaaggaggggtagtttcggtatattcagtgaaactccctccctgtaagagagaaaagagagagagaaagagagagcagcatttaaagatttcaggggaagagaagaagaagaagaagagtaataaagtatataagtttttgggaaattgaagaagaagaagaagaagaagaagaaatcgtaagagatgggtagaagggcagacgaagaatacgactacttgttcaaggtagtattgattggagattcgggtgttggcaaatctaacctcctctcccgattcactcgcaatgaattctgcttggagtccaagtcaaccattggtgttgaattcgctaccagaactcttcaggtctcttccattcttccattctatttctttggatctgcctctctctctttttctttaactttctatttttaacaaaccttttttcttattattattatttggatctcaattctttgcttacttcatctcgttttctcgggatccaacccgcaatttatgtttttcttttttctttttgaatgatatgatcataacatttcatttctatgttaaagttttcttcttttgttaattatctcattttctcaatttttgatatggttgatttgtttattgtaattaatttctatttaaagattggaatttggatcccaaatcttggatttattatcttgcattcaaatacaagtctaattatgaaagagataatccagccattgatctgtgttttcataattggcctctgtcaatttcattaaatgggcaaagttttgaacgaggatatgtgattgtctctgagtgtgatattttattaagttgatcactctattttgattacagtttgccaaattgggctaatattacttaagagtgtgtaattgtgtgtgtgtgtgatttattaatttttatttggttcattgctctagtttgccaaattgggctaatatccaaatgagaatatttgggattctagaatagaatggctacttaagagtgtttgtgcatgtgattttattgatcagtctatttggattgtagttttactaaaatgggctaatttgccaaatgaggacatatgggatttcagaaaggaatggttaacttagagacagaatatttatgtgtggtttttgtttaggttgaaggaagaacagtgaaggctcagatatgggacacagcagggcaagagcgatacagagccataaccagcgcctactacagaggtgcgttgggagctcttctggtgtatgatgttacaaagccaactacattcgaaaatgtgagcaggtggttgaaggaactgagggatcacgcagacgccaacatagtgatcatgctgatcggtaacaaaaccgatctgaaacacctgagagcagtggcgatcgaggacgcccagagttatgcggagaaagaaggactctcattcatcgaaacgtctgcgctcgaagcaaccaatgtggagaaagctttccacacaattctatcagagatttacaggataattagcaagaagtcactatcttcagatgagccatctggtggtgccacaataaaagaagggaagactcttgtagttgggggtgcacaagaggccaataccagcagcaagtcttgctgttcttcatcttgatttcattacacaaatttttcttttcatatcgtcttgttggttattgtttattagtttttctctctttactaaatatgttttggtcatataatattttttttttgttgcttgttgtgaggattgataattatttgttcatgaaagaatattatacaattagttttcttccttttgaataggctgtctaaaaggcctttctttcatatgatcatcaattgttattgaagttatattgtttgaatgtgcgtgtcttttacgataagagcttatattccattaattattaccaaatatttgttaaatagaccctttgtatattaaataatccccctgaatccttcccttttatggattattttggtacacaaaagcatataatcgaaatttagttcaaataatttggtgtctttggtttcttatctataaaactttatccaagttaaatgtagaaatgttttctaagtgagatattggattgcttgaacaattgttagagatgagatgagaggatctaagcagacaacatttaacaattcttcaaagatccataacataacagggttcagttgagtctacgtagtaaactgttttacacggttgtgttcttttataacagaacacaatcttcactttacataggaatggctaaccacaacaattgctattctgctgaacaggctgccctttcatttctacagttccagttgacttgctaccacttggttgactacccattctgcataaaaagtttcaaataagagttagttcagcacaaatatttagtatcaatttgcatgagaaggcagcagttgatgggatgttttactttttcttaatctctgcagccatggttaagaaagcctgctctacgttgatagagtctttcgcacttgtctcgagaaatgggataccgagctcatctgcaaatgcctgcacagttcattcatttcagcacaaatatgaaacaccacagttagaccttaactaggaggaagtagctagtaataatcattacatcggcttgattgaaaaacaactgatatgatatgctttacaaatgtactagtctagcttttttatcatagcaggttggtactaacagcatttaagttggattaagacagtgaaaacattaaaatcatcttcagttaatgagttcctaactccagagaacaaatctttcatgtggttcgagtatgcttcttggaattcactgatatcaagcaatcacaacatgcgtaaacatagtgctactagcttgatgcacccatgattcgtctatgttcaattcatggacaaatttaagtgttcaacgattgtagaacccgacactcacaaagctttccactcaagcactaaaacaactccaacaaacaaattgtgggggaatgtgggggagacaaggacccttgcattgtatgcaagacagtaaaaaaattaaaaacatgttcagttaatgagttatcaactccagagaacaaatcttgagtatgattctggggattcactgatatcaagtaatcacaacatgtgtaaacatagtgctgctagcttgatgcacccacgagtcatctatgttcatatttcatggaaaattttaagtgttcaaaaattgtaggccttcacactcccacaattttccactcgagcactgaaacaaacaaccccaacaaactaattgtgggggaaaatgtctggaatgcaaggactgctacaaggtccccttgcattgcagccaagacaattaaccgtcctcatgataaaacaataaactaacaaaagagagaccattgtattgttcatagagtttgacaaggtgtagtgttgtacctttgctgtttgagtgtccacaaccttgttgtcgaccaaatcacacttatttcccacaagaagcttgcaaacactttcatttgcatatctatcaatctcattcaaccattgcttgacattgttgaagctttccatctcagtaacatcatagacaatctgtttcaaataactttgtagtaagtgaagtaaaccttacataaatcataatttcaaaaataaccaataacttcctgattacaatgatatctgttgagagagacttgaataattatgaaaccaaaacaaattattttcccttatccctccccaaatgacaattgacaatagttgctcacaattatcccatgtgctcctcgatagtagctgcttgttatggttctgaaccgctcctgtccagcagtatcccactgaagaagcaacacaacatgttaatatttcaacaagaattgagtgagctgcactcaaacagtgaagtgtagcttacttatggcatatcaaaaatcctttttgaataaaaaaaaaagaaatgggattataatgaaagcaaaagaagaacaataccaaattagtgaaattgattaagcaatagtattacatatttatactaactaggcaatactaacaattgctaattagtccctataacttttcatgtaacagtcatcaggcagaaacagcccaattagaacaactgttcaaaaaataaagaaatcaacttacaatttgaagcttaatagtcttgccatcttgctccacagttctgattttctgagaatatttgtgagaaagaagaaggcataaacaaatattgagttaaaattaaatcaatacgcacaaaaagcagaacaagtgtaaaatgtaaaatgtaaaatgtgggaagtaagaaagactgacaaaatcaactccaatggtgcttatgtagctgtcaacgtaagaatcatcctgaaagagacaaaattggggattaaaaaccctaactttgttttttattagagtaaacattgattgagtaaaagatgataataatgagagaaattacagcaaatcggagaaggaggcatgattttccgacggaggagtcaccaattaggaggagcttaaagagataatcgctgaaaatgaaaatgaaaatgaaaatgatcaaaagtaagagaagaagaaaaccatataatatgagataacatagtaacacttactattcattgctcatgttgatgatgattttaggattttaggatttgggattttgaagaaaatggtttggtttgaaatatgatttgatttgggatttttttatgttatggtaatggaaatggaattgggaatgtaataaacaatataagaggaagtaaagtttgtatttttataagaaaataagtgttgtgttgggttgggcagcggtggtgttgtattttaggattgcttgctttgttggtgcatcattcatctcccacctattcattatctattaccctacttcccatttattattactatttgagaattgttaaaaaataatattagtatctatttttaattaaattttgggtcttatataattttaaaaaatattgctaactactcgtatgatgctatttatagaagatgttaggcactattagaatccaatagtggtgctcatcaccttccacatgtagcaccctatgattggttaccgatattccctaaaagttattttgttaagttatggtaaataccattttggatcatgtattttgtaaaagttaccaattggacaatctattttgttaaatgacaaaattgaccttgcattttctaaaatggtacaaataagaccctgaattgattttttgtcaaaataaaatttcattatattaaaaaaaaagttgtcaaaaattaagctcagagtcctatttttactattttggaaaatacatagtccattttgtcatataataaaacacagggtccaatcggtaacttttgtaaaacataggatccaaaatggtatttaccccttaagttatatgggacctgctacttaattatactaatagcagtataacactaaaaagagtgctaggtaccaataatactttttagcaattgtatgttattatcttatcattcctctttaattaatgttatgtatggggtgcatatatgctctctaataataaataaagtagataaattttcaaatcaagaatgaaaatgtaatggagtttagattaatggttgaattctctttgggagggtattggtttttacatgattaacatatgaatgaaattatttataaatctccaatcaaattgtcaaactagactcttacaaattttgcgacaattctgactttgaacttggatttagacttcaaatcccaatctgaacccagaccctaaactctagtgcaactcggacccctaatactagtgcaaccaagactccaaacccatgtgcaacactaatcctgatttctaaatttttctacaattcagacttcagatttcgaatttagacctcgaatcttgattcaaccctagctttgacatgaacctcagaccccaaactacaatccagaactcccacgacctagtcaaaccttagtttgacccaaacttcgatcccaactcgtccaaaaaccactaactccaaccctggctcagcacgacctcacactcaatcccaagcctatgtttatcttttatttgttaaatagggtgaaaagagtcaaagaagtgagaagcatt

SEQ ID NO: 16954 - DNA, 4599 bp, Cannabis sativa
ttttcaaaacaaaaaaaaaaataaaattgtgtcctgtaaattttaattttcatttttatttgttaattttagagtaaataactttttggattctgcgttttgtaaaagttaccaattggactttttgttttgttaaataacaaaatgaaccatgtatttttcaaaattgtacaaataagacattgaattgattttttgtcaaaataaaatttaataataatttaatctaaagatgttatgacaaaactggttatattttctgtatctgttcgtattaaaaattatcttaaagttagttacattaaaaaataaaattgttgaaaatggagctcagggtcctttttttaccattttagaaaatataaggtccattttatcatttaacatgacagaaagtctaattgataatttttgaaaaatgcaagattcaaaataatatttaccctttattttatttaagttgagtttaggactagggcgggggccgaggtctggcattggggccgaaatctaaggttcaagttcaaggttaattcatctatatgacaaacataaatcaaagatgtctctgaaaagttggatagcaaactaataatatcctctaaaaagatcctaattcattaccaaaaaaaaaaaaagaagatcttctaaaaaattcaaaaaccaaagctacaatcaaactcaaaagagctaagatggtgtttggtttattgtgaggattggcccatatggtatgcaagttggactacataaggccaaaaaaataaaaggtctaatatatttttttttttaatgtctttcatgttttttttttaatgaatccaacttttcaaaggactaaactaacaacttgtcattgatcactcttgcattccaattctcaagatcattttcaattcagttattatttttaagcaaaaaaaaaagttactattatttattattttttcaaacttttcatttttattattattattttgttgttgtatttaaatcaataataattttaacaaaataattagagttttttatgttttgtaaaatatataatcgtgtgataatatcaaaaaatattatttataaactgcattttttttttgttgaaaatgttttaagtggctttgcttatttcaaattgcaatgtaatttttcttttattccacaaactccctaacaaaaaggtgatggatatgaatattcttttgactaggatctcatctacaaacttacatagcataatttgctcagtaaagaagtacaacacatatacaaaatttacacactcacaccttcaatctcatatgatcagtttcagttctatgacatctctcttgatggttttttcttattattattatataattcatcgcaagtataacttaaaaatttgaaaaacaaactgagataattaacatatggtttgattagcctcaagtaataatacataataagcacatatatatttatctcgagggtaaaatagataggcatgtctattgatcaagttgtgaaaaagtgaactttgcatgtaatactaataaccaataacactagcaagttagcaacaaagcagtctcaatcatatccaacaacatataagtgttgatatactaaacattctatctccaatatgacaaaaagttaattaaggagaaataaaggtattaccactctaaacatcagcttgattgatctattagtctaatcttataagcacactagaaagattacgtcaatgcttcctccacaagtacttggtccagtaatcttcttcaacttcgtaatcagagatatcaagatacccatcaagttcatcttgtccctccaaaaacagagctttagtctctcctagcagtttcaagctcccacatctgtatcatcattgtgaatcaaaataacttgtagattaagattacttggtcaaaaattagagagacaatggtattttgttatgtaataatgatagtactgatgctcaatgttagtaattaaccttaacacataaacactctccaatgtctaatcaactcaccacatgaaaataatcaaagtagagaaaacaagttgtagtaaatacgtaccttgtattgacattgagtatctcaacattattattttcagcaacaatgtccttgagcgaaacaaagctgggagtgtgaaccatgacttcgtaccttgatttagggccacaaagcccaagatatttgaacatgtagccacctgactcagagtacaccagtccactcgtattgttacgaaacaacaaaagagctccagaattgaagtaatgaataggttgatataacccatatggaaaatcacaatccatactaaacagtttctcccaagatttaccaaaatcgctacgtttcttaagtacccaaatcttcatggaaatgtcagaaccatcgcataggcaaagttcaccacgtaaaactcccagactcatattcctccacgaagaccacgactgccagcattggcgtggaagttcaagtagctcgaattgctcgtgttcgaaattaaaagaaattatataatttggtctctcgtgtttgacataaagcccatacagagctccatcaagataggtaggaaatccaagcttgtaacatgactgaggagcatgatcaacactacgccatgaatctgtcccaagagtgtgtacaactgcaaatgagttggtacatctgaaagaggtatcgtaatgattctcaggacgtgtaacataagtgttcttctgataaactctaatgactttgtattgattactctctggactgaatcccaatccacaatcaatgacaccactgagagcttcatcatcacaattactgggtggaaggtttatgaactctccagttactggattgcaaactgaaatgggatcattccgcgacggctcagacaaacaaagcaatccattgcaagaattcacaatcttgtacttatgatcctttggcttcaaattaaggctacgcttcttcttatgcttcgtttcaggatgatcaatttggtaattcagaacactttctgcatttcgcagtgggatcttcaatttggtattcagttctatgtgacaataactgttatcatctttctctttccattcacacgagcagcaatctaaatcgaaaccaggtccatcttcaatatcaggctcaaccgaatacagagttcgcgaaattcgagtcggatcaagagtcctgatcaacaattggggctttgcacgagcaaaatgcaatttagcgaactgaacattcgagatcagattacgcaatttcttgcatacagatttgcagaaaacaatggtcttagtgggaagagtgaggaggatttgaacgagtatgcggtttggaagatcgattaaggaagaacctgaaatttgaatcaactcatctaccctactcatctcagtttcactaggtagtgatatccgttttcttttcacagccattcttctacaaatcatctaatatatatgtcatggattcatcagatttagttaggcacaatgtaatttgaacagattgacattaatgcatatatagaaaaagtgaagaaaacaataataattaataataagaagataattgaaaaaggttaccataccagagagagattgagagaagagagtagttgcagttgcagaaatttgaagagaagatgaaattggtttgcatttgtgtggtttggtttggtttggtttggttataagtaacttatgtggtatttatatatagggaactctgctctcccttactacttggcgggaaactatatagtaactgaggcgccactttttctctgctaatcaatttccacgagattttttttttccaaaaaaaaaaaaaaatactgtatatattgtttttaatgaattttaaaagattttaattttttttaaaatgtaaaaaaattaattttaagtgtaaaaatgaaaaaatccctaaatttttttatatattgtttttaatgaattttcattaggttttttttcttctgatattaggggaggaggatttaaattttggacctcaggctccattttgtgaggagaagtgtgacccacctaaccacttcattagaaattttaactctaataatattagacttttttttgtttgatatatttataaatacctaaaaatgattaaaaaaaatacaatttttatttataaaaatacaaatggttgttaattggtataccttattattattattatactaaattaagtatttacgtgtacttagttatatttttattttttattttagttaagtgtatttttaattataatttttggaatgtaattcaataaacaatattattttttattaaaaaatatttaatttaagtgttatttataataatagtattttaaaaaaattattaattataaatttagtttaatcataatatatactttaattttttttagaaatatcacattttcttttatttttattaaaaaataataataaaaaagaattatatttaggtgactacttaataattatatttttatatattgtaatcatgatcatttttctaaacttgtaatagtaagttattaatagataaaaatttatttttta

SEQ ID NO: 16955 - DNA, 1655 bp, Cannabis sativa
aatctcaatagttcagtgggcatttttaacgaccttaaaagttcaggggacatgattttatacatgtcaaagttcagagggcaaaaatcataattagccaattgaaaacaattgtataacacttaaaattttgtgataatgcaatcgataattgttcgtagattattctagataccaaaaaaagaatgtaagtaacatcaagcaaacactgctaaaaaggaaataaaaaagttgaagtgttgggaattgaagaaattatttgctaaaaattgtagaaaagaaaaaccataatgattggttttaatattttttttgcttcggccaagaaatagtgtaatgtttgtattttgcatttttcatcttttctgggtcggcatataaatggatagtctattttttcattgataacttttctatgatttcttcgataaagttgcggtgttcctgcagaagtatgtattttcaatttaagatgataattgttgatgtaagaaaaactttataagttttataagtaaatttatactaaatttaagattatacctctgctagaaaaaaaaaactcctataattttgatctggcaactatgtcaggatacaaaacattgcttatattttatctaggagaaactttctaaaattagtactctgctaccatttgtgtcattaactaaggaactgaaacaactttatcaattgtagttgttgaattaattgaattctcttgagaataatgatcctcaattgtagattattattttctgttacattagattagctatgtcgatgtggagttagttgattgcttagaatatttatgacaaatgaattaatgttagttttcaaagttataaaaattgtgatacttttgtaatcatgtgtatcattaggtgttatttctaatttatatatttggcaagcttataatgatgtgtggcatatatgtatagtaaatatgaaggagataagaccctatctttgaaaataattttggtagtaactaaaagagggttttgaagaaagtaaatgggcacatgggcgtgtgattataagcctttgacaaagtcttttattttattttatttttctctccaattagttagattgatcttgcttgggtgggacgtttgcttacatgaaggagcaactttatagctttgacccacttgaccgagtagtgtattacacgtgggagtctaagagagttctcctctcaacaaactatttgaagactatgtatatcaatttacttgaccgagtagcaaggaagttttaaggagtatgaagtttgaaattagttttaagttgttgagttaattgtggtagcggaccattctcatgacatgggtgtagtggactgtgatcttagagcctataaatatatctttatttctcactcacaaagaccaagctctcaagttaccctcataatctctcgccccaaggtttctttattactgaagctatcattctcattttcttagtcactatcatccacaccacaaatatattaccatattgtctccatctcacttgttgatacatagtttgtctttatatttcttaagtcttaaccacatatttcctcaagttttattcattcatttctccaagccattaccatactaccatcgcctctcttatacatatctaca

SEQ ID NO: 16956 - DNA, 5522 bp, Cannabis sativa
ttacagtataaaagaaaaaaaatagttgtacaacccaaaaactaggcgatagtcgaggtgattggaccatggtggcggacgagatgggatcagcgtggtgcgaccatggtggtgttgaggtgatgcactgtactgaggtggagcggacgaggtgtggctatggatgtgtggaggtgagtcgactttggtctataggacatggacagagcacctcggcaaggatcgacatggtgtggtacccttattaattacatactgatcatgatcatgagctgatataattaggcacattgatctttaataaacaagctagctatagtagaagaaaggtttgtaataataagattgttttggttttctcttgatataaaagaaatgaccattatataaatataggattaatatattgatgatatgtgtgtttaactacgtaaactactgcaacccttctttttgttggaatgagagtttgctgctcttcatttacaatattgtctccatttgaaaccgttttacactttacgttttgttatgttcaaaatttaaagactatgttcaaatgttaaaagaaatggaagaagaagaagaagaagagaaataagtcagtctattattacttcaattctgttgtaataattattcttgcaagaaaaggaaaagtttacataatctaatacaaaatctgatccgacccttagccgtttggcattaaagttagtgaccaatattcttatccatgtaaagcaaaaatccaaactataacttcaagaaatcgtggcactaccttacctctagctgtaactggtccctgataatatatatatatatagagagaatctagtttatcatcttgtacacgtgtaagatcatatgcctatgtgtcacctaaaggctcatctaagagacacctatctcacttgttataaattatagttgaacttctttatattgttattgctcaaatagaaatttacaattatacaaatcttatacattatgggttcagaaactttgattgaagtaatattggctatactccttcctccagtgggtgttttcctccgctttggttgtgcggtaataattaatcttaaatatcttattatgtctatgccaataaattgtgtaatttgaaaggttaattgaattgaattgaatatgcaggtggaattctggatatgtttggttctgacactcctgggatatatacctggaataatatatgcactctatgtacttgtagggtagttcatatgagctttcttgtctaaacaaggcagttttatcaaactatgtaaaaaagctctattttcagatcattattacctcttacttggtttcatctgtctttacttcttctttttgtcttcatattatttctcttcattattttcctattctgtctatgataatgaaaaaaaaaaagtgaacataaaacccctgttcaagatgtattaattattcagactgtaattaagatcagacattatccaatttgcaagattcagactgtaattaagaatttgcttatttaggtatcaaatttgaatatgaacacaaaaataaaaataagaatcgttggtatgaacaagagcagaaaagtcaatgttagccttattctcaaaacttcacatttttgttttttgtgaaattgaaaattgtcccatggcaattattttcccatcttttatatttttttaattcctccaacattctgattttgaaaaatattgatgcacaaggcaatttataaacttaattagattcacctcttcctacaattctcaaattaactgaaagacatcaaatttgacattaaaaaaaaaaaaaaaaactcatttttatgtttttttttttaaaaacacaattttctcacctccctcatgaagtttttattaattaatcgcaccgaatcattaacttactttttaatataattattttcataaggataaatttattttatcatataataaaaggataaccaaactcaaaataatattttagtttcttttttattaattaaccaaaaaaatcaaaagtattgaaactaaatccgaattcaatataagaactgtggttgaggcactattcagcaaaaaacccattgtgaggtactataaagtttgaggtgataaaaaatattttattattttatatttggaagtaattagaccgtgttctttatctactttaataggtttctaaaataacttacataatagtagcttgtgattatcacttatagtaatttttctatactttattataaaatttataaaaataaataatgtgaaagtatattaaaaaaacatatataacttcttttttaataaaatgctattatattaattcaaagagtcataatacaataggtattagaggaaaagacccaccgaaagagcataatttgctagtaaatgagtaacagtattcacaaatctataaacatgaaatatttgcactctaagaaaattagacactaaaagaaaaattcgttaacaaataataaaagtcaaaaacaagagcttgagaatgctgtaatcctttaaccactaagagagaattggtttcaatatagtaaattggtaaataaagatctttaagtcattgcgaactatacattaaagttattacttccatcactttcggtcaaaaacaatcttggaaaggctttgacattacagcgatggtatcacctttacaattatgtaatatcgcaccaaaaccagaagtatgagtcatattgttaacggttgcatctgtattcaatttcagtctaacggaagggggttcatccaatgagcatttgtattggtaaaactcaaagaagaagaagacagagcattagcaggcagcttggaaattcgagcagcttgaaattcttcaagataagtcacagcaaagtagagcaatatgtcataggattttggctttgttccatgcctttctttgtttctctcactccaaatactccaaaggattgtagcaaactgttccaatagcatattagtccatattgtataaacatgaagcagaaattctttaagattcatgtagctagaaagatactcatcaagagaaaaggtggaagccctccaaacccgtttagggcgtttgcaatagagcatgtgtgattgtttctttatcacaatgacacaaggagcaactgggtgaattcgtaatatgtcgtatatgaagaatagcaaccacaagaaagcagtcatgaatggcacgctaaagaaaaatacaaatttttgaaggaagagacaacgcccaaaaaaaattccaccattgaagagttaggattccacttacagtgggttgttgttcctccaactgagtggccaaagaataaccaaatttgacagtgtagatactatttgattcatgatgccaaatgtaatggtcctgttgagaagacaaagtcaaaaaaatgctccgtatcttttgtacattggaatcaaaaaataacgtccttaagagtgggtaattccattgacgagagtcggtaattaagttagagactcatattgtaatcatgacccttgaatactaatggttgaaaataagtgagtccaggcaactaaggatttgtggcacatataatattttttccatctccaactttctaactcaagcctttagataacaatttcttaccccaaatgatgccttaccaagttagtgccggataggaacctaggtcaacatccaagaaacacgagttcttaaagtatttaggcttaaggattcgactcaggagagatgaagggttagagtaaatccgccaagcttgcttgactaataaagcctgattgaagtgaataaagcttttaaatcccatacctccttcaactttaaattggcaaaggactttccaagtcttccaattaatacctaatcctaaaaaatttgaaccccaccaaaatttattcataattaccttaatttggttcataagagactttgaaagacaaaaacagctcattggataagttggaatggattgagccacgactttaaggagaatctctttgtcactaatcgaaaataattgttcttgccaagctgaaaaatgtttccataacttttctttaatttccctaaataataactttttatcccttcctgaataagatggaagacctaggtaacattcataacatggctggatcagcataagtagaagttgttacaggttaccttgaatagagggtaaagtgttaggggaaaaagacgaaatagacttctccacattcaatttctaacccaagacatgataataattatcaaaagaacgcttcatagccacggctgatcgcatgttagcgcaacaaaggaccaagctatcatcgacaaaaaataaatgtgatattgtcggggtactgcgagagacctttaaaccttggagattaccacagttttcttcatgttgaaatagcctagagaggccttctgcataaataataaaaagataagaaaaaggatctccttgttgaatcccatagctaggaataataagtcattgtacagaaccattaaccaagaaagagtaggaaacactttgtatgcagcacaaaataagttccaccacagagggatcaaatcccattacatacatcatactctgaaagaaattccattcaaccctgtcgaaaattttcatgtcaagttttattactacataaccttcttttcttctctttaaatgcttaagaggatgtaacaattcaaattctactaatacattatcagtaatgattcgagattggagaaaatcactttgagattcatatacaaccagagaaagatacggctttaactagagaataatagtcttggatacccgtttgtaaagaacgttacagaaactaatgggatgcaactgagtcattgaattgaagttttttacttttggtattaaagtaatcaaagatttggttgaaacttgttggatcgcccccttcattaagaatttctagaacagttttggtagctaaatctcaaacaatatgttagtaattagagtagaacataactgacattccatcaaagcatgggctaccattagctttcatagaagaaagagcatcaaaaacttcagtaacgatataaggttgagtaaaggtctggtttatttcaataataattgtacatgaaatagtggaaataacatgttaaagagaatcagaattaattccatcagtagaataaatgttctgaaaatattgatgaatgatattgctaatttccacttgcaaggtctgctccattccttgatcatcaagcaatttatcagtagtgttgttagtgggtctgctattagctttttggtaaaaaaaaaaacgagtgttcgagtcccctgatttgagccaaaaaacacgagaccgttgttggcaatagtcctctttttaagctaagagctcatctaggatatgttggtggcaaatgttatcgttattgtgtaaggtactcgtattttagtcgaaatgctcttcttttcaggccaagtttcttta

SEQ ID NO: 16957 - DNA, 3963 bp, Cannabis sativa
taatctgatctagaaatattatgataaaattagttacattttctatatctattcgtgttaaaaattatctgaaagttagttatattaaaaaattaaattcttaaaaattgagcctagaatcctattttactgttattttagaaaatttagggtcaattttatcatttaacaaaataaatggtcaaaaataatatttaccttatatttaatgatataatatatttattcgttgttattacaataaaataaatatactggtaattgtatataatataattttattattatataatttttttttttaaatgttgatgttgaataaatgtatttttataatttttattattaaatttattatagtttgttattttttgtaaaaataaaaaaaaatgtatattttactaaactaagaactatatttttcaccaaagcaacagaatttatcatgaaatgtgtcataaattaattgcacgctctttaaaaagaaatatgtagacggtataattaatttgaatgtaagttcatacatgataatttgattacgacaccccatacaaagttagcatggtataaattagttgatatataatttgttggtgactaactaataaaataatgacattcatattcatatttgtactaaaagtttgattgaatattattgtgtctctcatctcagttgaaagctccaagaaggcattgttgtgacgttttaccctctaaaagtggtgacgcattggacgtggccatcagagaatgccagcaagaagagttaataaacatgcatccataaaccctatatatactacttaattatataaattactctcttctaacctttttctcttccctatagggatttagggtttcaatttttttttatatatttattttttttaattagagaagttttattcaaagaatacaatttacaaacaccaatcaaagactcatagaatttgtagtgtactaaaattctcaaaccactctctatcttaatttcctacttattttctctcttttgaaatgagaaaacacacatctcttttaatctaccatgccttagccgagagggactatgtccaatatagaaactttcggatgagggtttctatagcttggtcttcccttaacatttgctttcaagtctctagtatcacggtgttggtgaagtaggaatagacttttactacaagaaaaacaaaaaagtcttatcaaaaacattttttgagggcttaagaaaaagtggtgctatcataaatcagatcactttacataagacatttttataatcatacagatatgttactataataaataataacacatttttgacattgttgtaatatttttataattaagcattttttattattatgtatattagattatacataccacattttcttattacttataacacccttgttatagtatattattctataacacaattttgcattatttagtatttatataattgtatactcttaaatattgtacgtgaacattccgtttcttttttaattttacgtaaaattataaggaaaataatgatcattgaaataatagaagttagtaccaagtaaaattctattaattactctaatataattacaatgttagtttaagcttacaagatcatatgaaacaaaaatgtatacaaagtgaaatacgtacatccttttaattccgaagaccttaattgtagatggtgtttcgcattgctccaaagtaagaaatcatgtctgaactgctaccaatatatcgattgtaagattatagatctctcccatgtcctattggataatataaaaatgaaagcactatattataagtattatcagtcacaattcaatggtcaacataaacataaaaaaccagataagggaactaagcataaaacattaattttattttaaattggcataccattttcttcccttgtttcagtactttctcgtacagctacgtactgaggacactttctcttattcttcttcttcaccatggcctttaagactacttttcgaaggtaaccatcttcggagttaagttcatttctatccatatatatggaaaattccatcttataagatagaaacaaaggtatgcgtaaagtaaaatgctcctcattttcctctaaacgtaaaaaaaaagcttatgaatggaagtatactcaagtcacaagcttaggaattaatattgaataagagagaacatatacttctagtagaacttttctaatattctggatgacttaggaaggttcaaccattattaagcagtacattgtaaaatcatcaatgagaaatgtttgcctgtttggtttattacacatataatgaacacgcgtacatatttatatgcagcaaagattgaatgtaaaataatataatacaagaacaactagctgaatgatacattgtcaaagtttacctctttctagcaagcatattcttcattgaaagaaaaagtgtgtaacccaaaccaaaagctaacaaaaagacaacttgggaattatagtcctctgtttcaaaagtcaaaaacagctagtgaatcacaacctcaaagaacctttattattatagaactagcactataaagaaaaactgatttcaataagaaaaaagagtaagagaaatggagactaaaaacaaactacacaattgtttctcattgatctagggatacagaaattttcttgtggacaaatcataatatagtattggacgcatctggtcttggatattacataagctatgaaaaagtcgaccacgtgtatgaacaataaataacaaatgcaaatgccaccaaggccttaagagtgtaaggtaaaagttaaaccaaattctgaatggaattgtaccatattccaccacatgaaatcattattgctgtttattcattaaggtaatttatgctaaaagaacataaatatctataacagtaacatgcatttgaacaagcgttcgatgccttttattaagatttatcttggaacattgtaattatcttcccgtggagagggttttttctgattcactttctttggtctcagctttggaggattagaactggctggggttcttttttatgatattaaagtcattgtctagttttcctggggcatctctttctcatgttagccgcaactttaatgttgaggctcatggattaactaagcatgcccttaaaatagacaataaacttttttggatggaagaaatcccccacctactgcgtaacttttgttatcttaacctttatcggttacaaaagaaaataatgccacggaaagtttatcataatttcattacaccagcttataacaatacagataagaagagaaactttcataaattcaaacagaaaatttaactgatccccccccaaaaaaaaaaaaaaaacaaacaaaggccaagttgtttacataattttgtagaaaacaaataaagctcaaaatagagacagatatattgagagtagttaataaaataaaaaatcctaaaacagagaaaggaaaaagaaaagagaaatcttactcgccgtgtatttaagtctagataagtgaacatataaaacaggaagaatatccaactttttcttcagtttagccattgctagtgctccttcatatagattaatcagctgctaaaaaatttagcaaaaaaaaaaaaaacgaataagcctatagtatctagagtatttgagaagacaaaataatatagtacatgataatagtactagccattgtcaagtcataagcattactctgctatctctagtctatttgagataaatatgatcaggaccacttttagggacataatagaacaagaatcaacaataaatgacacaccctctaatcaacgaaatttcctagtttagtcctcctttccaatactgatggtaattcaaataaagaacaatatttatatatataatatagtaatagaggta

SEQ ID NO: 16958 - DNA, 2799 bp, Cannabis sativa
tcctttttacatgggtcaatatcataatactatttttatctttacttggtttctaaatacttgaccaaggttattggtttgaattttcttgcccctttgtattgacttatttattgtttgaataaaagttgacttctctttttctttttcctcggttattggtagatcttaatatgttacataaaattttcaaattttaatggaattcttgtaaagttgagtgtgacgagttacaaatattgaattttcttttttagtttgctttttctgtgatcgttataaaaagatggtgaggtcatttcccacaaatcatacatttattatgaatacttgctaagagcaaagcaataataataatccatggcattgaagaactccatcctcattcttttccaaattttcctttgttttgaactgccattactactacattctaccaaagcacaatcatggattagagcagggtattggaggtatgattctgatctccccagttcagaaatagattcaactctctttactcacctcatttatgcttttgctgatctaaactcttcttcatttgagctctccattgcttcttcaactgaagaaaaaatttccactttcacagaaactgtcaagaaaaagaaccctttgataacaacacttctctccattggaggagggaataccaacttctcaaaaatggtgagcagttcatctcacagaaaatctttcattgactcttctataaaagttgccaggctttatggttttcaaggccttgatttttcttggcatttggccagaacaagcttagacatgagaaacatgggaactttcttccaagagtggcgaaatgctgcaagttctgagccgaaaaactgtagtgatcagagggaattgatactaacttcttcttgtgattacgcacctggtgatgaaaagaattcttgtccagtggattcaatcaacagatatttagattggatataccttttggcctatgactaccatacacctcaagaggaaaacattactggcgctcatgctgctctatatgatcgttcgagcaataaggacacggcttatggtatattggtttggagaaccagatgcctttcttcttccaaaatggttatggcattaccatattatggctatgcttggacactgttaaatcctgcagataacggtgttggagcaccggcaacaggtcctgctgtaacgcaagatggattaatgagttacaaacagattaaaagtgtcattaaaaacaattcagctcaagtgaaatacaactctacttatgtggtaaattactgctcatatggatcgacttggatcggttttgatgatgttaaagctgttaaacagaaaatttctcatgccaagaaaacacaattacgcggctatgttgcatggcatgtggctaatgatgacaattggatgctttcttctgctggtaataaagcagagcttagtagcatagttctttaactttctctccattacaacaagctaagatgattcttaatatgaaatattagccaatatatatgattcttatcatgattattctttaatatctttcatagctaaagaagaagggagcaagaaaaaacagaaggcaagaatgttgttaacaattttgttaccaacagctacagttattttgctaataggtgccttgatgtattattgcttactacgcagaaagcacattttaaatggtatgttctcaagttactgtttgtatctataaaatgtagatactttcaccttttttcactgacattttttattttcttttgcatatgggaatgacatacagctaaagtaccaaactctagagaaacatttgcagcaacttctggagattttcaaagaaatgatcataatctgaaggtctatagccttgaaaagttagaggctgcaacaaaaggattttcaatcgaaaataagctcggtgaaggtggatatggtcctgtttacaaggtgacctttcattgaccttgaaagaaagaaagaaaagtacattctagccaatgcatgtgaagaagctcaggattcagtttgtttaagatttgtgtactaaatataagtttctacttttttagggtgtattatcacatggacaagaaatagctgtgaaaaaactgtcagctacatcaacacaaggatatgaggagttcaggaatgaagttgaacttacagcgaaacttcaacatgttaatcttgttcgggttttgggattctgcattgaacatgaagaacaaatgctgatctacgagtacatgcgaaataaaagcttggacttgtacctttttggtaggccaatgtttcttgctttcagatattataatttggcaaattttgagtctaaatcaatccaagattagtggttaatcatacatggcaagaaaatgtagcttcacaaaacaaaatgaactgaccattgattaattgttactaatctctatgtttatgtatagatcctttgagaaggttttctttgaattggagaaaacgtgtagacatcattgaaggggttactcaagggcttctttatctccaagaatactcaagattgacaattatacatcgagacttgaagtctagcaatatattacttgatgatgagatgaaacctaagatatcagatttcggtatggctagaattttcactaaagatgtacaagaagcaaacacaggccggattgttggaacatagtaagtagtatgctgcctacattaactttattttaatgctactttcaagagtttaacaccaatgagttgtgtcatgaaatgcag

SEQ ID NO: 16959 - DNA, 3272 bp, Cannabis sativa
tctactctagcatcaattgcttagggattcaaaatgcacaaattaagcaagttatgagaaacaaatagaggtgaaaataggatatataggaccaaccttcaaagttggagtcggaaccttcaaaaatttccatggcaaagtccaagaagtcctcacttcctaaaaagttattatattcgaagaagccaagacaatacataaaatgagttgggctctctattgttttgtctactcgaagcaagtatctcctctcctaatagggtactaggaatgatctaacctaaggaagtagaaatcgaactcatcttgtttgatatggtcaaaatccactggatagggagcatgaattaaatggaacaaggtgttaccttgtctgtaagtgctgccccctagaattttctcgttaggaagtacgttagcaaactgcttcgcaaacctcacgacctcactcagtatcttttgatcctctttgagctccgccatctaaagattgtctttttgcacaaccttctttacttcatccacgacgatatctacaataccttataggacctctcaagttcagaaattattccctaaaaactcggaggatcaatattttggtagttagctattagtccaacttcttagagcttggaagtggtaattaattgtccaacatccaacttctcccaggacaaaccacactaaactttgcgttggttttccaactaggtagttgactgtggccgacaacaaaaacctgtgaaacaggaggaagtgaaataatcgagttcaaatgttttctaatcccagaggattggtaatgaaggggtctagaaatgataaattgaagacaaaaagtttgtacttactcactctctagaagtcgagaagaaaggttggctttctattcaaagggaacccgtaagtgaagaactagtattcctaaacatttgactagtgggacatttgactttgttcctcttcttcaaacagtagaagccatctttgattttatccttcttgcttgggatagattccaactgatagaagaatatgatttctttagaagtaggtttctctttctcttgttccttataaaaaataaaccatcccgccaagagtttgtagctttgcaggattctatgactactaagaaacccgcaaagtagtccctgaggaaaaaatgggctctagcagcaatgtggcccacactccatgcaccaaaactgtccacactgacactgacagtttctgccctcttggaatgcttattccagaataggcaggggtattctggaagccaaatttttcttccaggtccaccaacatcatgtagttgcgaaacttattcgggatgctattcatctcccatgacatgtcctcttcatggtcctcctccactggcgtcggctcattactgccgtcttggatcaagctgttgttttggttttcttccaacatagtaaaatctgaaaaaaatagacaccaatcagttacccaaactaagcaaaatagtaagggtaagagagagtcttccctgataactgcttagagaggtccttgttggaccctacatttggaagcaaattccttagagaaaactcccaaattaaagattaggaacacaactaaagaatacaaaatagaggcactattctctggcaatgaaagggtcctggatagattaccaggttacaacaagatccttagggaatttgccaaaactcctagagccgacaatcatgcaaaacccagaaactttgaaaattccaaatttatcaaattttctacacatggtaatgttcttaaatcggtagcaatcctatgagtctttacgctctcatctaaatgaacatagaaactgccctaaatagtggagcatgcaacttttgatcaaatggtgaatacccagtaaaaaatcccaaatgtatggcatattgacataaacccattatccttaaacttactcaagcaaacagaaatggtagatattcggagaactgagtacttattttttatgccaaaaattaagggtgttggtttttgggtggctggagaaattttcacctcaatatctcagagcttcttcgaaagcttgttgaagtctttttggaagtttgatgaaggccattccaaagcgacaatgaacggagcagcgctcagaaataatttttggcaaaattgtagtaatttattgacaagctcagagttgatatctatttgcttacttaaattttcataagtacgtacataattgataaaaataagtatttggtttgagaaaagaaaaaattttggtctgaggtcaactgtacaataatcgatttaaattgcttgttcaacaatactcatcccttgtttaacgaattgcttctttaaaaagtatcttgctcctcgtgaatcccttttctttctttttattctagtaaaaagtattatgcggtctgtccattagttcttctcttacatatgtatgaaacaccatctaatatggtttggaggcttattaataaggtaaaataaatcattataatatgttcttatcaattcttggcttggctagctcactataacccaattttcattctacttaaaattatttatacagaataggatgaaggttaatcattaatcattatcaactaattattagttacaatacatattattgtataataaattaattaaatgaataatcatataaaaatctaaataaatttatttttttatatataaaaagttattattattaataataataaaaaaggagctatcaacttattgtgaatggcactttacattacggaaaatatatattataacaaatcctatgtgtcttatattttgtttttcatgtcttatttattaaatattttttgtcatgaagtaaaccatcatgatctcttgattatttttaaatatattactacatatacttattgattgacagtacttttcctaccctatttaaaggtgcaatttcttgcatgttaaccatatagaacaattaattcattcccaaaaatgggtatccatagggttactataataagtgttgttttgtttgttttattgggtttggtaattggtacttatgcctctagagctctctttgatactcatggcataagtactagtgccgcaagaggctatggacgtggaattaatggtgcaagacaatatggacgcagtgctcggagcacaaccgaaagtgtagtcggcaaaggaggtagtactagaggagtcaatggtggtaccggaggagaagatggcggtggcagcggcag

SEQ ID NO: 16960 - DNA, 2407 bp, Cannabis sativa
ctcatagaattttacaagttacatttatcttttttttctggttttaacagaagtaaatttactaaacatatataaactaaaatatactagtatttgaatattattttataatttcgaaaaatatataaatggtaaaatttattcaaaacacatgggtattaatgatttgatcagttattatatcctaagaataaattcttaatatttcaacatgtgtggtctcagcaagatgttaataggtagaatattataaatacctgatattgaaagtgcttggagctagcattgttgccatgtgatagtacgaggtccatttatttggtttatatggcaaatgtaactgaaatcgctacactattttagtgaaaaaatattgcttcctaacaccctgtttgtcaaacatcacataatatacctataactatatatataagtggtccctcctataatatatgcaatattgctgtagatgttttggtaggtttaacatgtttgatattaaacgacatgcatataatatatatatatttataagtatatctagctactcaacttgcagtgtatatagtgccatgttatgtggggtttcacatataaatgatttattttttatgctcataatattgacataagtgagtaatattttaccccacagtttccatttcacgtggtgttatgaagtttcacatgcataaatttgggacgatgctcctcttttatagtaagtggacttcttcttcttcttctatttatgtacgtggcattaaatattcttttgccacatacagatggcacttaaacttggtaattttttcaatttaagcaaaattatatgtacaaatgtagctcttataataaattaagagactactatatataattgttgatcgagttggatacctaaccacccatttgtgtcgcaataaattggtataatggtcaaaatcgcatatacagtgttgttaaagacattttaacaaaccaaattccatatattaatatatatagataaaggtttagtgtacaataaaacttgtatatagtatagatatatttaaagcgcaaacaaattgagagttgaaaaacaaaaagaaaaaaggaaaggtaggtatataaatgtaccatcaaggcttccccatctgcctcccactaaaagagtactaaatattaaaaattatgtaaataataataataaaaaaaagaactgggagtgtttgggacaacagaaagaggaagggtgatgaatagtttaggcaatgcattatttttttttggggaaaagtaatattggcgtgtagtggaaatggtgggtagaaatagaaatattggtgcacattctcatcattacaacaatcaaaaaggggataatattgctctcttactatgttcttcctggtctttgttgtctttcactcgtaatctcccccattccttttctaaactcaatgatgccctctagaaaatctgtccccatgaattcgtccatgcaaatttgcatgcaaaattattattttatcacgatcaacaaagctgtactacaatctcaaatatcaagctcaaaaatcaataatatatatatatatatatatatatttaaacaactcataaagctagctagctagctaccataatattaaaattataacaactacataagttaatgaggacagtatagtcagtcccacttttctccatatttctttggattaattagcacaaataaaaaaaatgaatattataagtaaactaattaagataagaaaatacaaatcaccttaaattagggccttaattaggatgtggcccctaataagtcatgcatataatagtatatatatatatatatatatatataatttaagaatagcagtattatatatgatcaaaactgttgtactactagagtagtagtctctgaattgtgatcataacatgatgatttctctcatcaactgttttagtaaggccagcatatacatattaattcatttaaaatttaaagcagagagatatagaaaatgttagaacaattaattaatctctatttaagaatattttatttaaaattaacttctattttttataaaaaaaaaattaagtcctaatttaaattagttataaataaagataacatctattatctttgtaaaatgtaattaattatacattttttaggtctcgtatttaataaaatatacatttatataaaaataaatatatcttaataaaatatatacatacaaggaacatttggtaatagttttattttatttaattaattacaaaaatgaaagtaaaatttatctttttaaaattctatttttttaaaaaaaatatattctgtaattacttttatttttaataattttaaaaacggtaaatggcagcaatacccccaatactttcg

SEQ ID NO: 16961 - DNA, 4478 bp, Cannabis sativa
ggaatggttttgtgatcacaatttacagctattcaatgtatgactcaactaatttcattcagctctagtaaaaagataatgaataaagaacaagaagaaagaaatgatgtctcttaaacatacgtggttagtcttgtttgcagagcagaagtatcattgtttatatgtttcttttgacagacttcatttgagcagtctcgccaacacctggaggaagaacttgatgggtgctggtttgatcacatcttggatactttaataaatgaatggggcagttgtaaaacaggtaaatttatattgtatatgtaatgtgctgtatattttcctttttctatatgatttgaaatattgttgttatagctgcttctatagcaaaataagaagataaagtacaacaaaggacattgtttctttcactattttgtgattgagtttcaattggtgtgtgttgcatgcagttcttgaggagtcatttcattctaaagatgcttttttcattctggagcttgctgtttcccaaataaccacttatggtattgtgcattttctttgattaatgatcttttcttgaaggaataaaggccgtcctcctcttccgaaactaaaataagatacaataattacaataattgtgctggcacatatggcctttgttttcttccaaaatagaaaaaatagaaagaaagtgaataatcaatatgttcatatcgcagatgatgaaactacattgagtgcctggcaaaggatggttgactccgtgaaggtctcattttcattctttgtttgtattctatctttgttgtagtgatgttctcttgataataaattaaaggtttgtgttagacaactatattccacacatgcaaatgttggctcaacattgctaaatatgttactagtttataggaattcattcatctttacttctttattgcacgtttgcatataattgtacatgtactcttttgaatattttcaaagctgctagctattttgtgaaagttgcaattttcctttgaccgtaatttactgaaagatatcaattaaattaattattggttgtgttagtatactacactacaccaaacgttcatccatattattctgtttgtttttaatttgtaagtctttatattgatcttgtttatcatgatatctttttcttcgggttttttatttattggttttgtagaatgtctcatgatatctttttcttcaggtttttgttctccatcttcagcttaagtcatatatgctcagaggaaatttgctagaacatccattgctgtgcaaggcacaaagtctagcttctacttctggtcaaattcattcttcagatgtttcatctgcaacgtttggttcagaggtttctttaggtaagtaccgtttgagtataactttaaattgaaacatctggagtcccttgtgattgcctgccaacctttttaattcccttgtgattttgattgcccaccaagcttttctagaaagaagaaaacaccgaaaatttcaaatagttttttgatcgaaaaatcaatctgatctctttgtttttctttcagcatctggactcccttgtagaattgcattttcaaaagccggaattagagatatctatataatacctgtggcaacaggaacttctggcagattactacttacagagaaacatccttttcgtagtcaacgaggagttgtacttgctgtagcaccattggctgggcttagtgtaagttcttttttattggtgaatatacttcctgctagtcaagtgttaaaatgtgatacaaggttaactattaaatttgttaatgaaggtacgattacttatatagattttgtataagcagtgattattaactttatgttttcttccaacatgaaacagcccaagatagatgacatccatcctacatggttgcatcttcggataagggaatttgacccgaaattttccactaatacaatcaaaggctctcactcaaacatgtccagtcactatacagatggaaaatggacacttgggtttcaaaatgcggatacttgtgaggctgcaagattcttgatacttaaggaaactaggaagcagagatcaaaagttgaaagcttactttctccattacttcataataaggactggcataaagatgaatggaacggtcataataagtaataatttataactaatagcaagtagaagattgttctcttctatatcttttttgtgtatgaaattctggttttatcataaaagctaacatgctaagctagcagaatactaacccagtactacctgctgtgattatttccaagaggtgtttgttaatgtgttattatttcatgtaatgtttggaaggtagaatttgaattggttgactcataaggaaggcataaatttgtatttgctttgtcaaacatttatataccattgagtttttgtaagatattaacactctgccactatttttctaattcattatatgttttgctgctgctgtcattattttcccatttcctagagtttcaaattatttgtgtactatttaatatagggcatggcatccaactgtttttttgatctccccattggtatagatcttaatgcttggaaagaaaattgggggaaaaagaaagacaagacacctttcaagtccaaatatacaatgcatttgattattaggaaaccttgattaatatgatgcaggtgaaatgtgaatcacaattttcttttgttttttaactaaaattactgtatcttgagacttgattattattagctacatgacataaaatgaatctggctctgatggcatgtgtatttaaaacaaaatggttgaaattaattttattatatattatgattgggaatgaggacatgaggagcttgattttacagaacagagagacagaggtgagctacacacgagctaaactaagtagtagtatttgtattatcatgattcttgcctttataaacttttaaaataatttcactagagcgtttaaggatattacaaggcataaaaatattgagaactttttggaaaaggagtgtgtggtacgtaattccccatcacctttacattaacaaggctgtcatgtcaaaattagagcaactttttctccattctaacctttaagtctggccagccatccagccaagggttaatattattattaactacttaactctctctctctctctctctgtatttttgttccctctcttggatattgctttcacccacatggccacgtagaagccaaagatgcttatttgaagctcaaaagcataaaatgagcggcccttttgagtagataatgccatattttacttttaatataaattgctttatgagagagagagtgctttactttaagcaaaagaagagaaaaataaaccaattaaataattagagacgtccaatgcaatgcgttaccatgaaaaatgaaatatagctactcacagaatagacaaaatatagtataactttcactttgactactacacaaatctaatggtactgtccaaacaaaacacatagattttcaattatgtatcaatagctatagcataaacattaacacatgtaacaccagtctaaggattggcttttgatggagatttcatttattaatgacaaagttaaccgttaaaatttgtggtcagagacaatggagagagagagagagagagagagagagagagaaagaacaagaaagtatatatatatatatggtgatgtatagtagtgggctaggggtgtattaattctaattaagcaattgtacatgatattcctccatatatattcaagcactccttttgtagcatttgcagaatgctttccattcaaattattttgtgcctttgtatgtctttttaggccaacaaagatagaagaagctttttgactggagactggccccagaatgctctccgagaaagaataaacagttaataaggatgagtttgggattatatatatattttacttttgttcttttatgcaggcaccgtttaatttgctttccaaactttaatatcatatataatatctatatatacacatatataaatatgtttatgtgtacacactacatatgcatatatatatacatatatgatccatccaaagtattttgtagatcatttgttgcttaaaataaaagaaaatgatatactgatcattagaaactctaataattatttaaaacatatatatgcatagatcaaagagctaataaggatcgatatatagtacactattaataaggaaggcacatctataaaagtgatgggatcgattagaaacattcttattgttaattatgcaataattgtcaagttggtcattcttaattatcaccatcaacttcaatgctataattaactttctctgtcatgtgttgatgattaaaagaatattaatattattatcatcattaattattaggtatattactacactaattaa

SEQ ID NO: 16962 - DNA, 6646 bp, Cannabis sativa
agtgtaatttcctctataaattttctaagaaaaaattaaacgggccattttatataattttaattgagtagagaaaagacattgcatttagggttgttcagaatgaatttgatctaatttaatccgcacgatgaaatctaatccaattcataaaatgcagatattcacacgtacgtagattggattggattgaaaaatctaaaatatgcacttgtacagattggatgttgtttgacctcaaaaagtaaccgaaccaatcaaatatttacttaattatatatttttaaaaaatataatgtataatatatattaattttctaataatattaaaaaaaaagacacaaacttctaatttcttaacctgctaaaatcttatttagtaagatattgagttgatacattttttttttataataaaagaccggagaaaaattattcttattcacataaacacatacacataaatttaaataaatatatatactagcttatttattttaataataaatacatatatattctagtgtaaaactaaatatatattgtaataattgttttttttttatctaagataaatacatacatactaacatacattaacttgatttgtatgtaaataaaaatggaaagaaatgattattggagttaaaaaaataagtttttttttttttctattttaataaaattttaaataatttattattaaaaaaataaccgatttaaaataattttaaatgattattgaattgaaattagtaggatcgaattgaatctaaaatataaaatccacatttactgcgaattgaataatatttgataaaaaaaaaaaatacgaattgaatcaaataaacagctctaattgcattttcagattcccgcgtattagaaaaaaaaaaatacaccgcgtatgataaggttagcaatatttttgagttgagttttggccaataggcaagctccatgcttcatcattttctttttcttttatataaaaatgaaaataaagttgtgtgaaaagggtagtttaatgtgatgatgaaaaaagaaagctaatcccacaaagtcaactaactcttatgtgactggaatcctcagtttcacttctcttaatacttccaccccaagtctgtatttcattcgagttgaagcaaacttccattacttacctgtccagccacgaaatccagtttggtaacattactcttaacaagctagagatgaatctcatatttcaacaagaggagaagaaaatcttcccttttagattttaccaagtctgctttgatggatgaagcatagagattaaaatttgaacatgcaaaactttgtctaagaagaatcatacaagggcagtcccattatgatccaaaatagacaaataatactaatagaatagaactcattaaagattcagtgagtagctaaaacggctgcatttcactcaatatatgcacacttaatttgattaagggagtttctctaacgatataataggtacatttgttatttgcctatttcctactagggtgatacatgtctaaaccaccatatgaggaactctataatctgaggatcaattgccaactgaccgacagggttcaaaagtactggctgtagactatgaacaatacccgacggcacaaaagtgatcattatgtactttgcaagaaaatctagacgcgaccaactggagaaagtggtggatatgagatgtaacttggaacctctgcttcaattacgctgccagcacttgttccagcattttccactaatatgggttccccgcatgttttttcttcactcgagttacttggatctaaacgctcacatagtttcctactctctaaggctgctacacaaatggagaacgcttgtaaaattgatagtgatgaattgaactcaactgaataggccccttctttgaatggagacaaactgaaaaacagctggttttcttgccctcgttcctgtggacaggtgaaaacaaaaagtaacatcaggaggaaattttttatatgcatataagttttatacaccaagggttccagtaggaaatttaaccattctaaagatttcaagtgaaaaactagtacctgtgggaaaagctctaatctttctgtgacggggcaacctttagatacacttaatttcttatgcactttattctggtttgcaaggatcctaagtttgcaacccatatcccaacccccacagtcacatgatccacctgaactccaacgttcaactaacgatgacggtcctcctttacttggtagactgtgaatagcactgggaagtatgactgttgtgctgacaaagtcttgactactgaagaaagaatgacaattaacatcatccaaagaattagaatgagatctatgctccaacaaagactccaaatcagactgagatgcatacccaggcccttctttcacggagcttggattattggtctttttggcagttttgacaactatagctgcaagttcattatttggctggaagtctgagctctgattatctgactgtttcaaatccacagagaacaatacaaactcccttatcttgaatttattctgtgtactcaaattggaaaacctagagtcagaaaccttcatttgggccacaacattagaggtgtaatcatgacttttgcctttactaccttgaccaatccaacttccattttttttcttcatgtcttgaatggtgaggaatgtatagatgaagctgcatccatcattatttgtcgcatttaacttcttcactgtggctgcaaggatgttgctctccttatcaactgcaaatgtgaaaagaggcagaccattcttaactgcaactcgcaaaagagcatgaactgttggtccaggcttcttgccctgagctaattcattgacattaactgtcttacaaccagccatgtccaactttactttccctggccgcaaagccatcgaaacatgccgcccatcagcagatttgcaaggcctgtctgttgatactgaagccctctttaatggttccacagattgatggcagttttctgcctttggcttcagcagagggtcaagaaaccgcctcagaggacttgacttccggctagttgcattacactttccactggttgaatcattatcagcagatgacagagaatttcgggtcacagattttgtagaaacatttgttgagccctggtcacttgcatttaaatcgtctttcaaactggaacttttactcatcttacctgtaatggtaaaacgataaaatggtgaagtgctccgaactttttcggcccttactttgtttgagctcttttctgatgctttggcatgctcaactgaagttgaacatgtgggtactacaactgatcttttggctgtcaaattactgcttctggacggattcaatcccactttaggtgacactaatgtggagtaagatgagccagatgaacagctcattttcactgcacctgaatctgaagtactcaaatattctacctgagactctctaatgccatttcccgaaggaagtgggcccaattgtggaatatcagaatttacctctgccagggatgccttcttacatccttctaattttggtccagcaaaaactgtggaattagaatttggcggttctccagaatgactgttttctgggagacttttaggcagaatgagaacaattgttttacatcctttaggggtattttcaaaattctttgaatttggtttttgaatcttctcattgtttaaacactcaacaccttgagtctttcttgtctgtgattccatgtcagagttgttatcattgttcacatttctgcttactggatccctctccctctttagctttaactcaccctttttgctttgctccagcgtggtatctagatgctttttgcagagagctggagttgggacaatgaatttttcagttatcgtcacggtaccactttgtgcagtctccacaggttcaaatgttccaacacttgctccacgggatttaacttgggatggcccttccatcggatgagcttgtagggaaggccggctagtcctttggcgagaaggagagcaactgtgacccctagtagaataggtaggtgatccatctgtagaaaaagaggaggatgtgttactactggatggcgaatatctgctatttctgcatggcatctgtttatggccgttttgccatctttctagaagaccccagtcaagaacccccacatttaaagctttctcctgtacagtttttcctctttgcagataacttggcaatttcgacatgtatttaacaagctcgtcttcatcaatatttttcccatctatctgctgcttttgagtgtctcttacattctttgtaatttcgtgatggagatcagcatatgagcaactagacttttctaagtttaacttgtcttctagcttcatagtttggctcttcctaggaaggacattccctgaagttcctaaggattgttgctttcccgaactccttctgggttttgaaagctgctccagggctttcatggaatccacatactccatatgtatctgcagtatactggtatctggtgtctgcttgccaaagaatgttggactatttttctcaactgcacgttattacaaagacattttaaaaaatatatatatattcaggggaaactgaagaaataagggggattaaatctctacaaagagttgaaattatatatataaatataaaaagttgccagaataaacagtctggttctttaagcagccaaagataaaattaaaatttatccatataataactcataaaatgcaaaattctcattttaagaagtatgatgacccaaattttttaattttcttttcctaaattcatcatagcaagtaccataatgccaacggatatacttgtatttttatttgctagcaaaaaggatttcccagacaacaacaacaggtgacctagaatgagtcctaggtacttaggagcatctagcaaacattcaagggatagagaaataaaagttgaaaaaataactcagcgtctaaaggctaagtttttcaccaaagaatcccatcatgataatttttactaaacaagggaaaaaaaaaagaaaacgataactggtattgccccgttccttaaggaggaattaacaatagaagaagtcaagggtcagtgcttaaactttaaagatacacaatacacaaatggacaaatttagcagtaagggttgttccatgctttacaaatttacatttcaccttcctaagttcgcaaccaataggcaataagcaagttaatcaacagcagtaaactacctcacgaaaaaaaccaaagaaactacaacaaatttaaatttgcacaaatccaaatcagaaacttaacacaaaaagacaattgagtggtatatggacaaaagactaataccagaaaaggcttacagaaagcaatcgtctagtggtccatgaaaggccattttcaaaacgcaagataaggtaaaacgacccatcctaagcagtactatcctctcgaagctaacggaagaaacaaagattgccagctttccaaaaccagagcgcattcgtttttcaaaatttcaaaactgtaatgccgtttggtattgggagaaaaattacagtaaaaagaaaataacaaaagtaaaagcccctgaaagaagcacttcctaagcacccaaacagcgtctctccatcgaaagtatcaagaagatgagattcctctcctttcgtagccttctgtaactccaattttagtttaaatacacaatttcagaaaaataaagaagcaaccaacaatgcaaaaacaaaatccaaaactagaataagagaatcacgtaaaactcgtgttaacagaactttcatgccaaccaaacacgaaagactaaaagaaaagaaaaaaacacaaaggaaaagcacaacataccagagtcaactctgaatatgcagatgattagccatcaacggaaaaccatagcgacctcgaagacaaagcatctagtgtcggtggagctgtaataaagctcgagtaaaaaagaaaggaaaaaaaatgaacagtagagagatcaggcaaagcagagagcaataactatctccgtaatcccaatgcctcggtctctttcttccccaaactccgaagcctgtaacaaaatttcactcaaagattcacaagagcaattgagagagagagagagagagagattgcgttaatttctctttttctgggtagagttcattgagtgagtcattgattttgttttgtgcagtacgtacagtcagggagagagaaagagcaatcgttttcatcggacggctaaaaagtgaggccgaataatcatgtggtcacatcgtaaagggttggacagtatctctttttcttttttattattttctacgtgatcgttgggggccatctcttttatatcaccaatagtaactctacagtctacatacatacaatatttgtatttatcattttgacaaattctatataataatccaccccaaatataaatatactgtggtgtgtacactctataccttaaattggaataaaatatactgcttctaattcatttgttgtattctactatgtatataccaaaaaaatgacaaacagaatttttttt

SEQ ID NO: 16963 - DNA, 2075 bp, Cannabis sativa
  modified_base (1898)..(1901): a, c, t, g, unknown or other
ccccataaattcagtcatttctttccccaatcttacataacaatggcaaatatggtcattggcaagccaagcagaataagatcacgtactttttcttgagtattattctgtataatacaccagtacttattatattcaggttcttcagaatctgataacccggagcatccacataagcaaagatgtaatactgccacattaaaaacaatagatagagagttaaatttcaaaaagaaagaacaccagaactacaatgaggagataaaacttagtgagaccaacctgaagtaaatttttcactaagtaaagtgctgccggaatggggtaaacgatgacttcttctaccgtcgtacttaatctaatacaacagcagacactcataaaattaatgcataactcgattcatccttaccaaattacctatcaataaaactataaacatcatagaaacaaaaaacaaaaagcaattattccacacaatctgggtggagtcagtcataccacttctcagagggtataaaatcggataagatttctttggggttgtttagaaatactagaacaaatggacaattttagataatatgaagtaaaaaaaaccatacatatgactaaagttttgcataagagattcatagtagaagtaagaaaatccatatggtgagttcttctcaaattaacaaagccgagtcataaaaaaaatgagagaaaggaacacctgttatcttctgtaacaccttcattattccagattcttcccaaagccacaagcgaaaatgcacatttcaaactctccacctacattcaagtaaagaagaaaaaaagaagcttaataagtctgaatttgatatgaacatcaaaattaaaaaatcaaagctaactccagctcaaatctgaccaagaaattcgcagtagtaacactgtactcgtatcttccagctctctttgaccatacaatcagaattgcttgcgaactcgtaagaacagtcaaagcaagagtaaccattgacctaataaagatcacgaatttagagttaccaataaactaatgtcaaatacacaaaaacatgtgtatatatatatatatatataagctcgtactttcgcttccatacggttcgatcaattggaccgattcccaagctgacggctgcatcaatcaccgccaaaccgaaatcagtaaacaattcaaatgtttcacattaagatttcaacctaacaagattgaaaaatggaaagaaaaaaagtaccagcagaaagcggttttcctcgcaagctctcaacatcgtcaacgactgaatcttcatccttatcctgcatatatgcataaaaaaatgtatatgaagttaaatgttgacgaattgaacaggagtgaagattgagaagagcgaaaatgcattgcatcataagatgagatgagaatacctggtctttgattttcctgtactccatttttgaggaacagtacagatctctttggttagttgttcagaatcagagcccctgggttttctttcagatctctctctttctataaatatatatatatatatatatttatatatgagcaattaagaagagagtgtcaccactgaatggagtgaattgaatactgtgatgaagaaacaaacaacaacggcctgcattgcataaccccaatcacttcaaaccttcctttttttccttaaaaaaaacataaattaatttaatgaattttatggaaatttaaaaaaaaaataaaaaaaaataaaaaaaaaaacaaattatgatttatttataattttcccaattaaatttttttagaatttttactttggattttaggtaaaaatttacaaatttacttttacatggaatattttacaaaaatactatttttttataaaacaaccgtaaannnncaaaacagaataattaaaaacaattgtggactaactaaaaaacaatcgtagaataacagtgaaaacttaacacattacacagtataaaacttacatagaatttttgaaaagaaaaatacagtatgttttaaaaaaaatttgccccactgtaaaaaaaaattgaaaattttagta

SEQ ID NO: 16964 - DNA, 4964 bp, Cannabis sativa
  modified_base (33)..(78): a, c, t, g, unknown or other
atgtgttttaattatcgttttagaagttcatannnnnnnnnnnnnnnnnnnnnnnnnnnnnnnnnnnnnnnnnnnnnngtaaaataaattccaacatggatgggttttcgctctttcattcactttaatcaagccctccttgcaagataagcttggcgtcttgtggaaaaacccaattctctacttggaaagctgctgaaatgcagatatttctcgcacaactctttccttgaagctaatgtcggtcattccccttccttgacttggcaaggtattcattgcgggagagaactttcaattgaaggattgagatggaagatagatgggggaagatcagttagatgtgggatatcacttggctgccttaattgaagaaaccactcacagttcaagctccacatcagcagcctcttggtgtaaattattctggtcactccaactccaccaaaagttaagatctttgcgtggcgagttgtccatgattctttaccagttgccactgcccttgttcgaaggaaattgatcacgaattaaacatgttccatctgcagacatgcttgggaaacattggccacacccttttcgaatgcaaatatgctaagagagtttggagatcattgaatatccaatttgattggcaagctagttcctctatgaggaaaggtgactacttaatttttctttcaaccgttcactctacaatagaaatggaacaaatctttttcacattgtggtctatttggacggaaagaaataaggtagttcatggacaacatgccaaaccagctgaagttactgcctcttttggagtgaatatgctgcaaaattttcgtgctgcaaaccccaaacactagtagcctattctagttgtcaaaaatagtcattttgctgctgctgctcttcaaaatccacctacctctgctgcacatatccatcgctggcaacctcctgctgctggtcgcttcaaattgaatgtcgattcagctgttcaagcctccaccaacactactggtatagccacgcttattcggaatgaatatggtgaagtagtggctgcactttcgatgccgatgaggggtgatttattatcccatgaaatggaagcaaaggcactatttttttggcctaaacatggctcttcagcaataactgccaattcattaggtggaaactgatgcactcttagtatcaaatgcattacaagctcccttcaattcaatttcatctttttctgatttaattgtagatgttgttagtgttttgtcctttttttcctaatattgtggtttctcatgtcaaacgtgatgccaacatggctgctcatgggttggctaaacatgaaataggggtggatgagacttgtttatggttggagaatatccctccacctatttactctattattgtaaatgaatctctttgttaagtttataataacaagtattttttccctcaaaaaaaattacggtttttgttttgaagggtgaaaattgaatgtcagtttgtatgtaaataatatgtaattatatagttttggagtgccaattgactactcgaagattaatgttagttatcacaacaagaatgtaacaaaattatttcaaaaatcattgtaagttgtcactataagaatgcagtaaaattatttgcggtaaaatatactcaccgcaaaaagtatttttatttgcatgggtggacatcaaatagtaagaatttggaaagactatatattattatcgctctttgcgctggtgtacttatgttcatcaatttataatcttttttcaagttatttcacagtacagcggctattattattattttgtggaagttgcgaatatagtaaaatggttgttgttgttattttgtaaaaaataaggttagtttatatattgactattaaattttgagagattttttataaatcatattttatttttagactatatcatatattatgagaccttaaatttttatgtagaaatttaaactatagacattaatgtatatactctttaaaaagtgagagaaaccgagagagaaagagagattgtatttctcagattaattaattaatgattacagagtaaagtgcttttatagcattggtttacaagaatcaagttggtcaagactaactaaccaattagttagttaataacagattaccaacttgtattaacagaattgtcagactaaatacaaagcatataactaatcctaactaattacagtttaatagcccccctcaagttggagtgtagatgttaattacacctaacttggatacaatgttggagaaggatgagggtagtaatgctttggtgaaaatgtccgcgagattctgttgagaagagacatgaagtagcttgagggatccttgctgaactttctctcgaatgaagtggcagtcaatctccacgtgttttatgcgttcatggtagacggggttctcactgatgtgcaatgctgcagtgttgtcacaatatagtgtcgctggaatttttggagagatgccaatgtctttgaggagggcaaggatccatgtgagttcagaggtggcatttgccattgcaccgtactcggcttcagcagatgaccaagagacaacttgctatttttttgatttccacgagacaagggattggccaaggaatacacaatacccggagatggagcgcctggtgtcttggcaactgccccaatcagcatcggcgaagaatgaaagctgaacattagtagccgataaacttgtttcagcatatgctgagatgtttgggaaaaagtttgcaggaaagaaaaggccttggccaggagtgctctttaagtattgcaagatcctgtttgtggcagtaaggtgaggaactcgtggttgttgcagaaattgactaagatgattaattgcatatgtgatatccggcctagtgattgtgaggtaaatcaatttaccaataaggatgcgatatgtggtggggtcagataagagggcccctttatctttgcttagtttgagattatactccattggagaggaagtcgatttagcccctaaataccatgtgtccttcagtagctgaagagtgaaagggcattgagaaacggatgtgccttgttttgtccgagcaacttcgagtccaaggaaaactgaagagggccgatgtctttaagtttcaatttgttatccaagaagactttgaaatgagttatggcattgtcattgttactagccacaatgatgtcatcgacatagatgaggacaattagaagcatggtgctggtttttttaataaaaagagagttgtccgataacgattgatgaaaacaatcttcgagaagggtggtactaagcttagaataccattgtcgagaggcttgtttcaagccataaatgatcttttttaagagacaaacagagtttgggggagctttgaaagtgttgaattttgtaacgggtgcaaaggtttgggaatagtcaattccttgtctttggttatagcctttggctactagccatgtgctttgaatctatcaacgactccttctttcgtatatttaactttgtatacccatttgcatccgatagccttttggcctggtggtaacttggttattatccaagttttatttctttccagagcttcagactcggtatccatggctttgagccaatgaataaattgagaagccttagcataattttgaggttcaatttctgaataggctgctagcacagctgcacgaaattgaggatgaagttttatgtaggaaaaaaaaggttcaatagggtgggcagtggaagtgtggcatacatatgcatcaagatgagatggtttttttgttattcgaccatgtttggtctgttttatgggcacagtaggagcaggattagaatgtatatgtgcctgtgtattctgttgggattctgcagtagagggagtgcagttaacagctctgttgaagtctgttgtagccgtgggaggcatttgtttagtctattcattgagagcagctggttgaatgacagtggacactgtttctggttgttgttctgtggaggcagtagtatgaatggtgtgatgggaaggtatcacagtatgagggaagcatagctcaacatcagtatttggtttctgagaaaaaaaaaagaaatatattctcatgaaaggtaacatctctagagtggtaaataatgttagtttctatgtctaagagagtataggctttcatgccatatggatagccaattaaaatggaagcacggcttcgaggagtgaatttgtgtctcttgcagacaagtgtggatccataggccaagcatccaaatgtcctcaaatgatcatattgaggtggtttattgtatagaatttcataagatgttaatcctttgaatagagctgatggtgtcctattgagtaaataggttgttgtttgaatgatgtaggaccaataaactaggggtagattggattgaaaacatagaacccgagctatgtttatatatgttggtgtttcctttctaccactgagttttgttgtggtctttccacacaagagtgatagtggataatgcctttagaggcaaaaaaagatgccaagtttaattctttggcattgtccgatcgaattgctttgattggagtggaaaactgagtgcaaatcagattataaaagtttattagaacagtaggggcatcagctttgctttttagcatatatctccatgtaaatcgtgatttatcatcaacaatggtaagaaaatacctataaccttcaacactaataatgtgaaaaggaccccatatatccgtgtggattaaatcaaagatattttttgaaaagctgttattggatataaatggaagtcatttttgtttagccaaatgacaaattgagcaatgctgatttgaatttggagaaaagaaagagtcaatctttttattaagaacattggaaatgtacattga

SEQ ID NO: 16965 - DNA, 5268 bp, Cannabis sativa
cttagataactctgctggtatactccctgacagtttattaaacgacaaatcgagaatcttcatggcttttaagttaccaaaacttgctgggatttctcccgaaaggttgttcccgaacattaacatcgtttccagcttcgttaagttgccgagttgaggagcgattggcccagaaatgtatgtattatttgaaatatcaatgtacttgagatttgataacaatccgagttctgatggaagcccatttgagaactggttgtagcctatctccaagtgctcaagctgcgataagaagcccagttgaggtggtatggaacctgtcaacaaattcccagctagaagcagatactttaatcttgggaaactcccataagacttcggaatgctgccattgaagtaacttccactgaagttgagctgttcgaggtacctaagcttgacaatgtcttgaggtaagggtccagtaaagctgttgctgtaagcgtcaaagagtcgcaagaagttgagcttggaaatcccaggtgggaaagttgagttaaagttgttatggctgatgtcaaggactctgagctcagttaattcaaaaatggccgtttgaagaggtccactgaagctgtttcgactcaagttcaagtgggttaagctcgataagtaacggatttcagaaggtattgtgccagtaagattttggtgagagaggtcgagacttgtaattcttggtgtcttgtcatggcatttgattcctgaccaagaacaccaaagagggtcttctaaattaggctgcttggagaggattggagaagggtcccaatcttggaaagagtttgattgagtttctttattaagagatgattttagagaaaggagggcaatgacctgtaacggaagctgatgatgatcatgagaagtggtattaggagacggtgatgaagaaaacactattgatatttgcagaaaaaagaagtaagagaaggtagtgagaaagaaataaggtaaagaaagtttcatggctatggaattgcagtggtaaaggatagtactactgagagagaagatgagttaatagaggtaaatttaagggaaggaaggttttgatgagggagaaaaatacttttcccgagtgctgggtgcagagggagtttcatgatgattgttttcttcggtgggcatatggaataggagagagaaactacttatacagttactcctacaacttcttcttctcctccttcagaggctctcttctgtatcagtatcaggtacaactagtaagatttatttatttatttctctctgtttgctttatttatttatttattttttagttttatttttgggctacatgaaaatatgaatatgtattctacctttgtctgatatccaaccaagaatacttttgtttatttatttttttttttgttaatattttccttttcttttgcctctacttttcatcattccttgtttcctttattcttattttttgttggccaaaactaaattgatcaacatgtgtaacagtaaccatgtctctcacaggatccaagaaagtcatttcaatttcccaccatattccctacccaacccaaaccactatttttcaatttttattttaaatacttcttcccttggctaattaattttgtttctttattatccctttaattcttatttccacctttttcttttattcttcctagttactcttttcttttcatatatatcttcttgtaatttctagacatgtatcattttattcaacaacaatagaaacattacgaatttactagctagttacttccaaatcattcatgaacaagagacaaatatatatatatatatattatgtatgacaatctggatatatataaaattaagacttattatgttcatattcagcagccttttcaggtacccagaaacacattcatattataaaaatgtcagcagtttcatattctaataatccaaaaacatacagacacccatatatagtgggcacacaattagtggttcattcatcgtggcattcagtttcactatatatattatctctgggtgtctgtcacactatgattgtgctttatattttatataaatcaaaccagtatgaaaaatattggcgcggatttttgaaacttgattgaaatgacaagaatatcctctacttgtagtactgtggatcagatgatttgttttggttctatatatctattttggtcattaatgtttgttaatatatatacagacgaatatacttattgttgctttttctactaagtttgactttggtaaagcttttaccatgatagccacttacttactttgtataattaatgttgctaaagtatttcttaagataagaataaagcttcaaacacaatcatcctcaatcattttaaattattcaaaattaatatataataataatggaataaaattctttgttttttgcatatacttccacttaacatcttttttggtagattacctatgcgattatcgatgtttgttacttggagtacaattggctttaatttattttaatggggtctaaagctaaaaataaacatttcttttataacacttacaataaacctttattttatttttatttttaagaaaaagttaccacaataaattttaaaaattacttttcattatgttgattagcagccaaatatattgaattattcataatcacatatcattcattgaatataatgatgagtgttcattcaataaataaatacatataaaaatttatatttaaataaccatgattcttgatcacatatacaaaattaggacgttatgcatgaaattatacaaaactctaatattattatatatatatatataaaatttaaattaatttttaaaatttactctaaatatttttctcaaaatattctttcacattattttgtattaatctctctaatgtttttaaatttgttttcatataattttttttataaagaatgtacatttctttttaatttttttatatattatttttattttttctttgtatttaaaatatatttatttttgtttaattttatatatgtgtttttaaaatatgtgaaggattttttattttaaaaaaatagtataaattaaaaatagatattttatacaaaaaaaaaattaataaaatagattgcctatatataattttttgctgggaataaaaaactcccctaaaatcattgagcaagaacattaataatggtgttaagtcatttactaatagtactgaatcgagttattatattcatgaaaggaaatgcatctcttccacattttttttttttttgtttgaggggacttattattacaacctaattttaaatacgttaaatttcaaatttgaatgtaatactaatatatatacatgaaaacatttttttcgtgcactactgcaaaaggggtgccaactctcatataatattgatgaaaactataaaatgagaatgaaagttttgttttgttcttatattaaaatactgacccagcctaatatcatatcctataatgtatacaaaaataaaataagagaataagatcatgatcgaacggtttagaatcatgaatattcataatcatatatatatatatatatatacaaaagaataataataaaagaaagaaagaaagaataacatatatttttgttaagagcgagagggacagttccttcgctgctgcagaacaatataccaaaactttcgtcagccaacatatctctctttcccaaatagaagtttcctttttccaactgaaacaacaaattaactaaaataaattcaaaccaaatatttttgaataaagtgaaataaagaaaaaaaaaaaaaaacaattatgtatggaatacttatgtactgtcgccttcttaaagggtattatggtaaattgaattttgtgtggacatgctttatgcagatctctctgccgcgcgtgctagacactcttcacactatcaaattgcccataatgctttggataccttataaaaggttgcaaactctaaaaatctcaaatttggcttataataatttaaatttaatcttattgcaaatatgataaggcatgattattattaccataaatgcatgttagtttggagtggttttctctaatagcattctactctactcctctagtcaatcaatatcattttgaattaaagtatattaaagctatggtgtcattgaaatgagccccttaaatatagttactaattgaaataaatggcccaatctatgataaacaaaaatttcccaaaaaacaaccaacaaattctatggtaatgagtaggagtgatcaaacacctggcctcatgagagcttccacaaaaagaaaaagtctcaagtatatgatatgatatgaatatgatcactgttatcaccagaaacgacaataaaataaatctgaaatggaaagagataggtgaccactttgaactttccacgtaggtaaggcgcgtgatggactaaaacgacatgaataatcattatcttgattttagtcaattgccctttttttcttccactaatcaaaaaaaattaaatgaaaattattttccaattaccaataaaaccctttggaaattgaagaataattataattgaggaaaaatatatgagatatagtgaagaaagactcgtgagtccactagttttgttcgtagaatggaattggttatggagtgggcccaactgaagtggagactggagagtgtgccacaaaacgccggcccacaatctctttgtctccttatgtaccctcaccttgtcttatttatagctaacgacctctctgtatatttacaaccagtgataaaaaaccacatattactagtgtgattaaatttactaaaaaagtattagccatataaaaattgattggtaattttttttaaaaaaaataaaattgagtaatgttaggtaagcacaaatagtacaaatagtaacggatttttttacatgcattaatgcgtatttaaattttataattatctaatcgagactaattagaaatcatttcattgtacgtagataatgtctactagtgtattacctgctattttttttcttttttatttttacaaaaatattagattttggataaaagttcctttgaatcttgtcataagttcttgaaataaatctacaatggcattgatccatcattagcgtatgtcccttctatgattggttctcctctgcctgaatctggttatggccgttacataattgattt

SEQ ID NO: 16966 - DNA, 7440 bp, Cannabis sativa
ttattataccctccatctatctatttggcatttaataaagttttttagtcaattttttttctcttcataattgtgtatgatttaattatttaagattactgataaatttttagaaaattttaatttgtagtgccaaagtaaagtttaaataattcattgcacgtgtgattattttttcttatacgcataataaataacaatttaaatccactataaactattcaaattacaaatcactctttttattaattgcttactaaaaagctctcgagatccgaaatggatacgagttatactgtagatttaccctatataagtataaagtatatatgtatgtattttgaggtgtcatctgtggccaaaccagtaatacataattaaacaacagcaaaaagtaaaataatgatcaagtgacatatttgtaatatggtccaaaaaatctgtttggtgtgaaagaaaactcccaaacaaatatataaagttcttgtttgggtccctcactcactatgaggctttggaattgaaatgaaaataaggctatttagtcaaactcaaaaaggtatgaaatccatagttgaaattgaaacacataaagaagtatatgagtgagtaaccaaagctgttcaattccattattaagtataataaaaattaaagctttttgcataaaatgaatgaatgtttaaacattgaaacaaattacaacacaaaaagctaagctagaaacttggattatatatttcattctatcaaacaatgagtcaaaaagaaaaacaccccattacaaggtaacaaatgagctacaaaaaaaaaacctgaaacaatggacatgaaggcctgtgaatcagagtgcctaaagtgtatttgatgttaaattgcctataaaaaaatttaaaggaaaaaaaaattgaagaataaccgaacaccatgttatataggcgctgtacatgttgaccgaaaatggccagtctgattacagcggctgcaatgcacaactcgtttcatccgacccccatcttctgtgcgaactcgctttttccttggctgtgcaggtggcttcaatgactttggagggtttataataacctttgcttcaacaagatcacctccattcagtgagtccaaatctaatggcgtttctttccaaagggttttgtctggaatcgggtgtattgtctgtgagtatgccttgcgataatttgccacggtgaaataattttctgtaaagcgatgaacgttctgcctgcaagagagaagagctgctacagcatgagcacaaggcagtccagagagctgccatccacaacaagtacagcagcgagttctgatgtccacaacatgctctccttcgagggatagaacttcgaatttagcatcgtcttctttaatgacatgacaagaattagcacgctcgattgcatctgaaacgagcttttcagcagatggaactagtgttcctgtccactgcatactcaattctcgacgttcattgaaccaagtcatcagctgtcgtcgtacacactccatcatttgaataatcggaagcccagaggcttcaagtatccaggaatttaaagactcagctgaattagaagtcatatgaccaagccttgttcccttgaaataagctgtggcccacaagtaaggaggtactcttcgaatccaataggcagcttcctgtgaaatctcttcaatctcaataatttttgcttcaaactccattactgttaaggcataagcagcctgccaaagaagattgataagcatggaatcgttgaattctttctgaaaactgtcactaaggaaattcaagcagaatccatgaaaagcagctgggaaatttgcttccactccctctacaatacccttttgtcggtcagacaaaatcgtaagtcttggcatgttttccacatttatctcaaggaggatgtgcagctcggacagaaaccacatccaattatcatcattctcttcatcaaccaccccaaaagctaatgggaatgtggccccatctccatcaaaaccagtagcaaaaagtacagttccaaggtacttgcttttcaaatgagttcgatcaagtcctattagaggccgacatgcattcagaaatccatatatagaagcttgaaatgagataaagaggcgttggaagcagttatcagcaggatttccataaaccagagcaatgcttccaggattcgtccttctaatctgctcacaatattgaggcagtaaccgataatcttcctcaaatgatccacgaagagcagccatgaaccgttcctttcccctccatgcctgcttgtatgataaagtgattccgtgaactcggtgaatctcttccagtatctcctttggtttacattctggattttccctcaaacgttgttccacagaatctgcaacccactggactgaggcttgctgatgaccaagatgagcaactccaccacaattatgttcttcatggatggtcctaattgtgaaggtcggtacaccaggaagctttgcagcatgaattctccaaggacatccttcacttgcacatttagcagtaaaacgagtcttgtcagatttaactgtctgcatctcaaaccgaagagcaatagctgcatctctcaacgcccttcgacaactctggacatcagaaaactcttggccaacagagagttcataattaggggccacaactagggctctagactgagagacaggttcactaactatcatctgagaatgatgaagatcaatatctgatgacgaaacaatattcatttcctgtagctgatcctcagatatactcatgctttcatgaaaatcatggctctctcctccaacagtcaattcatgattaaccgataaacccaattcatgtgtatcgacattgatagaaagtctatcatcatgctcattaacatcatcaatatggtcttgctctggttcataattattacttccttccgtgtctaaattgttagcttgaagattcttcatatgttcatgtgtagcagccatttcatcctcgtttaaccgtccaagagctaaaccatgatcgtggtcatgaactatatcaagctcattgtcatgatgggaatgtgctaaatccaaattttgatcatgagtcacaccaccaacatgttgattatgcccaagtcctaaactttgattagccccaaatgataaatcatgactttgcctcataatcacattatgactagccattacaaacctaaaccccaaatggttcaatcaaaacaacaaacacctaaagttcttccaaactgtatgtcatgtaaacctgattcaaaattaaaatacttttagattaaaacaacactaaaaatctaaaatagtaagtccaaaaatggaaacaaaatcaaaaaccaaatgccagttcaataccccaatttcacgacccagaaagggaaagaaagaaataaaaatcaaaactttcaacaaacaacattcaaagaatcacattcacaagagtttccaacgaatcaaaaaagaaaacttatcaaaccaatgcagaagaatggcagcgtagtattaaattcaactaccctaaacaacaaaaaaaggataatcaatacaaaaaaccgaaaaataaagaccgagactgtttgaaacttacagtgctgtaaatgagctcccgggtaacagacataacctgtgaacaaaccaacaaacgaaagattatgaaaagggtaattagggtttcaaaataaaaaaacaaaattgaaaagggggaaagtgaacgagttatagagaatgaaattggcgggtgtttaagggtgaagatgagaaaaaaaaacctgtaaaggaaggaatagagaagaaaatggagaatgggtaatggagagtggtggattggtgggaggggcgtgaaaatttgaaggagggaattgaattgaatcaatctgaaatgaatgccctacccttaaaaatcacttctttatgagggcatataagtcatcttcactctattttattaaaaacacatgggaaattggaaattaactttttttggaggaatttatatttgttattattgtttgtgaatttcctttcaccttgattttacaaaaataaatatataattttttagacactaaatttagaaaaatttgagaattgaattaagtcatatttctatataataaacattcatattttaaatttattttgtattatttaagctgatttttcttttaaaatatgcattttttaatgacttttaagtgattttaaaaatatatgtgggagtggatcaatcacttataattttagtacacattaatactaatacaacatataaaagaagattgaacccattttcttcattcctaacaatttttatttttctcttcaaaaagaaaaagatgtaaaattctttagtgaaactactttcttttatacaacatatgaaattgcatttgcttacgcaatcataatagactacaccaacaaggttgtaatggtgcaaagaatacaagtactttctgaaacccacttagaagaagaagaagctctctgccatggcttcaacaagcacccaaacaaaactatctcctgaaaaatactaagcaaaaccgctatgatatcgtcacctctaatcaatgctttccccctgtcctctaaaaatgagcaatcacaaatgagctataccaaaaatgtgcctctttcattatactcccatatgctccttcaagatggaacctttaccttctaaaagccgagattcaaaagtaggaagcaattcagagacaacgctttgaggcgaaacacaaatcatcttattattgttgtttccctttgtagccatttttgaaagaattgtaacttcctctacatccaaatttacattaaacaactcctcccaaaacatatcgtcgtctttgaaatttgattccttcattagttttactactttctccaagcttgccacattcctaccagcaccacaacccatagcagttgcagcaccaactgcgtttgcaattgacagcgtactagccatcggcaaactgtttataaaaccagatgcaatagcagctacaaaactatccccgcaaccaactgtatccacaacatccacctgttacatttccacagcaccatatgaaattagtcaagtatcaacaaataaacaaaatagagcatataaatttactattgccaaaaccagttcaagtaaattttcaaagaacatttagaaaacagacaaatcaacaagctgaacaaaaaacatatcataccttgaacgaaggtacaaatgatagacttgacatagtaatcaaaatcgaaccctttgagcccatttttacaatcacccatttcgtgcgcactgcttgcttgagtagttgctgcccagctaatatcggatgttctatgccagtaagagtctcagcctgaaaaatcaagaacattattagataaaaagattataatatctttggctatcaaaccaaggcatgattgaccaactaagagatgaatccattgacaataaaatagagaagaaccataagagtttaagccaagacctcatcagctgttagaagaaggacatcactcttcattaagagatgattaagtgcttgctgttcttccattgttccagcagaaagactctttccccgaggtccgggatcaaaaaacactgccgttccaacttcaatagcatactctaatgcagagacaattattccaggtggaagctcatcaaagccataaccattgcaaaacagaatctttgagttttttatagccattttcacatcagcagatagttttctcaaccaactaaaagcagggtccttactgaaatcagctcgactgataaaaacaaataattcaattcacgttacattctttacaaaatcatacaaaagcagcaagctacaacataagaactataatgcatacctgcaaaagccatgtctttgcattgaatccactaaaacccaacacagaagagtttcatatgaaccagcagaactcttaaccaaatcattatcttcattcatctcaacaaatccaattccttcatcatgaagcacatcaagaagaaaacttccatatatttcattacccacatgaccaatagcaacacagtttaatcccaatctagcacctgctattgccacattacagttcccaccagcttcccaatatcgctacaaaaatgcatgaatcttatcaagatttcaaaaagaccaaaactttcttcggtcttgacaacaaatctaaaatgggtcaaatgcatttccacatttttggcataaaaacaataaaaaatcttatacaaaagagcaaaccttatcgggagccgaggcagctaaactatccatataagctttacgatcctctttgtttgatgggggcaaagtgggaacattgaggacaacatcgacgcagagattgccaagggtggaaacgtcaacggctttaagtgcgactccgttcttggggtttgtatgttggaggagtgaggtggagccattgagagaagtcgccgaagtggagttagggttaaggctgtgaacttggagaagaggggtttggagggtgaagttgggggatgaggtgaagaaggagcaatgggaaggagagagtgtggagaatggtggtttagggtggaagggagttggggttttgaaattgaggggtttagcggcgaagctatgcattcagacagatttgaaggaacagagcaaagaacaagaatttgataatcaaactgaaaatcaaaatgttttcaagaaaatcttaaaaacaacccttttatagtttctttataggaaaagatagcctttttatttttactattcaggggctaacgttacaccatattggtaatggaattcaattgacaaaaaaatataaatataatggaataaataaaaaataattagaattaatattaaatatatgttgtttattaaaattgtttaaaaataaaataataataatttattttgtttaatttattaaaaaattgtaatctgaatacgtagagttattttatatagccatatcttaaaaggataaaattatcattatatatttaatattaaaaaataaaacaaaaacaaataaaatctatttcctttaaaaagtagaatagtattttttcacttgtttaattttaataaagtaagtaaataaatataaaaaaatgaccacattattattgattttcattacttattagtaacatgttaatttaaaaactctaacttagaatggaaaccctttcataacttaacttagtgtgatgggatgaaaattctcaaataagagtgttggggcgatttttgataattttttcaaactaatttgtacatgtagtttttagaatttttcaaaccgcacacgcaccgcgaaactaaaaccatagaaactgtaccacaaaaaatggtgtggtgcggtttatgc

SEQ ID NO: 16967 - DNA, 5726 bp, Cannabis sativa
agcagattttagttctattgctagtatgtgaagcaagcaacaacaaggatatttcagccttaccattcgtttgctaatgtaaggttgtatctttactggctcctcatcctggtttcaaattaaaaacagattgcataactgaaggttttagttctagtggcagtttaaaaattattagagttagctctacattgctaatgtgtagaaataaaatgtcatatataacatgaatggactactcccctctagccaattagttttgagatgaaaccccatgcaccttaaacacacactttcaaattctaacaaaaatcaatcaataaagtgagaaattagccttaccattcgtttgcttatgtaaggctgtatctttactgactcctcaaactgactttcaaccttgagtacattttgcttttcaaactcaaattctttcctagactcccttcggctacctgattgccaaactctaccaaaatttggaagccagtttgcatcacactcgtccttcacaagctctcctctcttttccatctccatctccaattttctcttttctgcccaagctgccccaaccctttttggattcaatttcttggacttccctgatttacttgatgaagaaacaaagctacctaagttcggtttgactccaacatttacttgactttctccgaccgcttcaaaccaaggaggaggtgctccagactgtacatttcctccagtaacctcaggtacacaaatttgggtaagattctgcacacctgaataaaagaatcacaagataagaattgttccatgaaaatcgaagaaaatggggttgatcaattttctgaaaaagaaaaaacttcccaaacaattgtgtctcgattttactgcaatatcggctattgaacactaagctctatataatgtgaatatatgtcacattaaaacaaaacataagactggaagaaaagtgagaacaaaatgtaaacaaagaatgattacctgctacaccattcaaattcttggaacttgtaccagaatatgtaaccagaggtaaagaagagatagtatcttctgaatacatgccaacatttgaaacatccatgattcctgaatgggatacctgatactcatttgtatgattttgtaaaggcataacaccggttgaaatgcttgaatcaaaataatggacattattatttgtataactattattatctacatagttgagttcattttggatatcattggaaggtccaaaaactggtccatgagatgcttctttagatgatacagctccattcttcaatgatttacactttttctcccactgcaatgacatgaaatcacaaaatattaaaagcttagctttgagatcacatataaagatacataattcttttcttgaaaaagaaaacttaagaaaatcaattaaactcagagaaaagtacagggacatgtatataccatagtaacatcagcttttgttatcctaaaattttcgatgcaatccattcctccaccatttttccacaaaaagtgcttcaaattcttcagatgacttacacttgccaagtgatgaattgcattactactgaaaaaacaaatttcatagcatgaattttaacaaagaataatagattataacaccaaatatcaagcaacattgtttggtgctaataaaacgacttaacattcaattgggaaagaaaactaagtcccctctcaattctattctcttcctacgtttaatattttcctcaattttctgaccacctaaacataaaacaacaaaaaattgaaaacattaataaaattctcaccaagcaaaagaactaccgatctcatcgatgtttttactgcaaaagacgcaccatacgcggttgtgagaggcgtgttcagggaagagaattgtaggatttttcagaaagaagcgaacatcggagagcttggtctggaaccgagagaagaagtcggagagggactttttgtgggttgggaagtacttgtggcgctggccttgatcatgattcagtttacaaacttcgcagtactcgaattcggaaaccctcttcctcttcttatcgtctctcttggtagtcttggtttcagaattagggtttgatttagtctcggcatgccctacctccattatcgtacggattatggtattacgtcttcagacttcagtcttcttctccccgctgcaactcgtaataattaggatatttgcagctaagccctaaatatttacatttcatacacatatgaccctataaaaaatgagaattgctaaaaagtactattagtgcctaacataacatatcataccgttattattttaattaagtagtgatttcaaaaataacttttaaaaaacaaattatagggtgtcaactatgaaaggtactagacaccactgatgcctaatagcaatgctaaaaaaataacaacagtgtgatttgttgattttattaattggaggtctcagtgtgggttcgaggtcgtgatcgggttctaaggtctagattagggtcggtgtctaaaatattgattagaaaaaaaattaaaaaatttttgaaagtgacttttttttattattattttgattcttaattaaaaatttgaaaagtaaaaataattttataaaacataattttggaaaatattttcacttttcgaaattaaaaaaactattaccaaatgcacccaaattaaataaatgggcgcaatgatgcaacccctaactgtttcggcatctataagaattttttactcttaatttttttatattcgtgtacgttatagttatttaaaacaaccttcaaaattttgaaaaaatcgaaatagtttacaataatagaaatcaatgttcaaactgtttatttcacacacacgtataaaataaaaaaaaaatacgtgtgttataaactctttgaaccctgttttcgacgtgtttgttaaattttttctaaattttttaatattttatcaaatgttttaaataactaaaacgtatacaacaattaaaaaaaattagactaattttttttctttagatattggaacaaataaggatgtattagtacacttattttaagggaatatattgtaaaattttcctaaactattctatttccatcttttccgcgatggatcttcatattctaaaacaaaagaaaaaattaaataaaggactctttttctaaaagaaaaaatatatcccaaccgagtaagaatacatattgtttaaaaagtaagaactccaaattaacaaaaagtttcttcaaagaaaacataaataatcgaattatctttttgacggtactaatattactgaaaacgaataagtattgagatagatatcatacttttactaggacaacatccaaaggtaatctaaaaaaatgatttcaacaaccaacatagaaaaattagccgaggcaattttcacgaacaatgcaaaggtacaattcatggaattcgggtgtctcggaatgcccctggggtatcccatcttatgtttgcggacgatactattctatttctcagagccaatatctctgaagtggaagctttactgcagtgcattgaaaaatatgaagcttggtccggtcaagtttgtagcaaacagaaatcgggtctccttgtgtcaaagaattgtcaaccgggtgtgaaagccgctattcaaaggattttgggggttggaaacattcaaactgatgaaaaacatctgggcaacccgttcttatttggtcgcagcaaaagaagggacttcaattttattaaatcgagaatgtgtgaaaggcttgaaggttggagacttaagcacctctccaagattggcagaatgacttttattaactcagtggccctctccttgccttcttattccatgtctacgtttaaaattcccagactttcttgtatggaattggactccattgttaggagattttggtggactggatcgatatcggtagattccatcagatttctgcctgttaagtcttagaatgctttatgtcagcccaaacaaagagggggtcttggtttttgccagttcgaggacatcaacgactctttgctttcgaaattggcttggcagcttgttaccaaagaagatcgcccatggtgtcatgctatgaaagccaaatatttcccaagggagtctttttggagtgtctccggaaaaaatacagatagttatgtgtggaaaagaattttaaatgccagagattgtgtggctaatggatcatgttcgattattgttactggggaaagcatcgacatttggtggcaaccgtggataccttggttgaactatgaagaatttcgggaagtcatggagaatgttagaaccattgcttcggcctgacttgtggccgacttattgtaccgcagttcgagaagttggaacaattgttatcttaagtttctttttgggactgaactgggtgacgaaattgatagaattcagatagtgaagaatggagaagatgatttcatagcttggaagaattccaaaacgaggaactttactgtaaaaggggcctattgggatgctcaaatacacaggtttggtggtgtgaatcgtctttggggttggatttggaatgccaaggtccatcctcgccttagcatgatgatgtggcgagtgtgtgccaatgttttgcctactgaggatatcttcaaacaacctgaacacagcaactgctgtttctgtggcgtttctcgtgagagtcctctacacttgtttgctagttgttcctttgctactgccttatggttttgttgtccctttcctgtgcgaattgataccatacaagctgacagtattactgatttactaagaaggttgtgtgaaggagccgatgaagatctaagaatgctttgctgctatgcggttattttcgacatcatttggaatatcaggaacataatccatcatgataaggatgcgatttggagtgtggatcaggtaagaagggagattcataagaggttttttgaattttcctctgcccaagtttcgagtcctacgggtaagggggaaggtgttgaaatggctgtttgtctcaacattacaacaaagtctgtgctggttgtggatggctctttctctaatgacaggtacggttgtggtgttttggctcttgcgacagtgctcttgctgcagaattggaagctatcctttttggtatcaagtgggcgctggacaatggttgggatagcgtttcgatcgcgtccaattcaaagatcttggtcaatgctttccgtgccaagaagcctcctgattggcaattagctgctcagttcttttctattttaagtctaatgaactcttttactacttgttgctttgtgtttgtcaaaagaaacaatatcacttttgtggatgaattagctaagaatgctagacattctcaaagcggttctttgaactgtaaaggggagggatttctccctgtgaatcccattctcttttggcgttaaacaatcctgaactgaggttccttttcaaaaaaaataaccaacataaaaatataaatttttgatactgaaagaattctatttagtaaaacgtttcttaacaaaaaatgtagatcaataaattatttttaaaatagtacctagatcactaaaaaaaagacatacgaggagacaaatatggtggttttacaaaaagatgttttttgaaaacggaaaaactaaaaaaaaaaatataagtacgaacc

SEQ ID NO: 16968 - DNA, 5811 bp, Cannabis sativa
gaggtcaaaccttgtccaccccagaagagaaattcgtatattcatcacttttatctttagattttatgatgttttaaaggttcacagaattttatattacaaaatttgttgcagttacttctggttaaatcgaaattaatcgaatgtaatattaagttaatttggggctcttgctttgtaatatttgtgtttggcaggtggttgcatagaatagatggcagcagtattggcttcccacagctactgttgccataatgcagagttggtaaatcaagagaatcttagtttcacggcttcgatttctgttcaaaagttaccaaactatggtgggagagggagatgtaatttacctcgtactgttcgaaatttaaggtttcaagtgcacatgcaacagactgaattgccacctaaatcgagtgtcaatggaagaccaactgtgaagatggtaccagcaagtgaggtaatgaaaagacaaacacaagtggagaaagtgaatggtgtgaaaaaggtgaatggtgcagttattaatggagctggtttggttaaaagcaataggatatcatcatcaactcttgttaataacaaaccaaaatcaaaaccctctaaagaacttccaccattggaggtgtcaagggttttgccaacagatgaagggttcagctgggccaatgagaactacaactcctggcaaaggaatatagatgtttggtcctttgtagtctcgtttcgtgttcgtcttctgttggacaatgcgaaatgggcatatgtaggaggcttcacagaagagaagcaggtgagtattggggctaatttgcttacatgttcacttgctgaatgtttagctagttgcaactttgtatttcttgctctgcctttgagtgattttgggaatttaattcattcagaaaaagagaaggcaaaacactgcatcatggcttcgagaacaagtgctgcagcttggacctacattcatcaaacttggacagttatcttcaacaagatcagatctattcccacgtgaattcgtggatgagcttgccaagttgcaggtaaatttcagtttccattgctgtatttgaggtgacacataaagatgggagtcagtttggtacatttctccttactaatcaagtatctcttattgattttttgcaactctctttggatataattcaggatagagttccagcattctcgcccgagaaagctagacgttttattgagagtgaactgggagctcccattcatattctgttcaaggaatttgaggaccaacctattgctgctgccagtttgggtcaggtactttagaaatggttaatccacttcgtgttatgattgaattgcttgaatattcacatggataacaaattttagtttgaaaatgatgtttaaagaaacatagatggtcagtatgttctttgaatttcttaatcacaagacatgaatgtttaaatggtgaataatgaagctatgaattacctacagttctccattttctggattcacttctccagacattgattctttttttatttgacataggtccatcgcgctatcctgcataatggagagaaagtagttataaaagttcagaggcctggtctcaagaagctttttgatattgatctaagtaagcaatgtactttttattttttctggaataagggtattcagcttgccgtagttataaataagtaaccattatagttgctcgttttgctcatcaatctgactgctgctctttcagcatcttttcattctagtgtagtgtaatgtttgttgcatattttgttttatatatgatcaatctgaaacaaagaggtcctaggtttgaggctcagacttctactttatgccttcttcccctcattagttaaaacatacattctttgttggaaagagcataaacagaaatgtatataactgatgagaagtggaaataaaaaagtctcacattgtgtttagtctaattcccgtttcgttaggtagacttatttatgtgtagtaaccttcacaagagggaatagtatattgttacgaaaccagtcacagaagatacatttgtttgatcacaaaaataaaaacacttgcaagatatatgccattttgatatgcatatgacaaaaacatatgagctattttttgacatttagcaattttatctgcatcttatgtatttctgctccttccatccagaaaatttgaagataattgctgagtactttcagaaaagtgaaacttttggtggtccaagtagagattggattggtgtatatgaagaatgttccacgtatgtcattctgtttcaattttttttttattttttattttctagctttaatgcagaatgcaatggtaaaccaaagttagtgcatacatgcacatacgtattcttattcttttacatactgcagaattttgtaccaagaaatcgattatataaatgaaggcaaaaatgctgatagatttcgcagagattttcggaatgtaaagtgggtccgagtacctgtatgtttctttctaaaccactattagaggactgatctagcaatcattattcttctttttattttattttttcatatacttttactgtacgttggttttattatcttggataaagaaaagatgctgctaaacattcaaacttcaattttaaataacaaaatgtctcctacttgtagttggtcttttgggattacactgccatgaaggtgctgaccctggagtatgtaccaggtttcaccctatactgaagtatttcttttgtttcaacactatttcggtatcatgtacaagctttagcttttgttggtaactaacttatcaatgctgtgttggtaggcattaagataaatgagctgaacatgctagattcgcggggttatagtcgttccagaatttcttcacgtgcaattgaagcatatttgattcaggtaatcacttctctttctttgattcatacagattgttattattcagatttatttttatggctaatacataccaggtaatgtgtcagtatgttttgttacactttttactacactagattatcagctggcaagaaaaacttaattgagcaaatacgccattgattcacttgtcattcagatcctaaaaactggtttctttcatgccgatcctcatcctggaaatctcgctattgacatggatgaagcaataatatactatgattttggtatgatgggagagatcaaaacattcacaagggagagattacttgaccttttttattctgtttatgaaaaagatgcaaagaaggtattcatctgttcattggttatcactattgactaaaatgttaaactatccagtttttctttgcattgaacttaacctgactaatgtcacctaccaggttatggcaagtctaatagatcttggagcactccaggcaaccggagatctgtcaccagtatgtattttgcctgttcccatcaactttttttgaccgaaaggagcttttacttgtatggtatcatctgtagatatgcaaagttgttcggttcatccttcaagttattctgtactctatttcaggtaagaagatctgtgcaatattttttggacaacttgttgagtcaaacaccagatcagcaacaaactttgggcgcaattggcgaggtatgaaaataaaaacacttaaattttaagtacaaaagtcattagcatagcgtagtaatagtacacctctcctctcaaagaggaggtcatgagttcgaacgccccctctcccaatattaaaaaataaaatagtacaaaaatttacaaccaaaataaggtagatactgtgattctagaatggaactgcacacgaacctgccatcattttatcaatgaattcatctcttgacctgttaatacaattgtgtatcacactgtttttcttcactctaaacaaccatatacatgttctataatatgaagtgttgattctcttatggcaggatttatttgcaattgcacaagatcaaccttttagatttccatccacgtttacattcgttatcagggcattttctacactggaaggttgctctttctcactctcattcttgccttaaaaaaattaatatcaccaaatgtggtagtatctgcagtgatcatgtaaaaaagatgtgacagcataccattcttatcttaactgagtaattgttgtggtttttataggcataggctacatccttgatccagatttttccttcgtaaagattgcggcaccttatgcacaggttctaatttttctaaacaatgattaacttataatctttttaaaaaaaaaaatcctctgcaataactattactatactcaatcaacaggagctcttagatttgaaacagaagcggccatcagggacacaacttgtacaggaaataaggaagcaagccgatgatgtaaatgaatctaccttgactcttcattgctttagtttccttcagattgatgaatccgaattagtattaacaacattcacttataatgctttcaggctagaagctacaccatgtccatgccatacagagttcaacgcattgaagagtttgttgaccaactagactcgggagatttgaaacttcgagtgcgggtgcttgaggtattttctttctttctttctttaatatataatcattcatttcagtcttttaaatttatagcaatagttaaaatcaaacatgtttctaagaaataacaaagaaatcgtgcaattggcagtcggaaagagcagcgaggaaagcaacaatactacaaatggcaacaatgtatacagtcattggaggtaccttgctaaaccttgggatgactttgagcagtcaaggcagtcaagtttttgcaaatggatcattcattggtgcaggtgaccatgttaaccctttaaccactttcatagtagtttcacttaaagagaaagaagaattcattcttaaacctattgtttattttttttattcttttccattgtgcaggagtctttctggcattgtttggtaggtccatgcaaagggtgaagaaacttgataaattcgagaagatgatatgatatatgatcactcaccacgcaaatcaaatccatttctttataataattcttcatcaaaacacacacgtatataattatatacatacttgtgtgcaagtgtgttccgattcttttacttgcatttaacacatgtaatttcatatagattactgattacagaagatgaagcttcccaataaattgggagctgatgcattgtactaaaaggaacattcttacactgtttatacaccaaaaaaataatttattatagaaaaattcatcgggagttggatataaggaaaataattaactttacattttactttttattttattttaataaataattaatatctgacctttgactgaaactgcaatatttaggagacaaaaaaaatctagcaatttgtttagtataccacaaaaaaatgaaatacaaaccttatgaagatgataaacccacccgctggatacagtgtgaaaatggtatagatggaaaatatgaaatctcagctcaatcgagtctgagtgaaatgcattcaatatatagctaggtattacaagaaagggccactctaacacagacaagtggcaaaatacaattggaagtttgataacagaattaggcacaaaaagtaatgcaatcatacaatcaaagattctaacagaagaggaatattcagcaaacgatgttgacagggagaatgctctgctgaggtcaggtgtaggctagctgaagctgtgaaccatttaattcttaaca

SEQ ID NO: 16969 - DNA, 5763 bp, Cannabis sativa
ttcttatttgtttattactaaatatataatagtgcagaaaaatatacaagcatacatatgatattaatctttttatttttgttgttactttactttttttataattttttgttgattattattttatttttcttctaaactttacttattagtatataataataaagaaagttacatgtgcttattacattttgacaatatgactgatgattttaggttccataagcgaacctatatcttcttgtttaatcataatttttttaactattgtgtgaacataattgataaaagtaagctatataattacaacccacatgttttagaggaattaggtgcatgtgacacgtctaccatgccttgtatatatatacataagtaaatataatttttgaaaatttattatatataaatatatataaatgtatatagtaataaaatattaaataagaaaactttatctttttcattaacacactctctcaacatattttgtatgtataattaattaattaatatatattaatatatattaatatatattaataattatgtactaataacttttcttcctatcttgcgtcttgagagttttctctttagggcttgagtctattgtcgctagtggtatttttcttcctcttcggccatggcttgtcagatccactatggattcggttgtggccattattgggggactgagagggcttgttgtagcatatttgaagaaagtttctttctaaggaaggatcaacatcatttgcctttgatttttaggggttttattttgtagttgttaggatgaggatcaatcagatatagtgtggggttggtgttagtagatgatatgttcctaatgattgtgacacagttccgaaatctaccttagtggtgtttagttttttctttaatcccctctggttatgttatttccttttatttttatttttaagagggtgtatatcttactgttttattttattttaataatagtgtgtttatatccctatttcatctccagtcctttttgagtttggatggacatgttatttttggtatcttttgacaccttgttttatggttcattgatatttaatactggaattttgaataggattcgtcatgttattctttattattctagtttgaataatttgtgttttcccccatttttattggcacatctttggttgattgtcattaataggtattacctgtcacatgttcattctggatgtaaatctatagtattcttcacaatgtttaatgcttcaaatttggcggcttatgggtcatttagttgaatttaatgtaaataacttaattagcctatttttgttgattttactcgatgagaaatatctgcatgttatggattatgtttggtttacctattagtagaaattctatctttttaaaagaacaattatgtactgataggtgtgatttgtcacatgatcagtcgggctggaaatttagcatttttggcactcttttaatgctttaccgctagcagcttatttgttttttagttgaaggtgttgttgggagtttttttcttgttatttgttagatctctttgacatgtttggaaagtgagaaaaatagaaagaaaatgcatatgaagaggaagagaaagagaaagggaaagaaagttttcgagagtaatgttctaatatgatttgtcactaatgttactatttatacaatcaaaacctcatcatgcgcaggataagctaaactagaatcggttacaagctgaaaactaaaacattaacaaactcaactactctagccaacttgtaccctaactaacatgactaattctgttatcataagccctcttaaactggaaataggagttacttacaattgctagtttgttcctgaagaaaggaaactttgaattttagatagcctttgtcaacccatctgcaatttgatctaaagatggaacatatttgacttgaatcaaaccttatagaactctttctctgaccaagctctatgtgcttagttcttgcatgaactggattgagtgtaagcattacaaaggttgtcacacatgatgacagaagcgttaggaagctaaatctgcaactctaaaaacaaggaacgtggccaggttacttctgcaacactgacaacaaggcttctatactcagccttagtacttgaccttgagattgtgtgttgttatctgtattttcaagtgactaaattggacacaaaatagatagcaaagcaagaggtaggttttctatcatctgggtcagatgcctagtcaacatcatattacccaaccagatgcaaatagcaggcttttttagataaaggttttcgacagtgaacattgatgattttccccttggaaatcttggtcactgtccccatcgtacaaatcctccttcttccatcactttcagagctctatcaatgaatcttgttgctcatcatcatcttccttcttctaccagatccatgtcttatttggaaacccacgatcgtccggctaacgaagacaatccgtatttcgtctgttcaattgatcatccaggactcatccttcttactccacctctcttggaccataactttcaacagtggcatcgcgacttcaatcttgctctcgatagcaaaaatatgacaggtttcattgatggtatcttgcgacaaccagctctgtccagtccattgttccattcttggatctgctgtaatcaaatggtcatgtcgtggattattcattgtgtttctcttgatataaaaagaagcatcatgtttcttgataccgctgttgacatatggaatgaactcactaatcgttttagttaaggcaatggcccttggctctttgagctccaagaatctctcacggacttacgccaaggtgacgattctgtcactgcctatttcactaagcttcaggcaatatgggatgacattaacaaactttgacctcactttccttgcacttgccaagcttcgactgataaccttcagttccaaaattaggagaaggttctctgttttcttactagtctcaatgagtcttaccaagcagtttggcaccaaatcttgatccttgaaccttttctttctctttcgaaagtcttctctaccattattcaacacaaacaccaaaggaagcttcacactatcctgaatctcatcgttgctgcctctacgcttcctcctcacaataaacggatgcatcctttttgccatcattgcgagaaactaggccccttgaaagagaaatgctacatactatatggtttcccctagctataatgagaaacgcaagtctgattcgactcaacgctctaatactgatcgaggtcaatcctctaaaagtcccactactgaccgcgcccaacctcctaagggtcctactgctcatcaagctttcacatctcttgatgtgtctgaaaagcttgcttctcttcaggagatgatttctcagcttattactcaatagatacattagcacaatcttccattgatgtcaccactccattggcatcaaacatcactagtaaatctgaaacgttctctacataaactttggattattgatagtagtactactcatccaatttgttttgacaaagcatgctttatttctttttagaaagttcctattgcttcgtgtatcactttacctattggtcttaaaatacctattcatagttctggtacagttcggttaaatgaacatttatgcctcaataatgtgcttttcgtccctgaatttcagtttaactaataatctgtttcggcaattactacaaaccatgattataatgttttattcacccaaaatgcttgttttctttaggacacatctcataatttatggattgagactgctaatcgcattggacacattttctttctccaacaagctctggttcccacttgtaattttgtttcctcttgtaatgatgttcaaaagtggcacttacgctcagaaatccttctgtatgcattactaaatcattgaataaaacattatattttttggaatcttctccttgtcatgtttgtcatttagtcaaacaaaaaaaattactttttaattctactaacattatggcatccaaggcttttgatttaattcatttagatatttgggaaccttttcacaccataagcatagaaggttaccggtatttccttaccattgttaatgatcttactagatttacttgggtttacatgctcaagtgaaaatctgatgtaaaaactattatacctcaattttacgcttatgtgctcaatcaattttctatctccattaaagggataagatgtgacaatgcaaaagaactcaacttgtcttctttttatgcaattaaagatattctccctttttactcatgcattgatcgaccacaacaaaactgtgttgttgaaagaaagcatcaacacatactaaatattggtcgttctcttgcatttcaatctcgcttatctcttagatattagagttattttgtgaatactgtcgcgtacttaatgaaacgtacaccatctattttacttcaacttaaatcttcttttaaattattgtacaacaggttacccctttacgatcacttcgcatctgtagttcccttgcttatgcttccaccttggacaattcaaggcacaaattttctccgcgatctcgcacctatgtgttcattggatacccggctggtatgaaagcttatactttacttaatcttgaatcttaccaaatatttcactctagagacgtcattttttatgaacatattttccccttacaaatacatattctgatgacactattgatatttttttttcctaatcctaacacttcacctagtggtacatctcaggtgctttcacaggaagcggtcccgagcattaccagcacccctcaagtgcccacaatagggcctattccagccactcttagcccctcaccgctgcccgaacggatgggtgttcctcccaccttaaatgcaccattgcagccatcataagtgtctcttccaaccactaaaaatgcagcaatttcacctcctttggcggttgttccagcccccacgagtggtcctaatgtcacaaaaaaatttgggtcattcgcccaactcatctctaagactatctttgtgagttttctactacttatcccatatcaaattgcatctcttatgaaaaaaaatttccaagttttcatgctaccattttaagtgtttttttggtctctgaaccaaccaactattcccaagcttcaaaatttctcgtgtagataaaagcaatggatatcgaaactattgcacttatagccaataaaacttggactattgtctctcttcctgctgccaccatttcattggcaacaaatgggcatataaaataaaatataattcccaaggtgaacttgaaagatataaatctcgcttagaagggtactcccaacaatttgggatagattacctaaaaacttttgctccggtagcaaagtttaatactgtaacaccctcactattaggcacgctacccaagatgattaagaaaacctaatcccctagacgggattactagttaaaaagtgtgggaaattaaactttaaataaaacggaatgaaaataaacttgtaacaattttaacgttataaacaaagagtacatgttttgggatcccaaaatactttacaaaaatattacaagtttttccactagtcggcctaagcagcaaaatagagtaacaacagttcatcgctggtagacc

SEQ ID NO: 16970 - DNA, 7571 bp, Cannabis sativa
  modified_base (60)..(61): a, c, t, g, unknown or other
tagattttagccactgcaaatgtatgttggtaaaactttgacctctttgccagcgcagtnngcgaaatgcgctggtaaaagtaacttcagcacagtagtgaattatgctggtaaaagtgacatttcttgtagtgattctgtttgttataaaagtttaaattctgcgttatttttgattagtaatcccatttagggtgttacaaataatatttgagagtttactttttttttacctatagcccgtttaaactcaatctcgctctgtccctagatatcatgttcatggtggcaaatataacaatgctctttatagcgtgtgagcccataagccatattatgaacattgtctgtcaatatcattgaccaatcttttggacttatatttaaaagattatgaatcattgggaccgtaatactaaattagtgacactactttataattctatattcatatatagacgatcaatattggaccttcacagtaataatctcgagctaggcagcatcgcttaaatgattatcaaataaaaacaacaataaatgctttacatttatatatatatgacattacacgcacactcgcataatagaaaagctctcataatgaacaataatttgattgtcacggaattgttttttccaataaataaattaaaaaaaaaaaagattctaataagctttcaacatagagtgatatgacaaatttctcaaaaaagtatagaaaaatatgagaaaggacaattataatagtggacattagtgaatgatgacactatcatccccaaaagatgttgcgcagagaaagagagagagaaagtttatctgcatacgtacatagccctagaaggctccaacaaagagcaacaagcagatataaatatgtgagttcacttaaccatttccttaggaaaaacacagcacttctagtactgttttcctcttcactaattcctccaaacatcctatatattgctaatatattacttatatatttattagtattgtgtgtgagcaaaatggtgaagctaagcaacttttatgaaacctccaaaccctactttgccatgatctctttacaattcggctatgctggcatgaacatcatcactaaagtgtccctaaaccgtggcatgagccactacgtccttgttgtttaccgtcatgccatcgccactgctgtcatcgcccccttcgccatatattttgagaggtatttatatgtacttacttatctttttgaaagaaaatttgctgtccccaaattggtgttccttctctgtcccactaattattttacatatcatataatacatataaaataagtataaataatgtgtcctgaaacaattggtgggaacaaaaaaagacacatcaatttgggcacagctgatttttttctttattttactagctatagtacctttttcgcattaaaaatttattattttgttcatgtaaaaggagaacatgatcatcactaaattttttgtttcctcttataattttcaggaaagcacaacccaagataactttcccagttttcatgcaattatttatccttgctcttctggggtaattaattcgtagctctaatatatacttctcttgtctatataacaaactaattaagtttaattaatcaattaataataattagaagaacattaatattaattatttgttgaaatatgttatatatgtacagtccggtgattgatcaaaacttttactacgctggtttgaaatttacgtctccaactttctcgtgtgcaatgagtaacatgcttcctgcaatgacatttgtaatggccgtcttatgtgggtaagtgtacaaaaattaaactaaaaatcttgtacatatgtgtgatattatatataagtcaaaatgttttgaagttaataattttttttttttttgttttttaaaatatagaatggaaaaggtggacatgaaaagagtgaggtgccaagcaaaagtagtgggaacatcagtgacggtggctggggcaatgttgatgactttatacaaaggtcccatagtggagatggtatggtctaggcatattcaacctaaggaatctgatgttgctgacaccaccgccgagaagcactggtttcttggctccatcttccttataatcgccacacttgcttgggcttctctctttgtcttgcaagtaagtacatcatcaacaatatattagcatttctatgttagaatgcggcagtatatggttaaaggagtagagtaggtgaatgtgtggtaaggtgaatgtggttttatctcaaaatcaattaacaataaaataaagatatcttatatatagtatttagtttcaaacacattatgatcaggtgtgtccagcaccactaactagttagtacaattaaatattaaatactattttactttaataaataataggctgggtaccatattactactactatttaatctaatctaatataaatgttcttaatttacataagttcggagtggaccatcctaaattaagaataaattcactagtacgtagcatggaatatacatgcagattaatattattattataataatgaattttctaaaaaaaaatcttatttttagtcaaaataaaacttgtgattaaataaaagtgaaaaagttgtaactaaatatgtttttagtcacaatatttgttatggataaaactaaattagtgacaacttgtatttaagtattatgttttagtccgaaataattttttattgtgactaaaaatcacatttaatcattaacaatttatatagtgactaaaatattatcacaattttttcttatagtcatgattattgagtagtggacttttgtaataattttgtcagaacaaggcgttaaagacgtacaagaatcaccaactttcccttacaacgttagtgtgtttaattggaacaatacaagccgttgctgtcacctttgttgcggaacacaaactctctgtgtggagcattggttgggatatgaatttacttgctgctgcctatgctgtaatactctttcctcatctctctctctctttcaatctctgtccatatacatatatatatataatgaattttaataattaactaaaagggttatgaattcgttttgataaatatatagggaattgttacatcaagcatttcatactatgtccaaggcatagtgatgaagaaaagaggacctgtgtttgctactgcttttagtccattgatgatgatcattgtagccatcatgggctcttttatcctggctgagaaaatttttcttggaaggtatatatacatgcatttctcatcattatataatatatatatatacatatattttcactcaaaaaatcactttttagtcgcaacataatttttttgtgattaaatgtgacttttagtcacaacaaatgattgcttgtgatactaaaacataatatatagatacaaattgtaattaattgtgactaaaaataaatttagcataacaaattgtgatttttgtaactaatacttttagctagaaaccttttagtcacaacatcgtaagaatgataatttttaattaattataatttttttaattttaaattttattgtaactaaaagtaattttttttttggtagttttcaacaaaaataatgtctaattattcaataatgcacatgtataaatttcaatatatattattatataaaaacattactaattatttcattttttcaacgttcattaagaataatataatctgtctatatgcacacatgagaaagaataatagacacaaattaatagtgacaaggaacaaaagatattctatgttctttacacttgttgatcttataattaagcgccactatatgtagtttgtaacacaattggatttatttttttgtagtgtgcttggtgcggttttgatagtcattgggctttactcagtcctatggggaaagcacaaagaagcaatagaaaatgaggagataccagaagctataaagtatcatcataatcatgtaaatgtcattaatggaatttcagtgattgaagatattgaaactaataataagctgggagatgaacttaagaagggagatcaattattgatcaataataacaagcttataatttcctctgttgccataagtttgcctatccaagatccatcaatgaaacccaaccaattaccaaaggcctaatcaaaaatcaagtgaaataatgggaatattgtggggatgggcttttttgtcttcttcatcctcgatttttttttctttttatattttagatataaatatcagtttacatttcgggttttgcactatgtagtatgtatgttaatgttaaggagtaattaatgaaattaatatattatgataatctcatcatgacagtcttttctttattttcactcatttttggattattatttataaaattattatatcatggaacaaatatagagaactatttatcattcaagagaatggttaatgccgaaagtaatgaagcaagaaattaaacaatcatcaattggactcgtatcactttttattcacaatttggcactcgtttcattaacttggaatacataattaagtttggagggtaccaatacaataagtgggaaatttgatttttttaggcttaagacgagaccaaaattaaaaaataagctaaagtaaattgaacactgtggtgaaaaacacccttaattattgaccaaaaacagagtcaatacaacaagaacagaacataacaagtaatcacaacaacattcaaaccagtacacaaaactgaatcggacaatgaacattaaataaacttagctttgaatcaaatggaactttattcaaccatcgagcacctttacaatccgagcaatgtactcaattgaatctaagtgtttaacatattacaaagcaaacctcacatggtagaagtcacctctaaagatgagcaatttatctacaaccctcctaatcactcacaaatatttgacagaatttagagagaaaaatagagagaattttgggtgagaatggctcggattggaactgcactaagagtagttttggtgcttccttttataggcattggttttcaagagattagttggcttaggtgtcacgttagataactaacttaactaaccaatgacaagaataagatgatattatgaagtggcattagctcattgggacaaatcatactacaaacaccccctattaaattgatgcttatctttccttaactccaaaaatcaaatttctaaaatctatataggagaagcataggataggtccaatattgtcttgttgatatcagatatatatcaggccctgtatcagacttatcgtgtcataataaaatttaaaattataaggaccatcgggccctatatcggatctatcgggctatcttcttcaaccttcaaccccttcaacattaacctaccatcgggcactatattggacctacatcggacctgcattgggctagacaaaaatcacagattaccccccacccaaaacacagatatgagcctaaaaacctcaaaaatcacatattctccactaaaaacacaaatctaaccctaaatctaattgctttaaccctaaatcatgaaaaaaaaaaattacagttaaaaattcatgaaaaaattagggactacctttgacgaagacattgtcggcgttgggtggtgtggttgcaaaggtccgtgggtcgtatatgggtcgcgaggtcgaggtggtccgtgagtcgtgtgggtggtccgattatgtgctcctccttgtgcgtgtttacatagagcgagtgagagaagggggaaagagagagagaggattgttcaaatgggaggagtagaatgaggttttaggaaaaaatgacttattcaaccaatattgaatagcttaggtttgggaaaataattttggcccaataaatacataattagtcaaatttcccttaattaatcatttatttatttaaaccacttattcaaataaaattaaattataactataattataatttaaataattaattttacactaatttatgttggttaattatttctcttaatttaaaaagaaaaataaatgactaaagtatttaaaatggtaccactaaaaagatcggaaatttgattttttatgcttacatatgcttaaatttttttccctaaactcataatatttgatatttgtggaatatgacacattttataatatccctaaaataccacacatttacatcacccactctctctcttcttctttcttttatttcactacactgtcaagtcatcgggccccatcgggcccactatcgggtccatcgggccatatcaaattctatttttttacacaggcattgagccccattgggcccaccatcggacctatcgggccatatcaaattctattttttttacacaagcatcgggccctatcgagcccaccatcggacccatcgggccatatcaaattctatttttttacacaggaatcgggccccatcgggcaaaccatcggacccatcgggcctttgtcttccttaattttcatgtgataccatcggaacggtgtcgggcttgcatcaacctacatcgggcctgacgaaatcaaaccccaaacccagatttttttgcagatcacatttgacaaaaaaaaaaaaagatctgaaggtttgccttcgacatctttgttcgaagctcgatggtagagggttggagtcgcgtctcacggtggtcggtggttggtggtctgggtaggcggtgattcggtgctcggtggtggtgatttagtgatttggtgagggtgagatgatgagagaacaatgagagagatacaggaagagagagagttgaagtttgaaaaatgagagggatattttggggtttaatgtaaagtggtcatatttttttaattttcaaatgcataagcttagggaaataatttcccccattagtatgcatatataatcaaatttcccaaaaagataaacatcatagcatacttcacaaatgatttagtattaaaatattataaaatagtacaattttttattttttgaaaaataaaatagtacaatttaatagagccttaataaacaaaaaaaaaacccggttgcctatttctattaaaattttacccttcaattcattttagccataggatataaatgtttgactttaaaaatcaatccaatgcctagtaatgtgttgaaggacgccacacctcataaagaagtgaggaattacataatttgccatttataaaatgtattattaattatttttaaatagggctttaattattttttaaaatttatatggaatgaacttataaaaacataacacgcggcattctaacaattccaaccagtactaaacataagaaaattcttcaatgcacccccttaaaatggatatatattgatgcacccttatctgttttagtacaaaaaataattttttactcaaattttttttcatggtcatgtaccttatagttatttaagacatcctgcaaaattttaagaaatttgaaaaagt

SEQ ID NO: 16971 - DNA, 4236 bp, Cannabis sativa
aatgatttgctaggggttcacattcgatacagggacccagtgagtgggaggtgctttgtaaggggatggtttttgggattgttttcctgtactggtagttttagctttgtttgttgggggttcttgggtgaggaatgctctcaaacaatctcctttggtatttatatttagaatatgtggaaattttcatttccattgaaaggagtgtcagctatgctgccctcaactgggttactcactagcttaaacttgttttgtttttcaactttaaatgtttccaaaattcagacttttatgtttatgatgaaattccgagaaatgatttattgccaaattcctgtcatatgctctatttttcccttttcccttagagatgtatgtttcctatttttgcaggtaaatttgtgctctactgaagggttttttgtggctattgtatcagtcaaaagtctatgccagctttctcccctttttgtgaaaaaagttttagcttactttatcacactacgcaaatagacataatggtgagagtttagaagttttgtgtgctagtttatgttattttgctaaaatgtgtaattttattttttattcttacacatacacagaactaatatcattttctctatttaagtttcacaacatctgtggtggttttattttatgttaggaggtgggaattaggattaactgtgtaatatcttctttacagaactaggtaataataataatatcaatacatactctaggattggtgtgtttggtagtaaaatatgaagaccgacgtggttattagataatgaagattgttaattataatttcttattataatttttttttctcacgaattcgaaaaatgtgtagtttttttttcagcggagtttattatagttataatattattcatgtatatttttaaaattttttaaatagcttatagtgttaaaaaatgtatttaaaattttctgaacacacgtagtaaactaaaatatttaagaattatgttgttgatattataaattttagtgtttttttttgaaaatgtatagatttgatattgtaattataatatgaatcactatgaaagaaatgtagaaaaaatatattgcattatgtgttttcggatgggaaggttgagaaagtggttgaaataagagattagtagcacttataatatagtttgtggtagagtttcgaggggtaaatgagcttggcaccatgctattacttgttggatgaggatttaggatgggttgaatagtatttagagtagagaactaaaaagtgagaattatgtcgtcagtgactcagagtagttttctcctgtattttgttgttgttgttgttgtacaatattttgtacggattgctagaacaaaagtggtgcaattgtttttttttaagattcagacctcttaatctgaataaacatctacataataatttactaatttaaatattaaaatatttaaactgttttttttattattattttcaaatttgaatgtttttataatgttttattttaggtatttaatattaacaaatttattagattgtattttattctaaaaaaattatccaaaaatttaagtacaaaacataattattttaagaaattttaagaaccaaatcatcttggaatgaaattcatgtgttctctgatttctcaagttgctatccgaagtcttgtctttgaacaattgccttccaaatttgagttttttaaacgtgagttatcggttttaaatttagttaaaaagtttgatgtttgtaaattttcttttttgagagtataaactcttttgcggatggtcttgctaaaagagttagaatttttagcacaaatgttggtttgttttaaagagagggatttttctctgtgatttcatattttgtttttagttttaatgatcttcggtattaatgaatgaaataaaatgatgttagtatcagattataataatttattataaatttcttttagttaatttataaattaattaatggtattaggaaaaggccaaaaactaatacaatcatcataattaaggtggcgtttggttgaaggtaatgaaatggaataaaaagaaaataattttaattttatttttttgtttagttgcatattaaagtattgaaatgtcattctaatgaaatgacatttccattattttagtaggatgactattctattttttatgcattttaaattttattacattcttatttccattcctattttcatatttttattcatcctaaccaaacgccacctcaatacctagaatgtttcaatattttaaacatttaatagaagttttaagcacatgtgccaacaacaagaagagatccatatgtgcatatcctatcatagtattattacttattcctattatatgtatctttcatttcatgatctcttgttacgattattatatgtacgtgcccttaattctattgaaagttttgaaaagacagacaagagacgaatcaacctcttgcattgcattaagaggtttcttataaaataagttaacgaatgatgttatatgctttatcaataatatcaaattttcatctcattaattactcattattatacgcatctaagttttgcccaaatatctcattaccttaataccctggttatccacctaacctctcgtatacaaatatatgattatatgtctcaagttaattggggttttggacaaaaaaatttaattggacattttttatattatttttttatatatagtagtaaaaattcaaaaatatagtattttgaaaatgattgggtctttatcttaataaaatatttaatatggtatattaaaaaataaattaggtatttttttcaaaaaaaaaaatagttatattttttaataaataattagttaaaatacaaaactatggtattttaaaaaataaatttaaggcccttttattaaattttaggcttaggtagagaccttgggcatggctcctactgttctactcttgagtcgactctgtttataagtagaaaataaaaattagtatgacgtattttaacctaattatttttttagtttgtgtatggctattgatcatatatatatatacatatgtcaagtacataaaattttatgtatactatcattgaaagagatgacactactcattactaacttttcacagtccctcgagtttcaacttaagtatatatacatgggtaaagtttttgtagttgtttcaaataatgactaaaaatctaatttttatttttaaaaaacagaagtgtgtttgatattgttttagtaaataaagttatacaaaaaaattaaaaacaacaaaattaaatgttgttttttattttaaaaaataatttcttttttcgttaatattttttcatacattttttcttaaattattttctcatagtcacaggcctgggatccagggttggacccagggttggagttcaagggttcatggtcaggtttgaagccaggtctaggaggttggagtttgggggttggggtctggattctgggttctatggtttgaggtcttggccaggtttgtgttgggggcttggtctgaggtttgagtctggtcgtggcccaaggttgggtctccaggttattcgaattcagggttcgaggggtctagggtttgatgtaggtttcagtcctagtctgaggctgggcttgggattcgaggccgagatcgggcccaagttcagggtccgcagtctgggtctgagttttggagtcgggttccaaggctggagcctaggcctagtttggatttgggattttgggctagtctcgaagttaggaccaggtgtgggtctgagttcgagtctaggatctagagcacgggttgggtccgggtcaaggtgtggagtattaaagtattttttctttgtttgtttaggaaaaaaatttaaaaatagtttttaaaaaatattaaccaaacgcatattgtgtgttaaaaactaaaaatattgatttagttctccattctaagaatacaatttttaatataaaaaacagacaccaatgccataacctaatttttttttaaacaatgtcaaagttctacttgcatacgaaagaatttgagataggagggaaaaaaaccacataattgggttggatagagacattgaattttatttaacaaaaataatatgctaatatccttacacactattgatgtatcatttatctctatttcgacattta

SEQ ID NO: 16972 - DNA, 4591 bp, Cannabis sativa
ggtctgcaatggaaaaaaacctcctgagggttcactatgtcactgtatcggccagctaagataatcgaaatggttgttggcacatagctataagaagctccaatgacagcaggtaaacgagttccaaacaatgtttgaaacaaagtgtttaaaccagcaacaaaaagtattgtttgaatcatctttgctttctcttcctaaaaaagattatcataagttaattaagagacacagcaatcaatcaatcaatatagagtcatttaacactttgtgttataacttacatttccacctcccatttggggtaccaaagaagcaggaatgagaaccgttgtgccaagcattaccaagtaatgttggaaaccaagtaagatagcttcagctgcattaaaaaatcaatggagaataacccttaaaagagagttcagagaagtctagtatggaagaaaatgatgaaaagggttgtaaatatagttcataaacttcatataactaaagagatattgaagaatggggttgaaaaaatgaagatgaaagtatgaacttacgccatggaggaggactggtaatgcaatatgagatatttggtaactgatctttgactggatgaggctgaagctcctcctgttttgggggtggtgcagctcctccacctccacctgccatgtttggttgatgctttttttttttctcttctaagtcctcacttctcttcttcctcttttacaagtctatgacacccaaaaaccattattaattctactaatacagtactatactctaatttcatagcaaaacccaattaacaaaacaatcaaaagtgggggaaacagattaaaaaactaatctttttactaataccaagacatttcaagactttttagtctccaagtccaatagaccactctctagaactactatcaccagtcagtcaccaccccataaatatatttatgcaaataccaagattgatagaccaggccaaaatcaagaaaataaaataaatcactatatacttactgaagacaggctcagactcaggctctgcagtgaaaatctctctccaatccaacccttttatgaaaaagccttttctctcaagctaaagaaagaaggaagaactgagagttaatgcagtgtaatgtaatgtaatgaaaacattgtgatgcttttacaacccaataccaacttaggggcaaagaaacataaagtgagtgtgaagatgtaagaaaaagcaaaaggggttgagaaagaaagagagagacagagaatacctcttagtgaaccaaagaatatatgttgtttttgaaatattttagttatatattaatgtgggtcttctcctcttttgttcagtcacgtaaagataaagcttgtataaaaggatctcctaatctccaccatcgtcacctttactattttctgataactcaaacttaacttttttgcaaacccattaaagttctgagtctcaagttcaaattttgattgaagattcaagatggggtttttggaattaggctaataagactaatgaaaatgttgatgagtcattttctgtttctcaagtattgtcaaaacgtacacacaaatacaatcaccatcgttctgtctctctgcacatatatattttcatttttctttccttttgttatgacacttggattctgagctgtcactctgcagagaccagtgacacgtcctcagagttggacaaaccataaagcattttcctttggcagagacaaagtttcatcaatgggtaataaataagatatgagaagaaaaaggaacaaaatttacaatgcttttggtgtgtagtcaaaagttaaaaaagaaaaacgtacagtcaactcaaactcatctcttctgtgtacttatatttatattaaattgccattaatgaaggtcctaagttgaatacacaacacataataataaaaacttccttgttaatgctaaccagataatatttccttgtaatcagaaaaaggtttgattttttcttggataattaactactaaattttttgtttagtgtgaattcttattacaatttcttagtcaatttttgtactcaaaaatatacctagaaatacttttttcaattttttttttcatgatagtattcgttaggcttacaacgtcatctttgtacatttttaaaaaatttcgtttatactgctaaaaatacatttgaagtttttttaacacacgtagtaaactaaatatcaagaattttatttgcggtgccgtaaactattcaaaaatttacaaaaatgatgttataattataacgaataccgttataaaaaaaatttaaaaaaatattccgatatgtaatttcatgcgtggaggttggctaaaaagttgtaattaaccttctttaatttttatacacttaatcttttaatttttctattaaatattaataagaattatcactgtgaacacatgtgtacacatgaaagtaaaactttaaatttaatgaaaatatgtaacgtgtatacaagcgtacacaataacaatctaattaatatttaatgataaaatttaaaggattattgcaacaaaaaaaaatcaaaaaattaaatgtagaaaattaaaatataagatggttttacctaattctttatacttattacttattagtatcaatttggcagtagtaagaatatgatgccaaataaagtgttttacttttggaactaaaatggattgtagtagatgagttttgtatcaggaattttatctcttttattgtgaattattattggaataattagtaggatgatatgaccagattccacaccatttattaaacttatttattttttttattttaatatttttattgagatgtccatattcccccaaaatagcttctgatgtgaaactataagttattttacaatacaacaaaagaaagaaattgtcttgatcttggatttgttttgagtcatttcattgaaaattgaataaactagctttcattactttttctttttttgagttttgttatatttcttttttaaggccttgttttccaaggaagcattgaaagtgttcattctattgtccccactacaacttttccaccttagtttttttcctattcctaagcttgaacccaataaatatgtatgcatattatcaaaatgaacaagcttttgaaaatggaaaagagaaaaaaaaatcccattatgtaaagaaaaagtacttcaatcaagaaattggagagtctataatatatgagttgggtttggttggtgatgtcataatgattataaagggttagtctcaagaagtttttgatcaaagaaataaatgatttgacaataatctcatgtgcattaataaaattatcattcacatatatgaaaagataaaccctaaagagtaccattggtggtacccttttatgtgttaatattgttattggtctaattaagtattgggtctcacatagtttaatataatagtttttcgagaataacgctagctaattgcaacatgacatgtcgagaaggtgctaggcactactggtgcctaatagcaatgcacatgtgaaaaggttaccaattaattaagtatgattatggcttccaattcattcattatgtccaatccactcttattgaatatttttttcttttcaagtgtcatatagaatgttggtggagtcatctttaagcatacattgattttgtaccatattaaacaatactactaaaacacaagaacccaataaggatttgattagttatatgtaatccttttgtgaaggatttggttgattggtcctaaatgattgactattcacagccatttgagatcattttatttttttgggttagcttaaaaccaacttacatagctctctaataaaataaccttagagtaaattttctgggcaaccatcctcaatagaagatttaaaatttgttaaatttagtacaaaaaaaaaattatattacatatgactcactatttataattgtgattcaatgcacaatatgtgaaataagaaaaaaataattaatcatattgatggttattaaaaatatataaaaaaaaatattattttttatttttttattatttaaataatagtaatataaaaaataaaaatataaaacttagtaaaatttaatgaattgtaataattactaaaactatattaaataaagtaacatttattgtaggctaaatttaacacaatattatattttgtactaaatttgatacaatttttagcatgtgttaaatttagaatactttttaaaacaccatttaagtagttttttttttttttaatgtactaaaatataacaatactctaatttttttttttttcacttcattaggatgctctaacgcaaaacactatttggaaatttggataattaaaggaagatactcatattaataaatatgggtgtatagggagtcgtttctaattagcttaaaccgagaaaaaggaagaacttccttaaaagcagagcaatcagactataatttaaccaagctaattgatcccatagcctaagtgaaaatactaaataaagaaataaatttaatctaattgcat

SEQ ID NO: 16973 - DNA, 7003 bp, Cannabis sativa
tcccgactcgggcgagtggcggcgagtcgagaacgtttgggggacgagtcggtgtccgaggtcgaatattggggtgggcaaagatggaaagttgatttgctgggctgattccgtctcggaagttcgggtcgggtcatgcgggattgaaatggatagtcggacctatttattcgggtcgggttgtcagggaggggtgcaggagttctttcttatggaagggcaaagtggtaaaatgaacaagattgaggtccctcaagagtttgatgggttcgtacaatcaggctgctgcgtggaggtttaatttatataaattttataaaatagaattgaaaatatgtaaaatatgagtttctttttgatggagtgttgtcttggtatcccaaaaaaaaaaaaagaaaagaaagagcagtgttgttgtatttatgtaatctgtaaatagaatattagaagttgtgtttctgttgaaactttttcaatcatcagaaaagagattttagctcctaaaacaatgctaatgctaaaaacggaggcctattgacacgacgcgatacaaaatggtattagtgcagccacaaagtagagtaaaaaatatagtacgatcacgacattaccctggatgaaaaatatgtgcaattacgatatggttccaccggaaaggcacaacatcaagaaaatcaataataataataatagaatttttgatgctaaattttggtgtgaggtaatgaaatagaatgaaatgaaaaagaaacaatttttatttggttgtattttaaaatatcaaaatatcattcaaagagaatgtgtttttcactatattttagtagaataattattctattttaaaataataaaaaaaattatttatgagaaaaaatttaatgattttattaatattttttttatgtattttaaattttattttatttttattttcatttatatttttatgtttttattccatttaactaaatgtcacagttctattaataaatttaattttttatttatttttgtcggttaaatgctaagttaaaatgtcatggtataaactcacatacatatggcacaatcatattaattcaaattatttaattatttaattgttataaaaaatcattttaaatatttactataattaaatagaattttttttaatgttttaaaaataaaaaattttaaaaagttaaattaaaaaattaaattatttttttccttgaaaattttctctcttccctcacgcatctccctctgtcttttagattctcagcttgatcttatatttccatttccgttcctaacccatatctccatctccaacggccaccatctaaagccgacacaaaatactagtctccaaccctgaaaatctcaagccctctcaatttttctgcccctattattctcgtatttgcagtcgttttagatttatgatttaggattaaaaggcttaagaaatttttgaattatttttagtattttatatttcttttctatgatttaaggaagactttgagcatcatcaaagtttctaaaatcaccatttgcacattcaataaaatagaatttgaggtttatttgtaagtttaagggacattataagcaatttggatgtgaagatcgaagcttaaacgcctggaacgaaaatttttgtttttgagaccattaattgtaggatattcatcaatctgctcaactcgcccgcaccacaaaaaatacagtttgaaatttttgcagtgcgatcgtggtttaatttttttctaaaccgcgtggtgcggtgcagtttgtggttttaaattgttaataagtagttcaaactacattacatcgcactttataaaaatatcaatttttatatttatttaagttcactatatgaaggtctaacccaaaacccactagttattgtattgttgaaatttaatttttttttcatatttattttcaagccttataatatttttgacaagtgttgctcacgctttgttgtattttcgataagtgttacaatttaaattactccgttgattgctatgtaaattgttatgtaaacttctataaaaatacagaaaagaaaaaaccactttaaagtgtaaaaataaaaaacctcctaaaaaattacataaaaaatattaaaatatcaaaatttaaaataattttataatttaataatcaaccacaccgtatttcctagttaatcaatatttaacatgactgcaaattttttgataagttgactggaagattatgtgcaactttcgccaaagagaaatatctttttatttatttatttatttctcacattaagcaacaaggactattggagcctcgaggaggtttttcagcgggagcacttgagcttaaaagcaaaacgagaaaacatagaggagtactatcatttcaagtcaagtaataactccatctccatcccaatactatttcagataaaaaccaacaccatcaagataactcttggaacattaaactctactacactatttgagaatcatagcacactaattgagaatcatcattatccatctacagtgacattctctaagccaaaacctttgatctatcgagaatactcaaggctgtggctgcggctcctgctcctgctaaagctgtggctcctagaaccataaggtgaccttgaatatgaccggcccctgtatcttcggtccctgggagacattgacctgcattaatacattaagaaaaaaaaacactttaaaacacaaaacaatttctactatctattatttgacagaatgtgaaaaacaaaagatgagttggcatacctcgagtaatgtcttcgtctaggagatggggaataatagtctggactgcgagaataggttcgggcatagcgtggtgatcgggaatagcgacttgaagaccgcctaagatcaaaatcccaacgtgtgagaagaaatatagacaaagaatcagatgcagtgagatgtacacaacaaaatgatacgcaaacaatataaaaaagaacagctggaaatcatactctatagaccacaataaatgaaagtaacaagttaatgtataagatgcattgaagaaaaaaaaaagaggcaatcatgttcatgtgaaaattattccttcgacagtaagaatccttacgtataacgctctcttgctctcatttcagatggcttctttctgttttcttcagcaaatactactgtcaattctcgacctcgaagcacttgcccatccatatggtatttggcatctgcagcgtcagcagggtctatgaattgaacaaatccaaagccacgaggctccctaaaacaaaatcaagtttggcaatctcaataaaatgaaaaacaaaggcaaaaaacacattcatacaaaaatgctgattgcacctaaataggaacatgatcctgatttgagtgtgaaatgaaatgagaattataatctccagtgttttttcacactttgcataagacacagacaactgaaaacatcacgtggccgctaaccttgttggatgctaagacaaaattgagatgaaattcttcaagacttgaacttcttctcattatgtttcaaatgcaactttcttcatatcgtcaagtacactaaaagaaccacttgatcacttttattaccttgattgctctcttcaacacaacactctttattacttcaattgatgtcttcaacacaatactcttactacttcataccagtcttcaacacttagaataaacagccaaatttccataaacggataataggttattaagtattaataactacaatcttaggggcgacaattattcaaaatgatgtcatagaaccaaacaaaattcacagtatcaaaagaaagtattttctgatagcaaaacagaaacattaaaataaatactctttttgcaagtgatgcatcatggaaggcattacccagtatagtaatccttaggcaagtaaatgtccttgaggggaccaaattgctcaaaaggcccacgcagatcttctggcctgcaaacaattaatgaatggaaattccaaattagaggcaaaatagtaattccagcttacctatgactaaaattcaacagaagatactaacataagaattgtttcataatctccataaattcttgccagactaacaaattctcaagacatttcaatcagtaaatattcattcccaaacgattaaaaaataacattgttttgtccaacagaagatactgacataagaattgtttcatagcatccattaattcgtgcaagactcacaaatctcaatacgtttcaatcagcaaatattcatttcctaacgattaaaaaaataacattgttttgtgcatactatacataagccttgtttcataacttccataaattcttgccagaggaactcacaaattctcaagccatttaattcagtaaatattcattcccaaaagattaaaaagtaaatattgtccatgcaatttaaagtagaaatttgcaaacaatttacaaacatgtaagctggtattcaaagcaatacttctcaaaattagtataacaaaaaattcacgtacctgcagtcaaggcgaagattgcgaaccaaaagactagtaggaagatctctatcacgacctccatacctacccctcgggctagggctccgacgccttctactgctgtatcctctggtgggcgaagggctgtagctgtagcttctacccctcattctcaatcacctaaaacttctattataaatagcaaaaactaagtcagaacaaaaattaagttgaattcttttccttatatgacacaaacaagaaattactttccacaaacaccaaccaaacatacaacacaaataaaaattgagaatatgaaattaattctcataattagattaaaaagaatgatctagcaaagaagagtataaaaactaaaagttcaaagattcacactagggtctgtggttgaaatcttgtcaaattagaggaaggaaagaaaacgataacaacaaaggtcgatgatgaaaattaaaaatggtggcaagatttagtaatatacctgataaacgtaaatcgtaagagctagctaaggtttgcactgagaacgtaatttctccgaattctggacacgaatcaaattcttgaaaaaactggttcttattttccttttgagttgaagaacgagaaaatttatgattcgagaactttctactcgtgaaatgttccaataattctaaccgttgatttatatacagttcgacatcaaaccgatggttatgatggatgactacaaagattctcgataacgggcccatttcagagctcggagcccatgataattgggcccaataagttttgtctgaagttactgggcttaaagaatcaaggcttaaacccagctgaatagccctaataacgtctctgttccatcgactatcggcttcgttttttacttctttgactcgttgctctaaaaccctcctaaagccttaacctttacaaaactcaaaactgaagtagacgaaaccaaactgtaagtagggttttctagcacacattttcttttattttccgggaatatttatttttttcccgagaaaatggctccgccttcgaagaaatttcagaagaagcctaaggatgccacaaagtttaataaatcttcgaagccggcgtttaaagcgaagaaggagcaaaacggtcccgccaagtctgaggcccttgctttgcagatagaagatgaagttcctgattttcctagaggttaaatgattaattttgtgccatttttttatgattgtgtttgataaatgtgcaacaatcagaaatttaactacctatgcattttagtttgtggtaaacatttttttttctgtttaggtggaggaagttctctgagtcgaaaagaacgtgaggaagttcgggctgaagtggatgcccagtttgaggtggaagagcaggagctgaagacaaagaagaagaggaagaatttgccgaagattagtcaggaagaggatgatttggggtccttatttggtggcggtattactggcaaactgcctcgatttgctaataagatcactttgaaggtataaagctggatgcagttgtcacttttaaagaaaaaaaggaaaaacaacattacattgtcttaaatttttccttacaaatttgatactgttggagttacatattgacttagtttgactgttttcttctaaaaattatagaatgtagtgcatctttatataagatacatacagggaaggaaaacttcaatgactgattgcgtatattggtttagcttgtataattctccttctgtgataagaaacgagaattttttgaattagtgtcacatttctggccttttgtgggttaccctggtaccattacatgtactttttcttccatttttctttggtatccgtttttcgtggaacataataatttaacgccacctttattggtagtcactaactcaatactattgagcaagaattcgcacaacataccaatggttaagaagtgaagagttatgccaactacgggaaagaaggatttcatgtgaaaatgaaataattatcgaatttgatcattgttttatgtcatatgcatcatactatcatccccatccaaaaattgatgtgtttttgtttgttgtcacagaatatatcccccggaatgaagctttggggagttattgctgaagtaaatgagagagacctcgtaataagtctaccagggggtttaagaggtttagttcgagcctccgatgctctggatcctatttcagataccgaagttgaggtaatactaatagtaagcatgtagttaagatatgtaatctgttactgttgtcatgactcgtggctataatggctctcactcatcaaaactgttatctttgtgtttttttttttaatttacttttttttttcctcttctcttttccttcaacgttgagtgttttgtataatgactactgttgtttattggtttttttttttttttagaaa

SEQ ID NO: 16974 - DNA, 8159 bp, Cannabis sativa
tttacaaaaaatactaaattttggcaaaagtttataattttactaaatatctttttataaaacaaaaaatcgaaataattaaaaatagcagtagaataataaaaaacaactgtagaacaccagtaaaaacttaacataatatattgtataaagtttatacagtatttttaaataaaaatttggcccatagtaaaataaaatcagtatactgtataaaaactaaaaaaaaaaagaatagagtaatgggaggttaggttaagtagttggaaaagtataaagtgaagatgtaaaaatagctgaataaaaaaaaaaaaaaataggccaaaaaacaaagttcacattttctgtcaggcaaaagcaagtgtgctattataatttattatttatttatttattgtattgagtggtaaatgctaatagtccgtgctcaagtggtcatcttttgcaagtattattaagacatgctttcaaattcaaaaaaaaaatgctcaagtggtcatttgacaaaaagctgaaattttaatgtcccaatttgaaatattaaaaaataataataataaaaataaaattgtaagtactatccaattatagaaagaaggggaagcagaaactaaaacgtgtgtgtgtagtgatggtatggtataggtggtggtccctcctatttattatttcttatcctttcctttttcttttccaccccacatgcatacttgttaccgaaccacaaagataagggcaaatctgtcattttacaatgtattttttttatttattttatttatttgatagatttaatcacactaaaatagcaacaggttcacgaatattatcatcaacatcttattataatctcttagttaatttctgtgcccaaaaatataatctagaatgttttttcttttttaattttttttttcatagcgttatttattataattacaacatcatcactgtaaatttttaaaaaatttcaaatagttttcagtatcgaaaataggtttaaagtcttttgaacacgcacagtaaattggaatattaaaaactctgttttcagtaccataaactattcagactattttaaaaatttaaagggataatattatagctatgacgaataccgatatgaaaaaaaaataaaaaaaaatagtttagtatgtgatttcgggcgcaaaattagataagaggttgtaattagtactactcttatctaattaccataaccctatcattgttatggcttggtagctactaggtgtaattaatataaagttagttttttttttttttgatagatttaatcacaccaaagtagcattttatctaattaccaaaattactttctattttatttttagatgggtttacacttaaaataggataatattattttagattttgtattttttaaaatttattaattatagactctatgttttattaaataaaaattcaaaccttgtagatttttcaaaatagtatataatagtattctgaactcaatttttatgaaaatagaatataataataatctgaccttaagtactatgacaaagttgattgtattttttgaaattttttgtactagaaattaattttcggttgattatattaaaaaaaattaaaaaaattgagttgtgtttatcttgtaataaaaaatgtagagtctgacttttatttaaaaaacaaatgatttcatcattaacttttgttaaatatatagtccaaaatgtatttactctttaaaatatacgcttgtacagtgtcatcaaaaaaatgagtattaatgctagatatacataaaaaattgtgtgcaatttttacacataattatgtgtatttaattttaactttatataattatatatgaaaattatatcatttttaattatgtagttgagattaattgcacatcattatgtataaataaagtgtataatttaaatgtgttatagttattattctaaaaaaaaatatggtatttgcaactatttaaaatagttgtgtcacattattatgtaagtgcatattagcaagagattatagtgcatattcaagggtatactttatatgttgagaactttcactaattagtgttgctgcactgtatctatactctacatcatagtcgataattgttttcccaagttgttggaatagggttacaaataggattacatgctaatgctttttgtgccattctactagagagaatactgtcttaattctttttgtaataccacttggcaatattttagaagtctttttatttaccatttggttatataataaaatcccttactcagtcttaatttgagctaagaaatacaattgtcaatttctttattttcttcacttggtatcagagactatatgttgctgccatgtccactgacaattttcagactcctccttcacctcaggtcaaccaaaattgtgccaactcaaaccttgcaacacaaaactccaatggtacaggagtagctgttattaacagctttgccaccttcactccaaatttcacccaatccttcaacactcttaaccaacccttttctcttaaactagataagaataactacatactatggaaaaccatggtggccacaatcatctatggtcactggctagatagtttcattaatggaactagaatctaccctgatgagtaaattcctgcaacaactgcaacaaatggacaacttggatttggagtcattatgaaccttgattatgaacaatggatagttagtgatcaacttctaatggggtggatctatagctccatgattgaatctgtagcaactaaagtaatgggatatggtacctctactgcactttggagagccttaaaaacctatttggagcacactcacgagaaaagatggatgagaccagaaccctgattcaaaccactcgaaaaggtaccactcccatgactaaatatctaaagcagaagaagatgtgatcgaataaacttgctttagctggacacccatatttagaagctctcttgatctctaatgtcacatctggtttggatactaaatatttagcaattattgttcaaatagaagctaaacctaatattacatggcaggaaatgcaagatatgttgctcaattttgacaacaagctttctaggcttcatattgtagaatgaaacaacaaagggggaaataaaattgcttttacttcagctttaaatcctactacaaatcttgcagcaactaacatgggagggaacccacaatgtccaaatcggggcaggggacattacaaccattatcccaataaatggggaggttcttcttcaaacaataataacagaggtggaggaacatcaggaagaggaagatccaacaattctaaaccaactttccaagtctgtggcaagtatggtcatagtgctgcctactgctagaacagatacaatgaagcttacatgggacaagatcttggtctttagaaaaactagcaatctagaagtcatgcaactttcatagccacaacagaagttgtggatagtgacatgtggtattctgatagtggagcaagcaaccatgtcatctttgctgcatcaaatttgaataaaaaatcagattatggtggtaaggaaaaacttaccatatataggtgatggaaatcacattggtatttctcacattgattctaatttgttacaaacagaaaataataattttcttgagctaaattatttgtcacatgttccaaaaattgtcaaaaatttaattagtgtgtcaagattaacagtcgataataatgtatttgttgaatttcactcaaatgtttgttttgtgaaggacaaagcaacaaggaaagtgttgctccaaaggatgcttaaggaaggaatgtatcagctcaatctacctctatcaaagtaagatctcaattttcctcatgtgacaagtaacttaaatcagcctcaaagacttactggtgtttctgttttgcaaataaaatctgtagctcaatctgctaatgatgaacattttattccctacataatgtttggcatagaagactaggacatccttcaatcaaagaattaaaccatgtcctagcttcccataatgtaaaaacacctattaatgaaagagttatttatttgtaagagcttgtcaatatggaaaatcccatactttgccttttaaattgtcatcaagtagaacctcaaaagtacttgaaatcattcatatagacctctggggtccagcctcagtaatgtctaacactaattaccagtactatatctattttcttgatgattttagcaggtacatgtggatctatccactcaaacacaaatcagatgctctaaaagcctttgtccaattcaaaacctttgttgaaaagtaattcaaagagtcaattaagtgcatgagattagatggaggtggagaataccaagctttatctaatcttgtcatagaacatgggagtgattttcaacactcatgtcctcaccattcaactcaaaatggaagatctgaaagaaaatataggcatatatttgaaatgggtttaacactgttagctcaagctagtatacgtttaaaattttgggtagatgcttttcaaacgactatttttcttataaatagactacctacacctattttttagctttaaatcaccttataagacactattcagtaaggaatcatattatttgtttcttaaagtgtttgggttagcctattttccatgtgtcggaccttaccaatcacataaattccagtcttattcacttaaatgtgttaacttaggctatagtgattaccataaagggtacaaatacctaagttcaattggaagggtttatatcacaataaatgtcattttcaatgaaagagaattctcttttaaacaaggttttctaaatagttatactctagaaaagtaggttgttgttcaaacctcacagtggtctcaattaccaaatctccacattcaaaatactaccgaatactatacaaattctattgatgtagaagtatctcatggagcagcacctgaatcccctttgcaagaggtaagtgaacgcataatttcaggtactgaacacactaattttggcaatgatgacattgaagatacagctctagagtcacaactttaggatgttcaataagaacaagaacctactcctgtgcagtcttatccgatgataactcgagccaagtgttaacattttcaaactgaaagtctatgttgggtaagctctatagaatccagttgaagaggaatctagaagcattgaagaggccttgaaagctaaagtctagaatcaagccatgaacattgagatgggtgccttgaaagcaaacaatgcctacacactggtgccatattcatctcactataatttagtgggaaacaattggatatacataattaaaaggaatgtagatggatctgtaaaattctttaaagccaaaattgtagcaaaatgctatcatcaaagacccgaaattgacttcagtgaaactttcagtccagtaataaaagcttcgaccatcagaatcattctcacaatttctatcagcaaggggtgggaagttagacaactagacatcaatagtgcattcttgaatggcacccttgcagaggatgtctatatgcttcaaccatcagactttgaagatggtagaaaaccaaatcatgtgtgcaaactcaacaagtcattatatggcttgaaacaagctccaagagcttggttcgataggctcaaaaagacactgcttggctagaagtttgttaactcaatggtcgatacatccctattcttttacatgacaaacgagactataattcttgttctaatttatgtggatgacatcattgtaataggtaatgatgacaccaaactgaagcagtttacaaatgatctgaacaagaattttgatctcaaagacttaggaacacttcacttctttttaggaatagaattacgccaagatgatataggaatgcatttcacacagagcaaatacatctctgatttgcttcacaaatatgatatgctgaatttaaaaccctatctaactcctatgatttatggcaagcctctctcaaaatctcatggtgaacctttgtagaacccaacaacctatagaagtgcaattggagcattccaatacttgtgccataccaggccagatattgcattttctgtaaataaactcagtcgattcttacaaacaccaataactagccattggagtggtgttaaacgtgttctgaggtacttgaaaggaacaatagaacatgaccttcacattgttcctagtgacaaattatcagttgttagttacacggatacatattaggcttgttgtccagacgatagaaggtccattgcaggttattgtgtgtactttggtgatactctggttgcttggtcgtcaaagaaacaagttgttgtctcaaggtccaacactgagttagaatataaagcacttgcaaatgttgcctctgagatatcatggattgaatctctactaaaggaattaaagttcaagattctttgtacctttgttacatggtgtgacaatcaaaatgcaagtgcactttcttcaaatccagtatatcatgcttgaaccaagcatattgagctggacattcacttcatcagggacaaagtatttaagaaaaaacttgaaatcagatatgttccatcatcagatcaaatagccgattgtctcgcaaaaggtcactctcactcttgattcaggttcttaatggacaaacttgggatgaaactatcaccccttcgtttgaggggtggtgttgagagccttcactaatcaatgttgctacactgtacatgtattgctctgtatcaaagctgataattgtctccccaagttgttggtgtacggttacaaataagattacacgctattgctttttgtgccattctattagagagaatattctcttaattctttctgttatgccacttggcaatatttgagaggtcctttgtatttacctttaggctatagaataaaatcctctgcctcagtctcaatttgagctcaatttctttattttcgtcactatattggccaaacctaagggaaggcgagatgggttgtcgcccatggctctctactttggtgtttattagcatgtcatattacggtgtgaggcaagatgagtcatcgcccaatgctccctactttggtgcatataagcatgtcatattactgtgtgaggcgagatgagtcttgcccaatgctccctactttggtggatattatagcatgtcacattactgtgtgaggcgagatgagtcgtcgcccaatgctccctactttggtgtattttagcatgtcatattactgtgtgaggcaagatgagtcgtcgtccaatgctccttactttggtgcatattagcatgtcatattattgtgcgaggcgagatgagtcgtcgcccaatgctcccaactttggtccaaaaaataaattaggaaaaagagttatttacaaatcaaaagaaggagatcacttggtgatgagctatagtgggattcgaaccctaagcaagatgattagaagagtcaatcatttctaaaaaaatatcatatcttacaatgtctttaaatatttaccactatatatggaaatatcacaattattttcttcgataattcaattaataaaattttactgccacctatagcaatgacattgttgttatatgattaaaaactcaattgaaggattatcgtcgcgtctatagtgatgtcgtctttacataacccatctacatacccttctgaacagagaaaaatacacaaaatatattgcaacgacattaaattgacatcgatgtagtgagcatttaacaactagactattgcaacgatattttagcgatgacaatagcctataacgacaacttctcttctccatttagggagaaaacattgtaatttttctccttttgatatcaccgtgggttataaaaacatgcatatatatgttatatagcatcatattgtatgtatagtgaaaataaattattttttatatgatatgggaccaccgggtgagggagaaactaatggcaaattgtaagaaaattaattgaaagggaaaattgaaaataattatatctattttttatatat

SEQ ID NO: 16975 - DNA, 2454 bp, Cannabis sativa
tccatttctttattacaattcttgtgtttggaaaaatatgaacctcgtggagatcacgttaaaatgtttcatattaacaactttgtatctttgtagttcccttttggttgctacttgaatttattcatttttttttttgttcttttttctttgtttgtttttgttctttcaaataagtcaagattaggggagaaccatgagctatgtctttgtgtgtgttgacacttgggtagctatgattcctcaataatctatgttgttttcttggtctttaaaaaaaaaggtctaagttaaggtaactttccaacttccaagtctttgaagtggaaaatgggaatagagaaaaggaaatatagaagtatttttaagtcataagtaaactaagcaatcacactatctaagtttagcaaaaaggaactttaatagaagaagaagaaacaaactcaagaaacataaaacaaccaaaaccacaataccactttagtacaatacaatgacattgagtttcttaagaatttatacttttttttttaagggtgctaaatttttttatcaaatatattggtatcgattttcctattaagttaaataataaaatacacttaacaatgaaatttttaaaatgtgcaggaatatatatggataagtttttaatgaatatgtatttgaaggtatttgtaaggaatgatgtagttattgattaatttattaaactatattgtacatgcagtttgagcaatttttcaaacagcatcacatcgtatagacatcaaaactgcaccacgaaaatatggggttttgcacaatcaccaactaattgaatatattcaacattataataaaatttcatgatctagctcataaaataaaattcataacctaaaaaccaaaacagtaatagcaaactaaattcacaatataattcaaatgaagttgtttaaacttaattcacaatataatccaaatgaatggagagagggaagaaaaacaaaaaggtatatgaactctgtttaaaactaatataattctttataagaagagaaaaaaagtccacaactaatttttttgatgaaaaaaaattaagagcattaccaatagttaaattttggaagatgtttgcttatgtggaatgtttatttagcaaaatacaaaaatgttatatcattagagataaattgatactatcatactatatgacattgatgctatctcttttttaaaaaaaaataaaaaattatgacaatatttataattaaaataaataatatattaaataacaatatgttgagattataattataacatttttgaagggtgttatactattaaaatgtttttaaaagtaagagtaatgacgtggaataaaaataaaaaaattttacctctaaaaatgttagcattagagtcttattgccaaaaaaataaacaaatcaatacaaatttcagtgatcaatttgagaaaaggttgtgctttcagaaaaagaaaaaagaaattgagaaaaggttgtattgatttaaaaaaaaatagaaaataaaagaaaattatagtgttatttaattgtcttcgccgcctcttgtcttgataagaaagagatcaaaagactgtagctgagcagagcagcctgagctacttccaagaaatggtatacataaaagaactatacaaatttattatatatatatatatataacacaaggaaaattcaaatccatgaataaaaaacccaatagtatacacacacttatcaaacatacaacctcattttctcatttctatgacaactataacccatttagacaaaaattaattacacaatatagtgacagttttcaatctctatgaacactgagcaaggaaactctgcattattattattatgatcaacagatgtagagttaaatggttttttgattaaagcttcaaccattccaagcaaggacaaagcccccagcaaaatctagagggatagtagtctttcaagtaaacctccctgctgtaaccaattatgtagaaactgaatgatcggtttcggtgagtcatggtaactcgtgttactggcacgacggagatagtatgcctctcacatatgaccctggcggtgagagctactggagctctgtctgcaataacttcggaagagaatttgttgagaaagaaagagtccgcaaagaaggctggggtgcactggtatgcctgagtattgcatagttggacacccttggctcgatggaaaacatcatccggaacagatgctgctccacttgtcccgcttacttttcgagttgaaagtgtcttcctgttacaccaagagtaaattatagaaccaagatagatgttaacaacattactgcagcaattgtcttgggaagaacaatggaagctaaagaaaatcactagcaagaaaatagctccaaaatgatggggcaaacacataccatctaataatggcaata

SEQ ID NO: 16976 - DNA, 8043 bp, Cannabis sativa
accaccaaaaatttagaattggaaattttagaattggggttattagaattggggttagtgaattgggggttagttgtaaaaatttggccactaaaaatttggccacttaaggaggttatgccgcaaattacccttaaaataatatttgaagagcatttattttgttgaaacaacaattttttaaagaaaactactaacctcctttgcattttggccacttgacccaactttaatattttgttgtctcttttttctaataatttgttcaactttagattgttttctcttagaaggtgatcaacctttacttctcattttgaatgggctaagaaccttacaattattttttgaaatctaatcaccatttatgatattagaattggtctcatcccttcttccacaaacatcatcaattcgtaataactttgccttaagattatgaattgcctccaatacaatattgcatttagtctcatctcctgctgtcaaatctacaactgtacaaaataaattgcacattttatcaaattgttgtatttctagcttgtcactccaattatcataacttattttgatcttggtatgatatctttttacatctttcctccatctccttagaatgtatttatcaaagactaaaaaaattatcttatggataaggattgaaagtgcatgcctacaaaatattcctttaaactcaaattgtcgacagttgctgctaacttcattgttctccttattgaagcaaactatgaaaggaacacattgctttttctctccaactaacacatcttcatctacaataaattttaaacttatttcattgatgtcttcacacgaagaaatttcacagtaaagtttaccagtaaactcttgttgaatctctttggattttgttgttgtataagcatattgaaactgatgctccatttcaaacaaggtgatgcaaggaattcgtgaattaaatgaattgaaattttcataatttttctttttatctttcctcgcaaagcattctcatattgctctacaaattgcttcatggtcgtttttgaatttacgtacccatcaaagaatgcatgcatgctttccctacgctgtgtggtagacattccagccctaaaggtatctttcataaatacaggaacccaacgttgcctttcattataaagtgtcaataaccaatcattggcttcaagctcaaacttcttaatgatttcatttcgatattcttcaaattcattttgtgttattaaatcataaacaacactagatagagaacacttaatagaatgatgttgagcatacccttttagtttttctggtagctttttcaaaatgtgccacaagcaccaacgatatcgtgtattaggaaatattatctcaattacattgatcagtaattatggcatgtggagcacaattagacatacatgccaaccaagacttaaaaagccaaacaaaagtctctgtatcctaattggaaagcaacacacatactaacaatattaatattgattgcccatgatgattaatccccacaaatgtaccgaagggtatgccatatttgtttgttaaataagttgtgtcaaatgtcacaacatcaccaaactccttatatgcagccgtactcctagcgtctacccaaaatatattctttattcgacttttttcatctaaattcattgtgtagaagaaaattgtattatcactttgtatacgcaaaaataattttgaagtgtagcagcatctccttccttaagtcgtaatcatcttacttttccaagcaagtttatacaattttttttgtagaaaaggaaccttatcatgtccactcatttcaactaccaaagagttaaaaaatttcttcggccttgtcccagctatgtcattgatttccaattttcttttcacatatggttggattatcctattcaccttgtgcaaccgaacttttctcggtgtacttagttcatggtcatgatccaacaaaacaaaaatcacttgacatttattttttgaacatatattcgctctaattttagcttggcaatttgtttttgttgtcgaatactttctaaaagtattactactcttacatcttgtctttctattatgtgagtatgctattgcattatattttagctctccatcatcttcttttgtcgaagttcttatacttacttcaaaccccatttgatttctatatttttttatagtactctaacaattcattagttgagtcaaacatcattcacacactccgctctataactttatcatcctattacacataaaatatataagatataaaaacttaaaaatctttcaacatatttaattatattgaaatagaatctaaataaaaatataatagaaaatatatgattattgaaaaatataagtcattatttacgttagaagtttctttttttcatgctcatactttgatgatcaagtaattctttcttcttgatctatttctaatattgtttgttgattactctcagaataaatttctttagaaatagatgattgacccaatttcatgaatagtcactggaaacagaatacaatttttagtcatataatgagaacattaattttctaaacaaatagtgtaagttctaatttaacaaaaagcaagaaattaaaattgtagaactccttatttaaataattgaaaattacataagtaataaaaataaacacatataaaatacaaaaacaactaaagataatatatttatataaaagcaagtgatttaacaataataaattcaaataataataataataataataataaattaccaaacctttgtctattaattttctagcttaagtccaatacaaccaaaaaagaaaaaaaaataaatctaacttataaagaatatgtttaaagtcagtcctataaacttaaagaaacaccattagtaagataaaaataaaatataaaggtatatgaatttaaagaggttgatcgttatccccaaaatgataagtgttagtggtatttataggcttatgatcaagatcttaaaattggtggctgcaagaagcgatgttgttaagttagttaggcaataatcaacttaaccaactctcttttgggcgagatctccacgctagcataagtataggtgcttctaggaacgtgcatgaaagcttctggaaacacagaccaaaacacttgctgaaggagcatcccaaataggatagagtcagctggagttgactatctggaactccttttaggaactcctttctcgaggaaggctagctttcctgaagacctttctcgaaaggacaaaaaagccttccaagacatacttctacgagccaacaactttctaggaaagataaagtctttatgagatctttttatttagaggaactattccacaaataagacctgaaaaattaagagaaaaacaaataaaaaaagcaaaagaaaataataaaaaaaaatattcaagtttttagtcatttttttaataatttatttattatttaaatcatttaaaattattttttaattaaaattatgatttggatcaataaactttgaatgcgtgacattcttgctaacatatatttatattgggtaccgacgaattcacaaaaataatgactttaaggactattactatcaattttcgaaattagagattaatttacatcaaacatgagttttagggaccacaattttctattgttattatttttttcaaaacatattgcataggctaacatgggcacaagtgaaatttacaaatttctcacaaatatgagttttgagtgtttatatcggatgcctcatgaaggtggtctcaagttatttttatctaaatatctgaaataacttagttttatattaatcgcattatttgtaccaactcatattttgattttgtatatctttaactagacaattagcttgttgaagtttctttgcgtcgacgattgtcatagtgtgatttagatcactctaaaaacatagcaccaagactctttattcaagaaaataaataaataataagcatttagcgatactctctaaaaatattacattaaactctatgaaactagatacttaattagaataatagcgatattaacacattcctcataaataatagcaccaaaactccgtacaccagccggtaaaatgaaatggaaacaccaaaacactgtttctgaactttggaaacacaaaaacggagccactttctctttctctctcctgaagcttggtctttagatttctttactaaaataaagccctcctgcacagtttgagcgccaccaccgctagccctaaagcccagggttttgggtgctcctcttcttcccatttcttcacccactttaacccaacagctcgctagggtttctttcttcatttttcaatcttcaaatcaaaggtttgctgtttctttatatattctttcacaacttggccttgggtttatgccaagcctcatttctcgattctctttatagttttcctctaattttttttttaatcatcttcctctcaaatttatgcctttgtccattgattttctttccaagcttagcttttttcccttctttttctttttttttttggtctgagatagataatatgcatatagcttctatataacgagctgttacgatgttgccattgtacttgttgatttttggttggcgatgcttctgtgaatgtgatcttttgattttttgtcattgagtagttagggttttgagttttgttcctgcagttccaatggcgagagctccagtcggaactgtaaaccccggtgcccgaactggggtccgaatcgtcgtggctggagaccgtagtactggaaaatcgagcttgattgtcactgctgcggcagagaatttccctgtgaatgttcctccactattgccaccaacaaggttgcctgaggatttctatcccgaccgtgtgcccatcacaatcattgatacttcatctcggtatgagtttatttttcacgataagccataagttggtttcatgtaaaaatgtgattctaactttgatacgtcattatagagagatagctttcgagtggattcttccccttctggtttatgtcattttgaatccatataagcagcttatagaattaagtttcattatattattctgatttggctgatgcggagattgtagaaaaagttgaattttttaatcttaatattctattcatgggaccctataaggaaactagttttactctacactgacctcaatgaaagtccttgagtttctaaattgaccattttgttcttttcttggcaaaactaaataagggtgattttcatcttttagttcgttcttgctggatcttcattctggtcttgaatgtttgtttattttactttcaatcagtcccgaggataatggtaaagttgcagacgaattgaagagagctgatgcagttgttcttacttatgcatgcgatcaacctcagacacttgatcgattgagtaccttctggcttcctaaacttcgtcaactagaggtttcattctttcttgcattggcatctatatatgtatatatacatatatatatatttagtgtttcaccaatatctcaaaatagtagataaatgaacaaacattcttctggaaagagtggtgagaaaaggaggaataatttgattaacaaaatccttcagatattttacatagtagatggatggtttcatttcaatgatgttgctctcaattgaaacttctctgtataagtttatggaactgcagtattgctcatatagagtaaaagttaaaggatagcttcacgtgcaggtgaaggtcccagtcatagtggtgggttgtaaactagatttgagagatgagaaccagcaggtgagcctggaacaagtgatgtctccaattatgcaacagtttcgggagattgaaacttgtattgaatgttcagcattaaaacatattcaggtatgtacgcttcgttttggatatttgtttgttaaatcatgctagtcagtatgctctattttttgacgcttttaatatgccattctggctcactcttttattcatttttttttttttataatttccgttctgatttactgtaccatcaaagtatattttttctcacaattagtagttggaatattttgcatgacttatactaattaattagtgaaaagggtctgttattcaataccatagggctgaggtattttaggaacttgaagttctatgaattattttgttatcaggacattcacaatttaaacggaggactggattatttacttttgtagattcctgaagttttctactatgcacaaaaggccgtgcttcatccaacaggtccattatttgaccaggaatcacaaactttaaaacctcgatgtgtgcgagccttgaagcgaatttttattctctgtgatcatgacagggatggtgctctcagtgatgcagagctgaatgattttcaggttttatatttttgttgttcactttttaagtctaggtttcattctctgtatgacttgaaattaaatagttgttatggaccgctattttagtgtaagtcgtgaattctaatttctaatatactctttttacattaacaggttaaatgttttaatgctccattacaaccgtctgaaatagtgggtgttaagagggttgtgcaagagaagattcctgaaggagtcaatgagcgcggacttactttgacaggattcctcttcctacatgcactatttatcgaaaaggggcgtctagaaacaacttggactgttctcaggaaatttggatacaataatgatataaaacttgcagatgaactcattccagctccatcaaaacgaactcctgatcaggtatatcattgacttaataatttggtagtcactatgggtgatggcctttgatgtgtttttattttggtatgatatcttttgtagaagtaaattggacaccaatatagttttgggagatccattgccaagaatcttactgccctatgtttgtttattttgatggtctatttgagatttgaaggcagttttatgtaaaacttgtgtctagttagctatatgttttttttttcttttcttggaatgtaccagcaaggtgcataagccatttaaatgcttttttgggttgaattgggattgattttatgacactcatattcatggtgtatagcggagatgttgtgcaagcttcattaaattttactttatggtttttatatttcttttgtatctctacacttcacatgtattcattttacactttatcaaacattgctatatttaaattgaattatatggtattttctaaaagtgctaacagttgatcatcatatctgcagagtgtggagctgactaatgaggccattgagttccttaaaggaatctttgaggcatatgacagtgacttggtataccttgctcatcttcttgtacacagcttttttcgagtttatttttctctctttcaatgtatgtgcattatgttgtgtgaagtaatctttttcttttctttttcatcctactagtcaactaagctctttttgttttaattatgacaatattgttactatcaggatggggcactccgacctcgtgaactcgaagaagtattttctactgctccagaatggtagtttacagtttttttctcttcaaaatatctattggctccatttcttgatttttcaatattaaatgtttttgaagaatttggtcttcagaagcaacatgaacattgtgaatttacaatggatattgttatttatgacgtgtttcaagtatctaatacctatcttctcagaatatgaacttttgcagactgcttcttgtctttggatgtttgataatgttcttcttttaaaatgccagtccattcagtgaggccccttataaggatgctgcagaggcaaatgcttttggaggcctatctcttgatggatttttatccaaggtaccatttttttggctcatgggtatttagaagagaaaaaaaaagggcccc

SEQ ID NO: 16977 - DNA, 6884 bp, Cannabis sativa
tgtcattcagccacaagtgcgtcgtgacactacctttgtagtgtcgcggtgcttgaagcccaatttcggacaacgaggatttaagggttccaatgccttaacattggatcccaatgttaagcctgcctctaaacttgctgaacacgaccttgctatcaaagtttttacctttcagagtcctgacgttgaattttaatgttgagtcgctactccacacttttcaattctttaacattagaagctccaatcgtaccgaattttttaaatttagtttttggattatttttttggtgctttagcaataaaacttcatttaattaatccttcttgctcattttttctcgaatttgctcttaaaccctattgggtttgggtatgcccatacccgattcttctctataaatagagcattactccttcatgtgaagaaggaaaaattaatttttgggaagaagtattaagaattaagattcttcaactagagcataaacacttgtaagaaatacctttgagcttttctagcttaatcacaatgactagtagactagagttcgttaatactcaaaccacgtaaaaatctagtctcttatctctaatttatttctttcttaagcttgtttactttcgtacttaatttctgagaatctcgttaaatgcacatatataaaaattaatttaaaactaaagaaactaataaaataaatttagaataatgaatagtgttactttacatgtagagtaggattattcattgatgtaaagttgtaaatttatgtaaaaaaaaaaaagcatctattttgttgggataaaatcataataaacataacatttatctaattatcaaaatcttattatgggtttatagtttgatacttaccataaattactccacacatgagcaacataagacaaaaatatttttttttttgataaaatcacacaaacattgaaacataatatttattcaattaccaaaaaatttatgttgtatgtcatatttttgataaatttatatattctcttcttaattttagagaacaaccaaatttaaaacatctattgggtgtgctcttacatgaagagcaacttatttgaagataatttttttattttttgctaaatattactcaatgacataaaataaaaaataaaaaaagcactaaaatgatttacatagatattgaaactatagccgttagatcctctggtacagtaaaactcatcaaccgctagtatttattatttaacgcttctaatccataagagttttaagagatagcagagcgttattatcgtcctctcacagcctatcgtccgtggcggcctgcctcatccttcttcaggttatggcgtattccttttcatatttctctaatattgttctttatttaaaatgaaaaataacacataactcttcatatgtgtatggtttgtatagactacaaatcatagtttgtaattatactgtgtgcatttttcgaacattagagtaaacaaacataatcaatatgcaaaaagctttaaagggtattcattagttttggattttaataatatttctgaactaaagattacattttggttttgttacaatgtcaaaggttttgaacataaacaacataaatggaagaggtagaggaacaatctaaagaaatggcggattcttatgtgggcattgaagaagtactcaatgagtattgtgttgcggatgttgttgaagctccattacgtttacccactttgggtatggagtttagctctgaagatgatgctagaaacttttacaatgcctatgctaaggagataggttttagtgtccgtgtcaactcatattatcggtcaaaaaaggataattcaatcatatcccgggagttttgttgttctaaagaaggttttcgtcgagatagaagagcgaagaggaagggttcgggttcggatttggatacagtttgtaatggtgttaaaaggaggcgttgtaggcctatcactagggaaggttgcaaggcagtgatgactgtgagaaaacgagatgatgggaaatggtttgtggcaaaattagagaaagagcataaccatgagctagtcactccaacaatgaggcaatttctaaggtcgcataagcttgaatgtgatcagaacaagagcttaagtgactctattgggtctcctacattgagcataagtagttctttgaatggtttggctgatgaggatggtaacagctttggcaaaatgtcattttccaatgttaactacattggaagaggaaggctgagctcttttggtatagatgcccaaagtctacttgggttttttaagactatgcaagctaatgattcttcattttattatgccattcaggttgatgaagaggataggctaagcagtgtgttttgggttgacacaagatctagaattgcttatagttgcttctctgatgttgtagcctttgatacaacttatcaagtaaatcaatataaaatgccctttgctccttttacaggggtaaatcatcacaaacagtctatgttgtttggttgtgctttgcttgctgatgagactgaatccactttcatttggctcttcactacttggcttgaagcaatgtctggacgccaacctggtttgattattactgattatgactcaactattggtaaagcagtacaacaagttttcccacactcaaaacaccggtattgcaagtggcatatcatgagcaaaatgcccaaggaaatgggactggtttatggtgcactcccaaggacctttcaaatggagtttgagaagtgtgttaataagaatgagtcacctgatgaatttgaatcaacttgggaagggcttcttgacaaatacaatcttaggggaaatgattggcttcaatcgctttacatcgaccgcaaattgtgggttcccatccttgtaagggacacattctttgcaggcatgtatggtgctcagagaagtgggagtgtcaattcactttttcatggctacgtgaatgcagggactaccttacaagattttgcagaacaatatgaaaaggctctaaatgaccaatatgagaaagaagcaaaggcagagtttgaaacattttatactaaaccagttttgaaaaccccattgccagtggaaaaacaagcagcagaactgtacacaagaaaaatgttctccatgtttcaggatgaagttttcgagtctcttgtgcttgctgtgaaattatatggagacgaggaaggaatcaccagatacgaggtagctagatttgatgaaagacataaagtttatgctgtcgaattcagagttaacaagcaaattgccacttgtgattgcaagatgtttgagtttgaagggatcatatgcagacatgttcttgcagtattcaaaataacaaatgtgtttatgcttccacaacattatatcttaaagaggtggacaagaagtgccaaagatgaggctgtttcggatgaattttcaaggtttggcaatcagagtagttctcataaaggcaagaatttgcagtacaatattttgtatcaggaagccattaaatgtgcagaggaaggtatggcttctgaccatattttcaaggtggcattaaacgccttaagggaagctaggattaaaattgttggggccaagaaaaatgccattcacaccccaaaactagaaacaatggtcagcagcccaagtaagcaagacgataataataccaagattacagtcagataaaacagtttcatctgatgaaaaagagaaagataatgtcaagccaacaaagaaatttcagcataaaccttagtatctccaaatatgtggcagagcaattttcacattgtaagtgcactgatcatgataaacttttaaggattcagtttaaacatatcaatggtattgttattatctcttataccataactgtatatgttgtaaagaatattggtcccaaatttttgagaagatgtatattttttcaaataaattgattcattgtggagctagtgtggataatgagttgcatgaacttattttgtgaaaaaaaaattaaaaatataagaatagtttaaggtgaccagttccttccccattactttatgctattttctcatatttttaattttatttatttattttgaaattttcccataaaacaacttttttgagaaaaaaaaaactatatttttacacaaattgtatgaaaacttgtaatttttactaacataaatttaccgaattctttaatcaattcatatttaggcctaaacttttggtcatgttgtgtagggttctttgatgttttagttttacacaattgacaaattaatggcttttgatggagacaaattaatggcttttgatgtatgctaatcagttcgaaaaaaaaaaaaaaatcaatttcacgcccccatttttttttctgtgcatatcctatcttgatttctatatttcataatatggttgagaattatagatgaaaattttcttaattgtatagaacaacaatcctagaaagaagaaatcataaaatcgaataatgagttgagaacttagttatgcccatatttcatcatgaaaatagtcaatgtctcatatttagctccttctctaccaataagtttattatacgatgcaaatggaagggttcagcagctgttgttttcctctgaactctaagctggttcaccacttgaagctgagactaaaagggccttacttatctcagcaattaagctttgccagagaaaaagttgtaagaatgaaattcaggctatttcttgaaacttttgttaatggtaccctttctcaaaattaatatgaaccccaagaacagaaattgtctttgacggtgattaactttcaagacattttttttacctcttaatcatatccttttttttttttcagtttctagctgaatgataatagaatgttaatcttgcagactttatcttcttccttttttccttaaaaataatagaatccaaagcaggaaaaggttaaactctggattgattaaatggtgactagtttaaacaagacaatagttagcattgtgcagacaaatctcttgaaccacaaatcacccatctgtctaatactaacctccttccgctgcaaaatggggccaatcataatggaagtagcaatgaatgatacaaatacattcaactcctgtgtcctaaaacattacaacattgaggtgggaaatataacagccaaaccactcattccatgaacattaaatctctgagaccaaataattggcatatttaagtcaatggaattgtgggaaaagaccaacaaatctaataaagccccacaatattaatgcctgtcagctctgacaaattaatctgaataattagaatgaaattgtggaagatacaataacaaaactagaacctaattactattcactagccacataatgtctcaactctgaccgctgctaatggctcttcttattagttcttacctcaaaattttcacctcatttctcctcttcatcaaatcagctttgtcatccatctgaactggcaaaggagcagagaatacaaactcttcattatgccctttaattttatagttaacttcaccttttgtaacgctttcggttttagaattcctttcctcattactggtctgtgaagatcctacactgacaacatctccttcctcctcctcatcatcctcagtgcccagagaaaagcccttaagttcttcaacatcagccccattgttctccccatcatctccatgaccatcactagaattagtagaagtactatcttcctcatttgaactagcctcgtttgaattgctaaaaactttgaacaaattatcattctctgcaaagctcacactctttttcactctaggctgatcccctgatctgtttgccaacaccccatttctaattggacccttctttccactaataacaactatagggttctcagcctcattatcttcatcactgacatgttgaaatccttcaaactcaacatactcatcatcatcctgaggaaccattgtatacccacgaatcttttcaactctctctcttaattttctaatcacttccctctgatctctacccaagccatttttgctcacattaaccttaggtgggtcactgtttcgactaaacctcgcattcttcctggctttaatagaaagctcacgccttttcaaggcaaccccatcaatgaaatccataaactgaaccaaatctctactgatagaccttttcccatctctaaccatggaatcatcaccctaaaacgaaaaaccatataaagaaatgtccatgaacgaaaacataatgaatcaacaaatttaatagatataaaatgttttacctgaatagactcgagcttaacaagcaaatccatggctttagaagagacattgtgaatatcaaaatgggtctcgtcagaaattgatgatttgagagatgtgaaggccgacttaacgagagcaagatctttgagctccctaagtgctcgtgatctgcgaacaagaaaggctctgaactggagttggatcacgcgagcggccacatctcgaagagagtaatgagaacgatcagaagagaaacggtgaagagaggtttcgagggcttcaatacgggaaagaagagaagagatcaagagatgggtctcctctggctctggctcttgttgactcaatcgctgctttgagtgtcgagactggtcatggattttccggttctgggttcgtgattttgggtagtgagagtagagttgttgctgttgagcagaagcagtagtagactgtagaacatgtgaagcaataacttgaagaaggggatgcgaatctatggaagatgacgatgaagggtaacaatggtggggttggtt

SEQ ID NO: 16978 - DNA, 3558 bp, Cannabis sativa
ctgtacttagtcacagcttttccggtcatcatcggcgtttcagttgtattgattctattctacaactctctccagtagagaaagacatgattcattttaactcacaatgtataattaaattacatgccttgtaatgaatccactgtattccctaattatgaatatgaatgatttagttttgtaatatgaaagcttccgtatcatatcatatcactatttctatttatgttgcaaattttatatgtgacaagttgaagtaagcacattctatctccaatttattaatattaatatgactattttattatgttgactgctatgcagacgtgcaatgaggcaaaaaggtcaactctcaatagaatatttgactgaaaaatcaataaagaagtgttttttatcatgggttagtagttaccttccttttgttaaactcttttattaaattttgtttacacaaacatggatgacactaactgcattttaagtatgaatatgcatcccacgtattttaggcatctgggtcttgttcatacccttttaaatacttaaagtaagtacctttgaaaccattgtcatactactcttcttcttcttcactatcactcttttattcttctctacattattatcttcatggctcctcctccaccttcagatactgcattttcggttccaaaccagagacaccacaaaccagatgatgatcatgaaaacttttactatgcaaatggttttgctgagattcaagtttgtagaagcttgtcaaggaatgataatgtccaaagggagaagcagatttcgattgaccccatttcgtttagagagtcgcctaaagttaatggctttttagagttaccagcctcacttcttcccggaaagcctaagtttctgagctgtagtcttccaaactctgccaattcgtctcctcggttcagcacatctttgctgaagaagaaagtgaagaatgaaggccaaggccaaggccaaagccaaggtcaaacatctcctcttcaaaatgaagcagaaaaacagatgaatttgccattggaatattacttgagaaggagcaaatcttgtgctgaaggaagatcattctctccatctgatgatcttgatctttggctacaaaaaccagatgtatctgatcaatatggcaacaagaaacaccgcaatagtttccctagaggtgataaccgaacaagcaacaaagccggtcaccacaacaacaataagaacagctacaaccaacacaacagcaatagcagcaacagcatggatttgtcaagtggtggagggttcaagtgtggtgcatgcttgttcataccgggatttggaaagggaagacaagtgagagcatcaagaaaggaagaagttgatcaaatggagaataatattagtaatgtgatatcaaggacagtttccttagagaaatttgaatgtggatcatgggcttcatccgtcataggaggaggaggaggaggagaaggagactcaacgaatcactatttcgatcttccaatggagttgattcagagtggaaacaatgatgcaaactctcctgtttcttcagcctttgtttttgacaaagacatcaaaggagttcttaagaatggctcggttagatcatcaacaacagcgccaacaacaacaacaacggcagctaggaagtcaaatgattcggctagacatgttcggttctccacagcttctcctcaatcattccctgcttcccctacttgcattacacctcgcctgagaaaggcgagggaggatttcaatgccttcttggaagctcagagtgcatgattgagcaatgattgatatttgtgttgagcaatgattgatttgatatgtagaatgagagatgtttgtcttaacaaattttcttatacactttagatttgtggaaaataaatgtaaaaagggtctcttttttttttgagttttggagtgttgaacaaaacattttctacaaatcatttgaaggaaaaggccaaaaactggatttttgtttttcatattttattttcccatcttcatatgttatgagaataatactttagtaattatatatatgaaaaagaaaattggtatttattagactcaccctatgcattctctttttcacttttttttttcttctcatcttcttatcttatgaattataatatattttttttattttatttataaaatttgataagagtttcacatttatatcctaaaagaacatataattataattgagtttacttttctaataatcccacattatttaaaaaatataatgattctgaacttacatacattataaataaacatttttccttgtaaattaagattagcttttgtaaataaacatatttataaagttcacacataaaaatccaatatataataataagttttaagaatttaaaatttaattagtatcactatatttctttgttttagtatgtcctctatgtactaatgacagaaacattttcatgtgaataatataaacataaaaattcacacacaaactactctgacgtatactatttctacgtacaaaagatatgtcaactcatctaccaccaccattaagtcgacccattgggcaaatgttaagtataatccatgttcttctatgatttatttatacttggtcaaattcgaaccataattacatataaatagaagctattttgatataataattttaattttctaagccaaaacgctaatgaaattttagtataaccacttgtaaattaactctcattaacatctaaatcatataaatattcttgcttaaaacttatttatctaatcttcataatctctgatcaatcaacaatttgtattcaatcaacaatttgtatttttttttaaaaaaaaaattaaataaaaattatgcatattttcttttttttttttctctcttagtagttgacattttatgttaattattcttagtggttaacattttataaatagttgaattttaatgttaagatgtttatatggattgacattagtttttatgaaaaaaccttacctaattctaattataactatataaaaagtttctcataaaaaaaccttaatttactctataattataactatataaaaagttggtttctcataaatttttttaatactttttgataaagacataactatttaagtcaacttagatttctttagcaaatgacatgataattttcgaaagactaaggtagggatataaataattaaaaatttggatttaaaaaattaataaaatccaatcataataatattttgcacacccatttgtaatgagtgaaaaagagtaataaatctttaattttattttgtttccccactataaatataatgtatatatttatgtgaagcttagttggttgaattatgtaaactatggttcaaaattttaaatttagtattttataagtatcactgaaaaaagttacaaatcttctttttgcgaaacttacacaaagtactatttttgtaaaaaaaaaaaaattacttttacgttcaaatatattttttatatatttttac

SEQ ID NO: 16979 - DNA, 5660 bp, Cannabis sativa
atatatatacatatatatatactactcactttattagatgttatattatcatcatattttttttacaaattttaagtgtattttttttttagattttttaaggagtgccctcacccagatgacaagcagagaaaggagcttagccgtgagttaggtttagagcctttacaagtcaaattttggttccaaaataaacgaactcaaatgaaggtatatatatatatatatatataaatatacatatattaatgatgttaattatatataaagaagaaaaaatgattttgagtttcttaatttgttttaggctcaacacgaacgccatgagaactcaattctgaaagctgagaacgataagcttagagctgagaacaataggtacaaggaagccttgagtaacgccacatgccctaactgtggaggaccagccgcactaggcgaaatgtcatttgatgaacaacatttaaggatagaaaatgctcgtctaagagaagaggtaattaattaattaattaattcattaaaatgcttgtctatttggattgagagggattttgtttaatttacacacatatatactgtgcccagattgataggatatctgggattgcggctaaatatgcgggaaagccgttatcttcattttctcacctttcgtctcacgcttctcgtactcttgacatttcgggtgttggaaatttcgggtctcagtcgggtttcgtgggcgaaatgtttggtgctactggtgatctactgaggtcagtttcagtccctaccgaagctgataagccaataatagttgagctagctgttgcagctatggaggaacttattagaatggcccaagctggtgaccctttatggattcctgctcatcatgacaataactccattagtggtggtaataatagcactgaaattttaaacgaggatgagtacttgaggactttccctaggggaattgggcctaaaccacttggcatgaaatctgaagcctcaagagaaacaaatgtggtcattatgaatcatactaatcttgttgagattcttatggatgtggtaagtaattaataatcattttcatgtatatattatttcacaattaaattaattatgttttttttttcttataattaacagaaccaatggtcgaccatattttgcggaattgtttcaagagctatgactctggatatcctctcaactggagtagcagggaactacaatggagcattacaagtggtaattaattagtaaaatatttttttatagaattaattttactttattataacttaattactctcttttggttttgttaattttttactgttttgatcctacaaaagatgacagctgagttccaagtcccttcaccacttgttccaacgagagagaattacttcgttaggtactgtaaacaacatggcgatggaacttgggcagtggttgatgtttccttggacaatttacgcccaagtcccatttccaggagccgaagaaggccatctggttgcctaatccaagaattgccaaatggatattcaaaggcaataactctaatttcctctttaatatttaaatccctatatattctcttaatttgaatacaatattatatattgatatataacttggtacctatgtgaatataatttattaggttacttgggtggaacatgttgaagtggatgatagagctgttcacaacatctacaaaccgctagttaactcgggtattgcctttggagcaaagcgttgggtagctacattggatagacaatgtgaacgacttgcaagctcaatggccagtaacatccctgctggagatctctgtggtatatataataaatttataatattaaagacttcattattaattgctcgatcgatatatgatattattatttgggatgagattataatgtgttatggttaatttggcagtgataacaagccctgatggaaggaaaagtatgctgaagctagcggagagaatggtgatgagcttttgtgtgggcgttggtgcttcaactgctcatgcttggacgactctgtcggcaacgggttctgatgatgtaagggtcatgaccagaaagagcatggatgaccctggtaggcctcccggcattgtcctaagtgccgctacttcattctggcttcccgttccacccaagcgagttttcgattttctaagggacgagaactctcgaagtgaggtaattaacagaaataccgcttcatataaaaaactgctaaccactcagaacgaacataactgttaataaccaatggaattgacttgttattatctaatgcagtgggatattctctctaatggtggactagttcaagagatggctcatatagccaatgggcgtgatccgggcaattgtgtctccttactacgcgtaaatgtacgttagctaaagtaaattttttatattagttgtttattattattattaattaattgttaaatttatatatgcagagtgcaaattctagccagagcaacatgctgatacttcaagagagttgtacagactcaacggggtcttatgtgatttatgcaccagttgatatagttgcgatgaatgtggtattaagtggaggagaccctgattacgtggcactcttgccatctggctttgccatccttcctgatgggcctgctaataacaataataatattaataataataataataacagccataattctggtatcattaataataatggaccagctggatcaggaatcgttgaggttggttcgggtggctcattactcactgtggcttttcaaatcttagtagattcggttcccaccgcaaaactttcccttggttcagttgcaacagttaacaacttgattaagtgcactgttgaaaggatcagagctgctgtcacctctgaaaatgttcaatgatatttcggtaaaggcttcttatgatgtcctgagatgatggtgatcgagcatttaggtgagtgagtgagtgagtgagtgactgagttcattcatttatataattaccaaaattaaatctctaagctatatatacaatatttgttatttaattaatgtgtttttattttgcagtgactacatcagaattaatggaaagtatgaactaagttaattagtcttagtttgattaattattaggatcttaattattacgaggtataaaagaaggaagtcaagaacgcaccttagaaaatatatccttgttgtgttgatgatcgatgatgaggacaacaaagttggagaatggagagactattttgtgggggaaattcaattaaggataatgggttcgggcattgacttcggaatatcaaattaagtagactcatgacgtatgtacggcctttaattattgtttataataaattttaagtttcaataacttttgcttaattaattttaggccctttttggtttaattataattagttgaaaatgtactaatattatgtcatatgtgactcaggatccttattaatgtagatcacattatttagtatttcaattaattaattaatgtcttttatttcaaatatatattactatatattttcacttaattattattcccgattcactatgtactatatatactgcatatgcacttctttaattataatattcttagataatattaataacaaatcatggtaaagctatacttgttaaattaatttatttggtgcaaattcattcaaacagccatccgtcacccgtgtatatatatatatatatatatataaatatatatattgttagcattaattttcatatataattacatcaatgcctatatgtttgatcaattaagttatgaagaagcacaaaaattatttaggtacacatatccaaattatgggttgtttaaaaatatatatagttgataatataatatattgcttaaaagagattcattgatgtatcctatttacaaaatattttttagtttaatttttatcttttttatatttgtgtatgttatggttatttaacatattttataaaattaaatctaagaaatttaaaataatttataatggagaaagtaatgtttaaacagttatgcgtatatataaaataaaataatcactcatacaacaaatgtttaactatattttcggcatattaaatttttcaaaattttttaaaattttacaaaatgtttcaaataattataacgtacataactataaaaaaaaattcactgaaaaattattttagataacaaaatatataagaataaaataatacattcttgagtgattgtaaatttttttaataataaaattaaaccaaaaatataataatttaattaattaattataatatataatccatttataatttataaaagtttcattttttatataaaatagttttgtcgtttccctttatagacggccaaatttataaggtgtgtatatatataatagtacaacttattagtaactttaaaaatactgacaatcattaatataagcagggtcagtttagatatgacttccctttaaagatcatacttgttttctcatgtaaaattaagtagcttggggaccatttgtatatatagcctttcagacaaatgctgaaatatataactgatacatatcaaaaattaaagtatatatatatatatatatattaatactttttataaaatataacaataataataataatattgaagtctgtgaatgtgatagttctattacataatgacataaattggtagctctggcactattactatcccaagcacacatgtagggtcgtttgtcatatctataaagctatcactgttcataattataattagtaatgtatacctcctcctccttcttcttcttcttctttatattttatatacttatgaaacatatgcatgagcgaacctacatgcaaactaaacgtataaaattggactaaattctaaattatttgaacttaaatttaaaatcaaatttaggcttttatatattaatattaatttagttaaatattatcaaattgtattatttcgttatattgataaatctatattaatcaaagtttatgtatctcatgttaggcgagattctaatcaagtcgctcatggtttggcaaaataagttttagtgttggataataattgtgattagttagaaaattttccttgtactattttttcttttgttgtaaatgactttgtgtaatttataataaaagtcttttcctaaaaataaaaagaaagttataagtttaaaattctacatttttacttactttttgattattattgagatttgaattaacaattaatttaaaatatgaatacactaaaattctcaatttttttaacataattaatggtttattatttcattacaattaattctataatttttattaaatattgaagttcacataatataagaaattagaataagtattgctattaagtatcatgattcttattacgattatggtgtgatgccttataaatatttattagttttctataattattattaaaagtaaaatagctagatattaaattacatcaataacttatgacactttacaaagagtgtaattgccctaagttaaattttatttctgatttcttctctaaacataatatattaattta

SEQ ID NO: 16980 - DNA, 6071 bp, Cannabis sativa
attattattgatattaaatactattttagacgaattatattcagttagggcctttgaacagcagtacaatgttcaggagagcaacccagtcaaatgtgtatttgatactttcaatactatgttggaagttattaattgttacttttggtttatggttgtgtgtttttcttaaggtctgttttgtttcagatggctcatttcttgaaaatcagtcttgaaacaatcttaatgtatttattttttaatagaagaactttttggtttaataattaaatcacgactaaggtggcatatgtgtgtctgatgaggcatttatggtgaaattaatttgttttacagattgctctgcttgataggcaagaacttcaacaaagagtgaaattatactgtatgaatcgcggaccttctgagcattggctttattcgggaatttacaagagaaatgatttgcaaaaggccttggggactcatctttcttggaaggacaggtgatgcatcccaaaaattatgaataaaatatgtggagaaggtcacaaaaccttcattaatcattgaaaaccaggagtatatgttgacaaacctagtctattagaaaatgtatagaatgaaaccagcaaactgaaaataatataaatttagtacgtgaaatacatagcaattgctataaatatcaggaggggtagctcaggttaggtatgtggtttgttcccaaaaggtttgaggttcgagtctagcttgggtgcctacatgggaattgctataaattcgtggtctccgaatattgtagggttaggtggggatcctaatttttttttaataaaaaatacaatgagtgctcaaaagaaaatcaaaacacaattgaaaccaatcatttaacgttttaaatcaattatttttagttttcaagcaactttttcaaatcataaaattttaaattatatttcaaaaatggagataaatcattctttttcgcttttgtttacagtaatgaataaattcatcaaagaaaatataatgatacaggaactaaaaggaagaaacttttagtcacagacaatcaaagggttttatgttcatgtaaaaaacatgcataaccattacacaaattaattaatcatcccctgcctgcttgttgaaatgtagaacattgtatgtactatgtacggtgagatgaagtctcaagtcatgagcatccatccagtcctctagttagaattataattatttagatacatgattaagttcaacctcatataccttccaaactctttagaaagtttgataccataaactaactatgaacttgatccttaagggaggacattgtatgcccatactacctgctttatgcttccatcaaatcgataatttcaaagtgatttgtgtgacccttgtgtcttgtgcactgtcattaagattcatatgcacagttttgctttgcagttcatataatatttttcttcattttagcttgtacttaatataatataatatatagtgatagaccctattagattccatttcatgtcatatcatataaattttttgttgtctgctgcatctaatcagttgctgacacccacaggtatcccacattcttcgatgatattgccgcacgtttacttccggtcattccattaatagtttatagacttattgaaaatgatgccattgactcagcggatcgaattctggccatgtattcaccatttcttgcttatcaccccctaagattttcatttgttcgtgacattcttgcatatttctatggccatcttcctggaaagctcatagttcgaatcctgaatgtacttgatctaaacaaggtgatgaccactgtttctgttcatccttttcataaatacggaatttactttttcttctttcaatttctctattgacttaaatttgtttcagatcccatttacggaatcatttccacaacatatcagctcagcaaatcctgttatgtgcccacctcttgattattttgcaactcttttgctgggactagtaaataatgttatacccccattacatagcagctcaaaatcaggatcactgggtgacaattctagtactttgttacgcaagaaccaggcaacatctcagtctgggcaatcaaatgcttctgatagccaaagagctttttatcaaatccaagatcctggcacatatactcaattggtccttgaaacagcagtgattgagattctctctctcccagtatctgcatcccaaattgtatcgtcacttgtacaagttattgttaatattcaagcaacacttgttcaatccaacggactgcatggaacaccaaatagtgttggacaaggctcagtcttaccaacctcaccttccgggggaagcacagattcattgggagcaagcagatcaactccttcagtttcaggaataaatacctcaaacatggtctccagaagtggttatagtagtcaacaactgtcttgcttaatgattcaagcttgtggtctgttgttggcccaacttcctcctgattttcacatacaactttatatagagacatcaagaattataaaagaaacttggtggcttactgatgggaagagatcacttggagaactagactccgctgttggttacgccttattagatccaacatgggctgctcaagataatacctcaacagcgataggtatgatgtttaaataatcatgaaattactttttgtttgatgatgtctaaaattgtaattttccaaagcaagctgagcctcctacgatccacaactaacatttatccctgtgacgggtatataagtgcattttgagctcacagaaatagtgctaaagttagctgggttatttcttttcttgaaagcgcctggctatgcctcagaatgttcttatcctggtagattttccatttttaggatggacggaagatctacttgaaagccttcttgtttgttttcacctttctgtatctgctctttcatttggtttataggattaatgaaatcatttttgccaaaaaaaaaaaagaagtttgagaaaatctgtaactgtatttgggttatttatgagtacctactttgttctttctcagccaaagatgattcttagcaagtattcaactcaatctttggcattgtgtatatgtatttctgaatactgactgtaactctattgtttttgtttcaggtaacatagtttctttgcttcattcggttttcagtaaccttccacaggaatggctggaagggacccacatcatcatcaaacatctcaggccagtgacatctgttgcaatgctgagaatagtgttccgcataatgggtccattgctcccgagacttgccaatgctcactcgctttttagtaaggtacaatattgtgtatatttttaacacagtaaggtgcaatattaatttattaaatgaattggtcttcattaaacacatgctctgagtagaatatattcaactaaatactgaaaactgcctttgtattacatgattttcttaatcatcagagttaatgttgtttctataatgttctcaacctcatttccctttttcttggacctgacactgttttgggttataacaaccaaagtcttcattgtcaaaggctatggctttaaatgccatctctgacatacatggtattcttaactgattcttgtatctatgcaatttcttcgatttcaacttaaaaatttctttattgatatttttgagcggctagactatttaaatgtatttgagatataccttttagtatagaaaaagcagactatgtttttctatttcaatatatggcttttgaaattgtttttgtgacatttaaatcactcggttggtgcgcagatttcatggataacagatcatgcctttctttttcctgattaacttatctgtaatgtgattgtctctagaacattatacatttccagtcaaacccaacaccacaaccaaatgtttcaccttcttaatttacttctttactaaaatgttttggtaaattctttcagaccctttcattgctgctgagtacaatggtggatgtcttcggaaacaatgcacaaccatcaaacccggctgaagcatcagaaataatagatctaattgactttctgtcagttctctgtcctttatatttttatctactaagcttgtcatatctctgccttaagatacttacatatgctttactcgtgtatttttcgcagtcatcatgttgttcattatgaagggcagggagggcctgtgcaatctagtagcaagcctcgacccgaagttttggccatttttggaagagtattggaaactctacatcctgatgtacaacatcttctttcccacttgagaccggatataaactgttcgatttatgctgctactcatcctaagctggcccagaatccatcacaaaactctcttacctaatatagacgacgttgtagtttacttagaaccggtagcaatgtcaaatatcaggttagtttgtctcaccagagttcttcacttcatatcactctccttgcccaagattaattttcattatatcggtaagcttctgctttggaaacatgaatagaagaactcatccttgcataatttttatttttcttttatttataaaaagaaaaaaaagtgaccaagattgatttgtgaagttgatttgagttagatgatcaaatgaatccattcaagtgattatgccaattagaacaatctgcaatcaaattcactcccagaaataacaatgacattacacttatctctttcgtaaataccatttggatccttaaatttaccgcaaaagtattcgctgcactagtttactgtttacactcgtaagatccttagattagattggatttgagctgtattggattcagaatataaaattcgcacttagtgcagatcggatgcactatggataaaatagtgcggattgaattagataaaaaccccagtttaaaagttgaatgagctctcttgaatctattttcagcaaacacttttagaggcaagtcaattttcttggagaaaagtggtatttgaaagataccttgtttttatgtatatattattgggtaaattggaattggatgaggatatagttaggattatctaaaatacacaaatcttgttctactagtaaaacttggtctaaatttgaggcaaaaattcttagccttatataatttttcggttttagcgtgacgaaaattctctttaatttatttggcataggattcatcttgaactataacaattattgtgaacatgcttattttgttacatttcattcacttatgatgtagttattaattgaaattatttaaataaaattagttgaaatttagtttattgacactttaagtacaaacattaactcaaagaatgtatataaatatttgaagaatttatcattagaccataatttatccatgtattctcttttctaaactcacaaatcatatatactatattagcatcatattatttttatattaacaaactatttaaaaatataaaccaaatgtttgataggatatttttgcaatgacttaaatagttgagggagattttgaaaaaaaaaatatgaggaattttggctaccaaaaaaaaatcagaaagaaacttacaagatctataattctagaaaaaaaaaaaagatctatttacccaatcaagacacaccaatactaataattagctattttgggtccactcaattacttgagtgagagaaaaagaaagggatgaatttttccatctaccaaaaataaaaaaaatattaaaaagatattattgatatctagtaattttttacgtgctaaatatttttattgatctaattaaatattagattttatattatttaatgtaataatgtttaaagagtataactaataatgtaaaaatatatttaaaagatgctaggtactatttatgcgtgcacaatagcgcaatgttcaaaataaaatcaccaaatttgtggtaattactaattagtaacaaagtagtttttggatatgaatgttgtagaatggaattgaattgacttatatatata

SEQ ID NO: 16981 - DNA, 6027 bp, Cannabis sativa
agtgaaaattgattggttacaagttattgtgctaacattattactccaatgagatttgattactttacctttagagattgtaactctatcctacccatggtgggccatgaagaaggtggcctacttccttcaatgattgctggaggctcttctgggatatgcatgaactgtttgatcctttcaactgaaacaatatagttggctaagttgcaataccatcgagtcaggaaaatctgtgttcctgttagtgacaaggcataagaaagagaaagccccacaagtcctgcaagtgaaaacattcaataaattctgagatcattagtattgaacccaagtttcagtgttgaaagtaagaacatatataaaaaggtgttgggaataatacctggagctatctgaccctttggaagtaaaataaggaagaatgctgcagtgaaaagagtcaaattttgaagtacttctattcttagaactaaccactctatggctgcattggatagaaagaacaagactgcatctgtgtccacaagtttgaggtaatctttaaagaatcgatccactgacccaaaagctcttattgttacagcaccaagtgatgtttcagatacaaagttggtaacaggagcttttgttgttccattaattcttattaactccctagcagtagctagataatagcccttgcaataaaaaaagccaagcattttagctgccatcactctattattaaagaaagaagaaagaacaatgaactaagtaaggtttttatgcttacctgaacatatacactagcaaccaggctgaaaatgccaacaataagaacttgccatgtgacagaagccataatgccaattgttcccagaagttcagtactaccagccagtacaaaaacgacagagaaaggtatgtcgtagtcaagaatactcaaatctgatgaagcctgtgatgaaaaataaaaataaaataatgagatgtcatgtcatctcactaagctaaagggtagatttctttcaaggcttactcgggtcaagattcggccaactggggtggaatcaaagaatagcatgggagctttaaaaatagcattggtgaagccagtgaagaaagctttagaagcttttattccaagactagctccaaaaaaggctcttagatacacaaatatagcactaagtgttgaaattccagtataaacaccaaccaacactccacttgtgatcttaggaacttgaatagctagagctaaccaataagttgctgcagcttgaaatgagaaaaaagcaagctgagttactgttgttaagaatagaagaagcgaccctttagagacaaggatataatccttaaatggcttccaacgcacatcgccaatctctttttcttcttcttgtgttaattgcactcctggtacactatttgcagagatttcttcttcagtgttttgtttggagtatgaaccataactctcctctgttcttaactcatctaccatatgagattctccttgtccttcgttattcaaaagaccaattgtagagattgcatctttatgagcattcacaagctgttcaaatgctgtcccagctttcaggagttcttcatagcttcctgagtgagtaatgtttccatctttcattacctataagcaaaaaaagatagaattttcccaaagtgtttcacattaacaggatatgttatcacacttttcagactatgatgttgttaattctgattcattgaaagataattaaaaacaagtaaaaacttccaaagctgttcatgaatattatttaccagaattttatcaacttcagaaagaaactctacttgatgagtcactagaataacagttttatttctgagagcagccatgacacaatcctgcatattttttaccaaacaaaaagtgtataatcagaaacaaatctcatgttttcatgcatacaaaaatggttcaaatttctgttctcttacattgaaaagagtagcagcagtatgggcatcaactgcactaaaagggtcatcaaggagatagatatctgcatcattatatacagctctggcaagctggattctttgcttctgtcctccactcaagttaatccctctctgtcctatttcagtaaggtctccatggctgaaactgttgatgtccttatctaaagcacatgcttcaatagccttttcatattgaattttgttcattggttttccatagagtatgttatcacgaattgtcccactttgtatccaagaagtttgagaaacataggctatggatccatacacttcaacctgttttcaaatatcaaaaaacatgaattaaagagaagtacttctttctttttacatggtgtaattaatatcttctctgcacttacagttcctgttagctttggtatctctccgagtatggcatataagagtgatgactttcctgctccaactggtccacaaatggctactttctgcctcaatccaatctccaagtttacatcttttagtgttgaaagtgttgactctggatcccaactgaaaactcctccttgaatttctaagctcttatctgatctgggaaatgagtgtcttctttcttcctcatctttgagctcatcatctaataaaaatgaatttagtctttccaacgagacctttacttggattattactgaaagggcctctggtatcattctcacaggctctgacatggtccttaaagtagcaagaacagtgaaaatggtgcttgcattgagtggggcactaccaagaagaatacatccaaagaacacaacagaggaaacaatggttggagacatccaatacagtaaagtcccataaaccttcttatattgtgactctgataaccatttgagttcgcgatcacgacgggagttgatcaagttcttaaaattttcttcccatgattgaagcttaatgattttcatactgtttagtatctctgaagtggacctgagtctttcatcttgagcaaccatgaattcatactgacacttttggagtatctttgcaaaaggtatgttaagaagtccacatatgaataaaggaagtaaaccaggaagagcaccataaccagtgaccttgaaaagaacaacaatggacagtaaaagctggaccccagaattccatcccaagtgaagccaccataaacattcacccattctataagcatcaactgcaacataattcactatctcccctgttgagtgtcttttctttcccaaactagacagctttagctgcttttcatagactgcaaccattaaagatgatcttattctcatcccacttcttcttgagttgaaaaaccagtgcctctgagttaaagactcaacaaacttggtaagaactagacaccccaatatagaaagaccttgttggagattttcctctttgctatttgcataatttacaaaagcatagagtatgagaggagaaactactacagaaattgtccttaaaagtgcacaaatgccaatatatatattttctttcatgtacacttttactattgcccaaaggacaaagttctttgttttgtctcggctactttcctctcttagaagcccatcccatgcttgtttgaacttttggtaacctatattggcttcatcttcagaacttaaagaagggatgtcttcaagagacaatggttttgaataccccaagctaaacaacttaccaatccaagaaaatgtcagtttctcaagaaaacaagccctgtctatttctgttcctctgttttcagtcttttggacaagaggctgggatagactatcatcttcattatgctgagaaatcagttgcctgatattcataaaagcacaaaccagaagtaaaagattcacaagccacagcacaatgtcgatgacatcaatactttttgctctgattagtatttcaaggcttagagctgaaatcaaagaaaaggagcaaatccaccagacagagttcagaactctaagcccatttgtcccctgaagatgcaaagacactgaaagagatatccaaatgagtgctctgacaaggcaaaccaaccagttggagtgatcaaatgtgtctccttttgcatttatattaccaaaaccagcaactagatatgcaaggcttgtgagaccacagcaaattgaaacagctaggaatgtccaacaaccccttctgtttgctgtgcatatattacgtttccttaaagaaactactaccaaagacaggcaaaacacacataggaacagcaaatttataacatctatgataattctttggatgtaataagaagaacccatgtcaaatttgccaccaataatcaatgaaagcatccctgcataatgaaaatgaatcacaatgaatcgttaaagaacaaagtaaaacagtctttgaaactcagtaaggaaggaaaaatagaaatggttgttttgtataccaaatgagtctttgagagtcagtaagtatttttgccaagtcttttatgttttcatggctacagcagaaagccctggcgggcagtttccaggaaaaaccatttctaatccactccctctgttttgtctgtatttgtcctaatatgctaaataacttacctttttggcttcatcttgtttttgttttatattagaactcatttgaggctgctgttccttgttgttggtgttatgtgtgtgtatgtaccttgttgtcccatctcgaaatcctactttttccgctatagataattcgagtaatcccaactttctaagttgtataaaatgtagcaacataaacttaaatttttcataaaaacaaatcggtaatcatactcatttttccttttaataattgttattgtaagggacatgaatctgtcctatcatggattacttttcaactttttataacattttctttctcatttactttttattttcaacatttgttaagtaaataaattagtaaagaaattctgtatgaagtttacttagtacaccgaaaataaaattcaaatactaatttattacatttaaaaaaaaaaaaaatctcaagtataataaaatatataaatcttattttcaatcttataaattattcaaataattcttataagatttaaatcttatattcaatattttttttttttttgaggaaattagactcctttttatattgtactcttttatttttactctcttttttaaagtctattacttttacctcttttttttaaatattgtactaattttatctttttcacttcaagatactctccatgtgacttccttatgttaaggtattttgggtacaatacatataaaaagagacatgtttcaattaaaaaaaaaaattagaagtatatttagttaattaattaataaaagaggcctttttcaacttacccctattatttttggatttttagataatgtactgttttatgttaaaatctttcatttatactatgtcacgctagttttctcatttatactattttgaattgtttttttttttttctttcatttttacttgaaacaccataaacctttctatgattccataactatcttcgtcttcattgaaccttctatctctatactattttatctcaattcaattacctttaacttatatatatacattatctaaaaatatacatacatcatatatatactattttaccttctatctctttcaaaaacttatatatagatatacattggaaaatttaattttttatccttgggggaaatttttccattaaacctaaaataccttatattggtaaaataagataatatttacttaattcgcacattacctctctcattcaaatctgactcctctctctttcccctctctttttctctttctctctctatctcgcaccctcaactgcacgcacaccggacacagacggagaccgcccacacttgtccacgcaagctgcccacacccgaccgcctccaccgtccacgcagccgaccgcccccaccattgggcccatcgatcccaatgttgcgatattttgcacacgcaagtgta

SEQ ID NO: 16982 - DNA, 3243 bp, Cannabis sativa
aataaattcaaattaaattaaattgataaatatatatgaaatacatccaacagatagaaccgattcaatctaatatttaatagatgttgaatcgattggatgactaatattaattggattagatcagatgataaaatttatcatttaatatataattagatcagatctaaatagacttaaaaatattagatgtggtcgatatgtaacgaccgaaatatctctcaaatatattgttttttttacagataaagtcaaaagtggcatataatatattttaatatttggtccccatacattaagccatacaaagccacacacactacctaccaaccaaccccaacccaagaaaggaaatggcaaacgcaaacagaaaactcaaaaggacctactaacttccaccatccatcttcattccaataaacccatatagctggcattaattaaatacaaaacaattttcagccctccatcttacccacgtgtatggaaacgattcaatcaccacaatccattctctaattaatatttcaactgctctcaacacgtggcaaataactacaggtcagtcagaaggagacaataaacatgatttaactaatattcaaaatcaacggtgacaaacccattgctcggacaagacttgatcgacctttaacttctctcgtgtatatataaatgcagctaaccccttttactcctcaactcaaccaacaaaactagaaatatttgttctcaaactcctctcagtcgccaaattctcacacaacaccaaaatccatatagaagaagaagattttattttcagacaattgttgttcttcatcaccaaatttcacataaataataatttctttttttaaaaaaaatggtggtgttctgttttttggtggatcagaagaggaaagtgcggcggagcaagccggcggcgggaacatgttcacggtgtggcggcggagcaagcgtggccgatatgaagactgctactagattttgttacgtcccattttattggaagtcttggagagctattatatgtacattttgtggtgctattcttcgatcttatagataatattattattagttaattaatttttccttttatttatgtgcttaacgcctttcttttatttctctaccactcaaattataccataacatttttatttttattcctataattgttggtttaacacgttccaacccaataaagtgtaagaaaaataaaattgtaaaatataaaatagttttttggtaatttcaaattaattggtttgtaataaatttcgccaattattaaaacaatctcatatctaactctaaacaataaagtgtacagttgttttcaacttttccatcttcctactattttagttcacacattgaatgtcattgatgatgcatttaataaaaagaagccaaagtatagaagcaaagaacaagaaagactttaggtaaagagcattactaataggtaccatactgcctaacacttttttttacatatgtcgcgttttgattaactagtgatacttttattatatattaaattatatggaacaaactgatagcattaatatagacacgtaaaaaaatggttaaatacctgccttttattaaatatctatgcttgccatatatttgagggtaatatgtatgatcaattcgagccgtcacacgcacatggtctatcataaaagtcgtaactaatgaagctagcaccagtagccctcccaattaatatgttattaatattatttatttaatatttgacatttagaaaagtcaaaacaaagaagacttggcagctgtatatatacaattgcttgccagagatgtaaaaaagaaaagggtaaatgtagggtgaaatcaacacaaggagaagagtgtactactactttatttactacaattcagaatactgtccctttgagaaaatacagctttattgatgattgactagacaggcagtaagatcacagctttcagcatttattattagattggtggatgatagatagatgatgatgatgatgatcatgagtactttctttcttttgattttatattttaataattgattggacccttttagactaaggtggttttaattttattgcacactaatggaatctcgttgttttattttcctttcagtccaccactatggttatgaactcacaattctaaaatgtaaataataaataaaagggaaaaccttgaaacagtaagtattatcaagaagagttttcaactcccaatggaccaaggggggtttgaaagtacatataatattatttgacttgttcttataacattaattgcaatgataaaatattctaaaataagagtcccatctttatccttttgatcaaatgaaaaaaaggtaaagagaggatttgaggtatatagaaataaaatcctaaatccaaagtgatacattacatatttcaacttttgagagcgctacatatacaacaaataaacataccaaccatgttaattaagaatatatattaccacatatatatattcatatattagcatgtacattcatatatagatatatatatatattaatatacatattcacattattcgcgtcttgcatggatgtaaaatgtacctaccaagttgtcaaccactttttaaatatgacaacaaatagtggcatgttgatatgtacagtacgagtactagagattcaaaataaaaagaaaccaatataaggtattttatattatattaggttagttgattgggagtattaaagtgaggactttgtaatatatcgtattaattaagctatattgttttggctatatataacactacaaatattatgttcacacgtgccttttctgtgatccattttttactctacagtttcttgaacatgtattaagctcgattcccgttggcctcgcagtggtactttttgatgaatctgataataaaaataatactgcagccaggagtgagttttatttaattatgagcatgcaaagacttcacttagctatataggaccataattgtggtgaaggctgaggctggttgaaattgaaagagatctgccatccaagccatatatatattaagaagaaaagaaaaacctatatatgatgtagaatgagtgacgaaagcaggtgttgcagccaaggaagtatgaattttttttttctaaaaaataataataatgaagaaaaatttgttggaataggaagtaggaattctatcttg

SEQ ID NO: 16983 - DNA, 6127 bp, Cannabis sativa
aaaaaatgttgatattatacattttcatgatttcatttttccaaatttaaatacagatttccataaatctttttcctttggatgaggaagattaagtcaaatccatgatcacgctccatttgaatacagatttccataaatctttttcctttgcagtactggatgatactcacgccactcatttacttaaaatatcacactgatctattggaattagctgttatcacttgtaaattttataacatgacgcatattctacttgaaagcaaacatatgcaaaacaaaaatggatttatcatgtatgacataagaaagggatttaactttataatatgtgatctgaatcacatgacagctattctactcataacgtttacacatttcaataaaaaaaaattatttttttatgatgtatcttgtaactatgctgtttatttagatatcctagcctcttttctggtgcagattacattatatgctgcttcgtatatttaaattgcacttcataatcaccaaccatttactgcaaactgcagggacacagagctgagatatatgctgcccgtgttgcaaaatgcttaaccgctctagaagggcgtgaaaaagttactgttgatgacttgaagaaagctgttaagtattcttcagaaagatttgtctcgtgattttctttccatttatataacgtttatatatgtcatttgcattttacatttgaagatgtttcaataacttcatatatggagacacttctagtgtggtgcaaaatgcttatagtgttgtgcttcctgaaatcttgctgatccaactaagtttgtcatcaaatttaattaaggaattgagtgtgtagtttatttcacttttactttgcttgattttccttttacttgaatatatacctgtaaaaattttgttgtgacatattacatactccaggtagaacttgtcattcttccacgctcagtaattaatgaaaatccacccgaccagcaaaatcaacagcctcctccaccaccaccacctccacaaaatgaagagggtgggaaagaagaagaagaagaagaacagaatgaggaagaagacaaagaggtttgttaatattgatcaaatgttcaatttaacatacgatagtatctagatgattttcttttctcaagcaactataaatatagttggatgcatttgatagcttaattcctagctttcatacaccttaagatttcaaaggacttgctgttttacctatgatacaatatttctttataaccaggatgatgaggatgacaatgatgaagagaatgaacaacaagatcaaatacctgaagaatttatatttgatgccgaaggaggtttggtggatgagaaacttcttttctttgctcaacaagcacagagacgccgcgggaaggcagggagatcaaagaatgttatattttcagaagataggggaagatacatcaagccaatgctcccaaaggttggttcttcccatcatgtttcgtattgtctttgttctaaatcaccgattcaaaataggaattgcatctacgcctttgtgaacttatctctgcatattgattgtttgagctcttctcttccaaccattctgactttttcactttgctgtttggtccatttacgagtcccaaaatatccttatattaacaaacttgtgtattttcctcctgggttcacaagcttttctagacttttctctaagattgagttcgttgactttctctgtcaaagggaatttgcaactctcttccaaaaacctcggaagtctcaaattgatacatctaataatgattttatttaccatataacagttctctaatcaaactttatttttaacagggtcctgtacagagattagctgttgatgcaacccttagagcggctgcaccatatcaaaaattgcgcaaggagaaggacactcagaagattaggaaagtttttgtggaaaaatctgatatgagggcgaagagaatggcacgaaaagcaggagcactggtatttgaagttcttaaccacgattttgtcacatggatttgtttccttttatatttatatatatatatatatatattttttcaagaaacagaacatattattaaatcaaaggggtagtagaatatacaaagaaaaaaaaaagcatgctatctttgaaacggagagcatgaactgaagaacagcaaaactgctgacagacatgaagaaaacaaaacatacgccaaatccaatgaaattaaaatacaaaactaaatttggaaaataaaattccagtctcttagccaatctgaaaaatggatgtaaccaaagtgtttgacattatacagtgccaatttgatattagcctatctatgtctttctcttttgtcatgaaaaattcggttgttcctttctgactacaaaacccaaaaaaacaacagctacagtggattgccacagcttttgcttgtgttggttctcccttatatggaacggccaaagtctgagtgcaacatgctgaaacacaccaagataaactgaattcattgagaaccttaaatcacagattcaaggaaaatgagcactgtagaagtagttgatctattgactgggttcctcttctacacaaaacacaccaacttgagggtaacagctgaaagtttttctattttgcattgccatatgaacattcactttgttccacaacactggccataaaatcttttgactttaggcggtgcctcaacattccaatgagaagctgcccacaaaatgctaacgtaaccttcatgcattcggagggactcaaattctgatttgcatggaaaaatctatgaaatatcccttttccaagctctccggtcttccagtatatcctgcagatgtatattctccaatctctgaattagcttaatgtaatactcaatcatttagatgtcgaagtaggtgaagattccaactaaatgctcatctaacttttgcaatttatatttgctttcgataaccttgtgccacaacaatgattttttgcttgggaacctccatagccattttgtaagtagggatttgcttttcatggatagcttccctatgctcaaacctccagagttcttgggtatacaaactgttccccatgaaattaaatgctcccctctccctaaatcccctccctcctagaggatgtccctcatttgtctctctattgtttccaccgacataggagctttgaattttaaaaggtaataagaaataggcaacgaagatagcactgattataggtcaaccttctcgcctttggacaaatagtcatttttccatccttctagtcttttggaaacttttcttatgattggctcccaaaatcttaccttgttagggttgtctctcaaaggcaatcctaaatatttccctgcccaatttcccacagcacattcagccccattaaattaatttgagtcttattaatattgaaacctgacaaagcgctaaaagcttgtttaagtaattttcctaatgattggagcaaccaataggcagcgtctaatggactagtatctctcattccctgataatatagtcctctgtacaatttttactgctcctccatcaatggaagctgttaacataaacaccttatgtacagtcttaaaactccaatatctcttactattttgtccataactagcgggttatggagatcttctacaccatgaccagtggaatcatgtcatcttctctctctctctctctctctctgtatggtgaacttttgattttacgcttgaaagatcttatgtgctctaacattgacatcattacaggttatatttgtagttgatgcaagtggcagcatggctctgaacagaatgcagaatgcgaaaggtgccgctctaaagttactagcagagagttatacaagcagggatcaggtgagtaaacaaatatatgtatgactcttatgatctcataaatctgtgctgtaattagcacctcaaaacaaaaattgaggtccaaatttatggtttttacttcattctatgttttgaaaaaacaaaccatcttcattttcaacaagtattaaattaccaatgaactaccatgttacaagttattcttccagcaaattgcgtcctttttttaattttttattttttaaattttgtcctaaaagccttcgctaattatgttgaggcatacttgaatatttactggatattcagtcacattgtctaaatggtgggggacttaagcttgaaatgtaatagtaatgggaggatctgaaagaaaagtcaccggttttggcataataactgacatatcttaagagagaaaatgaatttactggagcccataattgttgactaatagtgagttcaaaagtatgtttgcgtgtgttcagttaaacattgaaggtaattgtggaatatcaaatggccgcagatgcaggcacattcactacttctatgttcaaatgtagattaagtatgaacaccgaattaatcagttcaaagtggaaacaatactagtttttgctttattttttcaatctgattcaaatgtctcttcagattatacaattctccattatgttctaataataagaaaaggacaagttgtgttataatgagacttgttgatcttgttaatttagataatatgtctgagtcttttaagtgaacgtggaccaggtttctattattcctttccgtggagactctgcagaagttcttcttcctccttctagatcaattgcaatggcaagaaaccgtcttgagagacttccatgtggtggaggctcaccccttgctcatggtcttaccacggtgtgtattatatcattaatccacaactaattgatcttgtacgaaagtaagaaactaaaatgaagaaaaatatggacggaaaactctgtttggagatgttcagtgttttatatattatgactaggctccacttagtatggaccttctgatatacgcttaattattcttaaaacaaataacgaaaatatacacttttaattctttaattttacactcaccatattttttggtgctgcaaagtgtatgagtcttattatctgctcgtaagtgcagtggtaacattactgaccattttccaaatatgaacttaaaatctctttaggctgtcagggttgggctaaatgcagagaaaagtggcgatgttggacgtgtgatgattgtcgtattgactgatggtagggcaaacatatcactaaaaagatcaactgaccccgaagctgctgctgctgccgatgccccaagaccatcatcacaggagttgaaggtgaatataatattttttttaatatacatgtggcatgttgtgaatgaaaagtctaatacttcttattagtagcctaagtgatgacaaaatttcttgcttgatacgacaaagcacttgcaattttctgaagaaaacaagctcaatcatcagtatataagatgttggagcaaatttttattgttaattctagcttgtcatttaatcatatgcatactagatagagcttgaagttctgaagcataaaagtttatcgtactgactacatgctctctttctcaacaatgcttgtcaataaaggatgagattcttgaagttgcgggtaaaatatacaaatcggggatgtctctcctagtgattgacactgaaaacaagtttgtctcaactggctttgccaaggagattgctagagtagctcaaggtttcctttcaactaatctgataagacttaaagacattatcaagtaaacttttaaacccatgagggaacaaaagtctcattgtaaatttctttgtgcaggaaaatattattacttgccaaacgcttcagatgcggttatctcagcaacaaccaaggatgctttatctgcactgaaaaactcatgaaccatgttttgctttgaggctgatatggccttattcatattcatgttattattataacttatcacacataaaagtttcgcatagaaatgagatttcagttttctcttgtagcggcttctaacataataaatcgctcttcaaaaccacatttgtttctttcattggttaaaaataggataattagtaatttttctccctgaactttgacatgtagtaaatcgtgttc

SEQ ID NO: 16984 - DNA, 4433 bp, Cannabis sativa
aaatgtagacgaaccacttcatgcataccacattactcgctgcttcagcagcaagaacgtcggagtccaattctacctcaatttcaatcatcgaagatatctgaacattgagaagccagagttatggaatctataccaatttcagtttctgggataatgagttaagcgtaatggaacatactcttgcatagctatcgatcagttcaatcctacccttgagagaattttccagtccttctctaactcgtttgactctagttcttcgagcactgtatgtattttaacaaatcaacaacatcgaatgaggacagcaaatttcgagaattcaactaaacacgacaaggtaataatgttaagaaggtttcaccggtaagtaggctctcctacagcaaagattttgttctcgagttggcacattcgagctaacatccaaacctacgaagcaagcatgttcatcagcataaaactcggttttaactaacgtgccatgatagttccagagccacagcttgtgattgtaagtttacctctttttcagcagcttccttcaggcctctaattcgagactgaagaacgtcgtattgagataaaagttgttgcttcatagctattgcatccgctgatttttgaggaagctaacaccataacaaattatgaatgaaagaaatatttgtgggaaaatgagagtagttgttaacacacaacatttttgataactttagccaacttgaattcaatgtgtgccaagtatagaatgcatagaagcaaccttatcaaaatttgcttgaatgtttaccttactcaattgtggaaaaaccaatgtgttaagagtagttccaacagcaacagatgctactgctgcaaccgaaatgaattgtgggaggctggggtctataactcccgaggcgacatctccacttgctagtaatgcaatgatgggaaagagaatcgaggggttggttaaagatgagcctttatctttagctggggcgcgtaatagttgtgattctctgtcatcttcatggtttgttagacagataggctctccgggataaaagtttggggccttgggactgaattttaaaggacctatttgtctataaacattggatggagctgctaaagcaatggttactctctctccttgttgtgctgggacatcaacggtttcagtagcaaaccggtgtgttcgtgccataccagtaggggtctgaacctgaaaataagaaaagtatacacaaaaacagtttaagctcattctgatctgaaaaaattaagacattcaacatgaacaaaaagtataccacaatagaatgaacagcagcaggaatgctttgcttcttaatttgcaggaatctgagccccctttgccatgctggaacatccatgctgcgttcggcaggatgagatccttagagaaggccaatatcccaagatcaacaccacacacaggtacattgaaataagtgtgatagctttcaatatctatttcccaaattggcttagtataaacattgatacaatttcaattgtataaaaaaaatagcttctagattgacacaagagaagatggaagctgtcccacctgatttcttccgattcaatgctaattatctttccagaaacaagttcatactgatagcgacactttgaacaagatgctatctgcaccataaggactatgctggattagaacagcatcatacaataatgtctaaaacaaaagagtaacatcttaaccgaatctgccttcgtttatcatgcaactgaaactatattcagagtccttgacaagccagcaggaaataatcagtcacattatcttaactcatttaaagaagggaggttcaagtcatacctgaataccctgttgaggttgtgccaccgctacagctatcatacaactcggacatttcacaaccttcccgaaagggacctgcaaaacattaacaaattccaatcattatcaaatatttggttagctgactaggaagtggactcaatacaaagctcatttagtaagacaaggaaaaaaaattgcaactgaatttgtttttacctcctcagctggtgaaactccaacttggcaaatgttgttgattattctaagagcatcagaaacccttagtgaggctgcaagaccctgaactagtgtagtgtagacccgaacatctggcctcgaccacttccatctctcaacaaaagagccagtttctgtaacccctgcttcgagaacaagaatgtaaatgatactaattcactaagacaatatatagataattaaaaacaactagtaacttaaattctagtgttgttgcaggatatacaggcgaattcaattgtttatcttgatcaaatgcagctctttagtagtcaagaacaagcagaaaaactctttagttagccattaaaagaacatactttttccattaatactgtcttccaaacagcctttgaggcattaaatttttccaaaatcaacttaacacgattatatcagaaacccaatacattctgaacaacaattatatgtaaacatttcttaactaaaatatggagtgagttttgaaaaaacaagctctaaccatacaaaaagtagtgaatttttataacagagattgcataaaaaactccctactttttctacaaaactttttaatattattttaatcaaaagctattacttttctattattttatataatcattttatattaacaaattcaaaatatataaattacaaaataatcaatcctaacaaagcataattggagtaagaataaaaaaaactttctattttaattttttttatctaaaattactaaaatagctaatcctaactaaagtagggaatataagtggattaagactaaacatggctctctatttaattttttagctaaacaatagagactaaaatagagaatgagctttaaccatacaaaaagttactctctacaataatggatagataggtagctcattaaatgtagagagctccctttaacaagtagagatatggtaatttaaacaagattacacttaatttgaaacctttctaaggatttgggtcaattgaacttctctttagtagtcaagaacaagcaaaaaagaactctttagtgagccatgaaaagaaacataatttttccattcaaatttttggtaagtgtagttatcaccaatacttaacaagattatatcagaaacccaatacgttttaacaactaacaagaatattagttatggtgatttaaacacaattacagttaataccaaataaaaaacccaccttgatcgaaactggaacgcattgcatagaaaacagacaaagccaaatcaagattgttcctttcaatagcagcggaaatgatcatcaaacaatcagaaacagaaacaacaccaccaccatttctctcagacctttcctcgatcatctccaatacctcataagcatctttagcagccgaaactagattcaacaactcaacatctaaaaccccattagagcgttcactctcacccagtgaagattttacccgaaaagacttggaaagattgagagtgaaggttttgaagaacagagtgtgggtgtttccgaactggttgttattgccaggaagacataaagttgggtaagaagaagagaagcgagagagccatggtgagctcaatctcaaggccattaaagaaaatgagagagagaagaaaagggttactgtgtttttttgtttttttttttttttttggattggtgatgaagatgaggaaggagaggtggtcactggttcgaagccatgttttcacgtgcgtgttggtgcactgtaactatttttgatcttcaattttgagccgttggattagtataattataaaagatgaaaggatcgtgttctcgtgcatgctggtgcaccgtaactttgtttgatcatctaggctgagccgttggattagtgtaataatgaaaggattattaaaaagatggaaatgttgaaacccgtgttctcgtgcatgttggtgcaccgtaattatgtttggttgtcaattttgaaccgttggattgacataaaaatgaataaaaggtcaaaaagtgtggaggtgcggggaatcgaaccccgtgcctctcgcatgcgaagcgagcgctctaccatatgagctacacccccaatttgacttatgtttaaactaagaacaataaatttattattgttgattttgtacttttaaatattttatgtatgtgaaagaagattttaaaggatgtgaagagagagaaatacaagaaaataatgatcttaagggtttgagaaaagagagggaatgaataaatatacacttccatttagaatattgctattgaatttgtgttggaattttgtaaataattattaaattaaatatcatttggaatttatctatagtaacaatagtat

SEQ ID NO: 16985 - DNA, 6959 bp, Cannabis sativa
  modified_base (35)..(74): a, c, t, g, unknown or other
gtgtttatttcattgttttagataattcatatttnnnnnnnnnnnnnnnnnnnnnnnnnnnnnnnnnnnnnnnntggtaaaatatttccaacagtgtttggagtgattttcgaaagacatatcattgtcttatacgtcaagttatatgtatatatctatatatatatatatatatataatgattgtaaaagaaaacgaaactcactgccaaaccataatcatgctccctcttatttttattttttaataagtgaaaatcaagatcaaactttgaaacaaagaaaatattcatttaagacacgaattcataaatttcaaacttatatgtaatattttttggattttttttccctgaaacttacaattttcgattaaatttaattcataccaatagttaaatgaagttccattaaaagttaattttttgggtgaaaaatgatgcttaacaatggtccaagtttaaattttagacaaaaatgttcttaacaatggtcctgctctattttcaagtgaaaaccaatggtaaattgatgtttaacactagttttgcaatggaatttcataaaaaaattgtaagacaagtggtcattggtttgagatgattttttttttttaataaaagaaaatgatatgtttttcgtgaccaacacatttagattgtgtagaacaagttttaatatcttttttttaggccataaaagattaagacttagataatcaaaatttgttgttctacgctctccaaatctaagattttcctcatttaaactcttaaatctcacaaggaaaaaaaaagactgaaattcaaataaataaaatcacgccaaaatgacaatcaagtgaaagttatgtttgttttcgtaaactatcgcaaaaccatcattaaaggatagttaaactatcttttctttatattttttttaatatatattatgttttgatgacatcaatgttactcgttagtattttttttcttcttaaaaattaaactttcatgggaacatcactaaagcatcgttaaacatcgtattgccccctcccccccaaaaataaatcatggacaatcactaaagcatcgttaaacatcatattttccctataaaaaatcatgaacaatcagtaaagcatcgttaaatattatcttttcgcctaaaaaattaaattttcgtacaacattgctaaattattgctaagtattcatagaatattgattttaattgagaattctgcaatttttaaaccatctaaagcaggcacaaaactaaaatattgtacataggtattcaagaatcaaaatccataaattcgcgtcgcaagtgattttatttttttaatcataaaaatggtaattcaataaaactgttaacgaacatgagtgttttttctttcccttgtgactgtgtgtggggtataaaggaggaatgatagaggagaaagaatgtttgaatggaagatgtaatcttgtctaatttttacaatcacataattttttaataatctaaaataagatgtgtattcagtttctagtgataaataattttaagtggagactgcataaacatgataaatgctaaagggcactagcagtgcctagcaccctcctatgtgtcaatatcgctattggtctaattaagtatcggatcccatataatttaataaattagcttttagggaatatcgctaaccaatcgcaacgtgacatgtcgaaagggtgctagacaccactggtgcctaatagcaatattcccataaacatagctaattatacataaaaagtgtataattaagtatgacaatcattactcttcaaataagagaagtatcatcggaacgcgtataaggtcaaaacaggatttttgcatttgtaaattgaaaagagaaagtttgggacggaagtttcttggtagaaatgttaaggtgtcgttggacaacagtttggtttaatcatacataaaaaaaaaacttgatggtgatgttcaatacttcaatcatagtatcatagaaaaacttcaagcaaagatgttcatctctcaaactagtaaagatcatggagaaggatttatattatacagtatatacttttccaattcaacaaatatattttggtattacaatgaggtggtacgaggagttgaggattttcattttctggacattttggaccaaagataaactaaaaagaaacaaaatagtgcaaaaagaacaacgtggacaacattgtttgctccattttgaatgatgctcttgttcaatctccttacgttgtttttcacccctgcttgagctttgatcagtgtcatttgctgtgaataaaatatgtaaaatgagtttatcagacaggtttgcatccatttcctcaagtaaaatgcaaagtatgaaacagggagacacacagcctatcttaatttggtcataatgttataataaccacgctaaataaacccatgaagtgacacctataaatagaccactgtgaaaaaggaaagaatagaaaaaaagaggagcctcatatgtatgaagcacattcattctgagaccctcttaagttcctatgaatatgtgaaattatgaaatcaatcacaatcacaaagtcactgggtgacaatggcaatgacatagatagtgtaatttaaaataatcagttttagcttccatacatccaacaatgtgttaaaaacatgcatgttatccattcataatttcaacatactataaataatgaccatgtaaataactattaacccctcctcacaaaataaatagaagtctatcccataaaattcaagatgagagaagagaacaaaagatatttttcaagcaatgacaacaaagtttaaggtgttaccagctgatttagaaaatcattttggaattttgcttctgtcccaatctcttgcgctacctgcatcaggataaattcagcaatatgagaacataataataaaaatttgccatcaaatatttgcaaacaatcacaatactgccagtgccaatgcaccaaaactagtttgacatgaagaaagaaaatagaaaaaattcaactacatgacattttaaatataagtagcaagatacttttgcaaagctctatatgtttcgcttttctgatagtttcctgtttcaagcctacttattagcatagatctacgcttttgctgtcctacaacaaaaacttgtaggtgtctgggagctgaggaaaacatgatatagtcaacaaaaacagagagataatttgctacatatactaataaacctcacttctttatgagttatccaacacatagcttcaagtccgcttactccatgattcagtatttcccctctttctacaatgaatttcataatcacaggaaccctaacaaatgtagaagcttctatgttataaagtgtctagtgcctaaattcattactcattacgggtagagcaaaaatactaggagttgccttgcctaagaacagaagcagaaaatgaatacggatgtacatccgtacaatttggaatttgtttcatgcgcgtaatatacaaagttcaatctcttggattcaaattttcattcgtgagaaataatattgcttgggtttccttcacgcagtatctttattaaatccatagtcgttgatttcaaagacccattttcaaaatatgtcaggactcgaaacaaagtgaaatatataagagcatttttcatctatgtacaactaaatttactatattacaatatatgtgaaaaaatatttattacataatctaatacaaaataggtaccattattataagtaaggtgatgttctattaatataattaattataaaactcaccatatatataatatattaaaaaaataaatcattctaaattaattacataatacttatattattattaaaaatttaaattaattgtagctaaccacgtaattatttaattatattaaactgatatttatagctctatgtaatttttaaacataggaaaagaagaaaagggcttctatttcaaaaaccgttttccatctaagaatccaacaaaccgtaaagaacttacatttcttaatctatggacttggctacgaagacccgtgatctcatcatccaaatcaccatgcattggatcaatccgcaattggatttcatccgaactagcacctggtctcgtgctaagaccctccctgatcaacagtcaacacatcgtttcgtgaaaaaatagcaacagaaaggatcaaaattcgaacactaggttttctaatttttctcagaattgtgcaaaaaaaaaaaaaaaaaaagcgtttaattttacctggacctatacgcagcagcaccaccataagtggccatgaggagatgaaaggaaaaaaaacacccaagaagaatagagaagaaggtgcagggagacttgtgaaaagggggtttcagagttgaagattggcgccaaaagaatcagaagacacgaacctgcactgagggcaaaggtgtggtgacgttatacaaggtacatgagccgtggggtgttaggtctctaagatcggaccatctaataaaggaaggaaagctggattatttgacttctcttttcattcttttcttaatcatacgaacgactcaaggaagaagtgcattgtttcagccaaaaaaaaataaataaaaaatagttatgcattcctattaagcacgtgttcatcactaccataaatatgtgttactcacatacttaattgcacaataaggatatgatattttgtaatgttgctaggcttcactaatgttttaccatttttgtaaaagaaaattgttagataccttcaatgagttgtatattttgtttaataaaatagtatctatttatatacaaaattagatagattaaatatgaaattaactaaataagaaactaactaaatgtaattgtttagtgaaatttttggaacttgataaaatataataaaacttaaaaaaatataatatagacaaagaataagagtagagtttttacgtagttcaatgattactttacgagtcaatattattataataaatttaatttttttttattgatttacacaagtgtttgctaattgtttgaaccttaggatttgcttgagcgctcaaagaatgatattctaatcctttgcatgaataaattttcttatatttatagtgctaaggttctagtatgtacacattgcccatttatagggtaaatacagataatacattgacttagggctcatttggtgaagcctggcctatgagacattaatcttctactgacatggatgccacatcacgttgatagttgtcaaaccatgccatacttttgtggataataaaaaaatataatgcttgattgacaattattttatttccttattcggaagatacgaattctaaacataatcttggatataaagccctaatattgtgagatttggcaataaattactgtgatacagagctagatatattggtgcctattaatcactcatccggaagatctgttcgatgccctctagagatatgatgtgccagaggtgtatcttatccgaacgtgccatctgtctagcatccagaaggcttgactttgctgatggatccagtccattatcttggttgggcctgggaatgagcctggaacaactgagttgaaaccatcttgcaattacacgtgtccttcattcagaatacgaatatcatttacccgccaagccttcaacacttaagggctttcgaaggcttgcattcaaccttacatatggcatgaggcatgtcgacgttaaaaaggtggaaacgtttttgacttccaagcaaatttgtttactgttaacgcaaattttcattaactaaatttgagcctcacagtagggatttcacacagaaaaaattaaagctgtgaaaataaaaatatgaacacagggttttttacgtggttttgtagttaaagttcagcatagtccacgagtcaatcttgttcagatttctgattgtttttcagggcctctcttgtatgagttttttcgtcccctttctgatattctttgtcacaatttataattacatagaggacagttattacaaagttgactgtattatgtttacaacaatcacccctaaaatcatgggatttgattatatatcacgtagtgtaaatgcggtttatgatttgaaaatcatatagcagtgatgttcccgcttctactgggtcaaaaatgattgtgttttaaatcacgtctttaattattatttctagagttgtctccacaggagcttggttccagtgatctcaatagcgagctggggccattcgtccttctgaggtcgacgatgcacgtttggtgtcaaccacggttcttaaagagttctttgaggcccatttaaatgttatcttcgggtttgccaggattgtaagcctcgctaacgctaactggatgaagctataagaagtctacaatagcgagacaagcacctcgcttagttggtatcaagccgatccgacttttacacttagtttgtacattgtatgctaaggactttcacgattgaaacgtgtcactttctttggttcctcgctatttgcatttagcgacatatggtttctcgttaatatgctaagtaccagtttgtatattgatttcttgcctaagacctttcaatcagcaggttacaaatatactctgatacttacgtgattaatgagttattccataaaaagtgattgcatcgatccgtactccttttatcttgacatgtgtcccctattaatatggcaactgaattatgggtttaacaattgccccttaaaaagggctttttaataattacagagggcattttcgccaaaatccttccttggaaaaaatgcatcctttgattctgatggttgtacggttttaagggtcattatgaatcgtctcttcatattcttgttggtattatatttatccaggaccttagatctactcaca

SEQ ID NO: 16986 - DNA, 2853 bp, Cannabis sativa
atatattatatcaaataacaaagcctcacacctttattaggagttcaaaggtttccacaaacaagtcgataaaattactaaacacgtattcccccacacaccacagctcaaaaagagcaactttactcgacataatatttaatatatcacccgtatgcattttaccattgactatatacataaacactcacaaaataatataagaaacaatgaaataaacacaaggaaaaaataagtaaaaatttacagcaatgtagttcttcgatgtgtcgcgcagtaatataagggaatttcaaacaaattcaaatcgcataagaagctttacagatttgtacggttcacccttgcggtcatgcaaagcaactgcgcgaatcccttgctttagctctgatacaggtaggcatgcttggcctccaaagtcatccttctcggacatgtcgtattcatgaacttcaatccggagtaatgccagttctggaacagttaaaggaaatgtgaactcctcgttccaggccggtatccagttatcttctagggtctttgttttcttcatcactgtatcagcagttactccagcaattccaacctacatttcagttcatgaaatcatcaaatgttgattgttcacaaagtttaaccaactcatctttataccaaaaattcaagtaaattcatgaagatcttggtgacagaagacagcaaaaatcagtgtaaattgtattcacttacccttgaataaaaatctggaggggaatatgcatcaaaatgtgtgtgctgaaaatcataataccatccttcacccatgataacagttaccttttaataaaaagaaactcaatatattagtcaagacataaaagaaaaaaaaaatggaaaaaagaaatggaacaaaagcatttaccttcaaagtcttcttaacaggtaactgaactttaggatcgaagacttcattatgcggaccagtcttcagcaaaaagtctggttttttcacatagccacacccaccgttggatttgaacattccatgcatcaaccagagtgacctcccatatccctacagagaagaaccactagaatttttttagcaaactaaaattgatatgcagcacacgggaaaatcataaagctaacttatgcagttactatgtaataactgaatcagatcagtataagcgaagaagattttattgaatactgttaagagactttaggcttgacatgcttaatttacctgcatattaaatgcaaccatctgagctccatgtgaccacccaataagtgggttataatttgatgagtcaaaacgtgttcccttagggtaaactctcaaaatattacgctgtgtaaacctgtaacaaaagagaccaaaatctttatagcttatatccaaaactcattagtcgaattttgatagtagattaaattgaaaagccattatcacaatttcctagtccgaggagtacgctaatatctgaatatggctccacagtaaccatactaacaacttaactccaatgtaagaccttttgttgactaatggctaatagtttaaactattacaccatatactatactaaactattagcagcttctataaactggtcaacctttctgcttattcatttttttttcagtttgacaaaacaattcagatctttacggagacataattttgtattaattagaatataaccataataataatcaatctaaaaaaaagtaagcaccgaaaaaatatatgaatgctacattctcataatgatattgatgaggtatacgtaataacttaatatcccacaaattatgagaaaatactgttaataaccgaatacctgactatatctttgccatgagtttctatggccttttctagctgttgctcactcaaacttaatcgccgaaccttgtcaggatcaaccttgagaccttcatctagaccacccttaggcttcccagcatgaatggcaattaaacgtctatattcaggtgcttcattttgcgagcaattgggatctccatcttcttcatcgtcttcattactttcttcatcttccaaatcactctgcgaggaatagcaggttagaagtgctgatagattgaggcaacaaactagcaaaactcatatataaaaactctaccaaccttggcatgtccaagagattttagatttttgacttctttaccccaagcttcctcatcactagcagcctttcctttctgtgaatcagattcattttctttggcgtctttggcctccaggtattctttaggtggtttggtcgatatgatgattcttttcttcagtgattctggagaaggaaattcctttaggcactctgtcccaggagaaaacagtacatctccaaatgtttgagtgaccatctaggattgaagatagaacaacatttagtaaagacatatataacataaaccgaaatccaaagaagaaataaaactacagtcacctcagcaactttagcttgaagatccggagtaaggtgatcttctagtgttattacaacaggatattcagatgcaacaaatgcgtactcctttatagacttcaaacatttaaggagttccactggagtagtcaatgtcctacattaagaaaggtcgttcaattaggaatagcatccttaagtgggaattcatgaagacaaaagaagatatttgaaattttgtagtttttttttttttttttggcatatatagtattttactcaatttacatcagtgaacatatttagctacattttcctctttagctggtaatgcatcagttgaccaagagaccagattaaaccaaaataaaaattcaagtgtaaagggaaaaaaaaaaagaaaaagaac

SEQ ID NO: 16987 - DNA, 1813 bp, Cannabis sativa
  modified_base (1219)..(1223): a, c, t, g, unknown or other
ttttaaattttttattcatttttccagtttttataaaatttctttatttctccatatatttctaaaccacttacaaaaaagccatatttataaaataaaccctttataaaattctcagttttacacccattttgaataagagacatttaatatatgttaaagcagagacgctaattaaaactctctagtttacagtatactgattttattagttattagtcctaataatatttatagatgatctctaccgctaattttatagtgcactcctaaataatgatttgggtacatctcttatttattttagtattttagaaaaattatgaatttgatagtattaaaaataagatttaaatatttgttgccttttttttttttatttgtttgatatgaaactatttaattttctattttggcactaaatatttttaaaaatttacagatatttttaaaaaactacaacaaggtggttgtaaaaaataataggagtgtactatacatcccacatttataaagctaggagagacaaatgtaaactaagaaaattcacacatatatatatgtgattgatatatatatatatataaatgattttcgagggagcaaggacgaagccagatttgcctccatctcggattgtttacgccagcattgtttgtgagatatagctaggtacttgaattttatgatcacgagatgagatgagatgagatgatgcatgtataacttacatttcaactcactcgtattattagttgttagctagggaagaagaggaagagtacacacattaatatcaattatataaatatattgtccttttgtttgttaacttgatttggggtacagtagtatagtactcttttattaaaactagctcaatttatttatggattaataatgtaatgctgtgcgtgggtgcatgtgcatcccacgtacccataaacgtcacgtatatttggctcttgcaatacttgttcaaccgtagtagtcatgttttgtcttattattccatatttggagtaaaggatctcaacaagtactactaccgactgcgcatgcatgtgggggctctccctgcgctaggctttgttcttatgtatgcccaatttatgaaaattttctgtatatattacgtaacacataactatacatatttattaaagataaaaaaaaatatctattaaaagtgtcaaaatgttattattattattattannnnnattattattattattatttatcaataattgtgagtactcaacagagaatcttctcttgtagatgaaaacgatttttgggtgtaaagtgtgaaaattgaaaccctttgtgagaactgaacaaaaaaatttgtctcgattgtattgtacctatttttgcttaaacaataaagaaagattacggtggtgttccagaactggagtagagtcatagatcacatcgatctataggacttgaattagtatatatcttggtgttgatttctttattttctgcatttattgttttttggttttaatactatgtttgccctgtttttcatacgattgttgatcttagtttgataatcttgtaattttgattgtttaaagtttcattgattagattctacacatttagtcgtaatttttccacaaattagagcttcgtaatcaattaagattatagaatcaagatttagaccgctgcaaatctcgaagaaacttgaatgttgtaaagaccgcttagctttaatttggaaattagtagataattagggtttaattatgaaagttatttattaattttcaattattaatttacgatgatttat

SEQ ID NO: 16988 - DNA, 5318 bp, Cannabis sativa
aagatatgtgaagactagagagcagttaggaaatattttcacaaaggctttgaatagggtgcgggttgattatctttgtaacaaactaggcgtgattaatatttatgctctaccttgaagaggagtattagaatgtattagctgtaaattagctaatacattaggaattagttgtaattacttaatttgctattttctctcttagtttccaagttcagtctctctaatttcgtatataaatacatgttattctattgaataaaatacattattttaattcaccattttctacaaaaaccaaatgtagaaatccctatatctctatgttaaaatcaatatagtctaggcatgcatttgtttaaagaaaaattaggattgtaagtaaaattccagaacgacaaacgacacaaaataggcctaccatgctaacagcctcttgtcttgttatgtttccgatttcatttgccagctttaagaactcatgaaacctgagataatgatataatgatgatcagaataataagctcgacttgtaaaaatatcaatgatcaaccacgattctataaactgaagcaactgctatctttttggacaccaaaattgtgatataatgcacttgtaatagcatcacattaaaaaatgaggccttccttcttttttttttctaaaacagaaagaaagtataggaaaggtatgaaaacaaacaaaattttggtatgagtgcataaatatcatgcttcatatagagtacacaacaaagctgggtgcctattaaattcaaaagtgtgatcattccaagtgtaaaatttacaaattttattttataatcctacaactaaaagtaaatgcaccactacaagtgcaatatttaacaggattctaaatcaggatgtaaatggtacatcaaaaatttacataggattttactgaattacacatggcacaattaattatataaattttacctctctagattctgatttttccttagctgcatcctagaaaaatttaaatgccaagcaaggttatcagggtaccaaggcaatggtttaatagcctccttttcaccctcactcacctgaacatgatatcatatttaaaaaattaaaacaagaggaaaaagtaaacggaaaaaaaatagaatcacacatagtagctaaatatgcatcaagtaacaattctaaattaacaaatttttattcaacttacctcagactgaagagacgtcataaagtcattttctaattgatgacggatttctttataaaactggctactgcaaaatcaggaaaaggagacaaaacttcagtcaatcatcactgccaaaagctcggcaaagagtcacatgagtttactaagtgcaaggtaaacaataagctataaatgtgttaaaaataactattactatctgactccctggtgataatttagttgtactcccatcaatatattcatataagaaatatgggatagaccaataaactaattcataaacacacaatgatcagaatgcttacagcttataaataaatttctcatctgaatcatgcaaaacacagatcaatgactaggacaatagcataaacacaatgaatttagaaagaaaaaaaaagatgcatccacataaacaaatatattttaacttgaaattaatgaataaaattgttttatatatttctttctgcaaaccactcccgcttatatataaatccatccaaacataaatttcctaaagttcaaatagcacactctataagggaacagtagaaaagaacaaaagaattctctggtcctaattttttttattaaaatcaccttgagttgattcgaaaagcagctggcaatggcgttctaagaactcccatgaacgagtcccaatcatctggtgcaactatcccttgcgcctacgttgaaacacaagtgaaaaaacaaaacaaacaattcaacaaaagcagaatgctagatacgtatattgtggagacacatacatatagaaaatagagaataccttataatagaaatcaaaactagggttttgagttgcaaagggctcccaatgtgtagcaccaccattattaccattggcggcggcgttgtcgttgttaacatcagaggatgggtcggacttgggacgcttccaaacgttgtctctcttctctttgaagtgctttctctgagtacgagccctgccgcgtcccatgtctggtttcggaagttggtaacaattacaacgcccagtggaggaagtggtgagggaaatggagttagcaactgtttgaggcttggggtttgggtcgaatccttgaccttgttgagcttgtgtacgtacacgcgtgttgcaaaactgtaatttcatgttttaagtctaagttgcccttcagccaaatcaaatcagaacacgatctctaggcccattagagcccagataacaaactaacaaagcccacatctaccagcccattcaaatgaaatcaacccaattgtaggtaggggtattcataaaatagccgatttaatccaatctgtacgatctaattcaatctacaaaatgtggatttccgcacttgtacggattggattagattgcattagaaaattcaaaatctgctttgaatctctgttttcttattgaaacgagctttagagttaaatggtgccaaattttctatttttactcatttaacagaggaagaacgggctctagcagaccagtacactaagaggatgtttttcataatgacgtcctcttctgatattttggcaagagccaagaaggccacaaatcaaaaaattggttgctaggggcaatcatcaattacggggcctttcaagcatttttgtgtctccaaagggtgttgttactttgaaaactaatactagggaataagagatgtagacctggggagtgacgacaaagagagcactattattctaagaaatatttgtgtgcactcaaatttgtccacgactgaaggacatgttgaggctctctggagtccactggatgagaggcgtttgcatgagcttggacgcgctacatcttttgatgacttggtctcgtcaatatatcgagtaagtatctttgtaaagcttctttcttattgaagtttttatttgttctaatgtttgtttgttcttgacaggctcttttcgatgtgatttttattcatcaagatcgcaaatagcttgacaaggagaacatcacccttaaaaagtccaacaaagcgcttcaagaggaaaacaagagagttgctaaaagcttaacactttacagaagaggattgaagagactgataaagagcttgtaactgaaaaggagaaattagttggtttgtatgctcagttagatgacattgcatttaaagctatgtgtaaatctcgcctagagttgttcacaaattttaaaaaaggtaagtctaatacatggaaggtacatgaggagttagaagtttacaggaaaatgtttatggatgaggttaccttggtgacgaggaatctacaactcccgagtttaacactagtgttctcgaggctgaagaggatggcaatcaggttgcccaattttataaaggtaccactgaagtttcggttgattttgaggtggctcattagtatgttatttctctttattgtatgttcattttattcaagcgatgtattttcttatttatgatgagaaccttgttgttttttgaatttcattttatgtgtattgctctatgttgagctcttttgatgtgggtttatgctttgtgaattgagccttcttgatgtaggactttgctctatgtattgagcttccttgatgtgtgttagacctctttgatgcacaattttattctatgtgttgagcttttagatgtgtattgtttcttgatgtaggattatgagtatcattggtttattttcatcggatgggatgttttattcagatggaggatttaattcttcccttgacttttgcatctataagatagtcatgtagcgtgaatccttgctacaaacagggcttgtactaattaagattcttgtatccgtcttagaattatcacgtaacaaagagtgtcactctaggactttccatccatattgagattcacgcgtctttcataggattcaagcatccgtcctagaattgtcacgtaggaaagagtgccacttatacactttccatccatattaggattcatccatccttcttaggatcttggtatctgtcctagaattatcatataacaaagagtgccactttaggactcttcatccataatggaattcatgtatcctttttaggatcctagtatccatcctagaattgtcatgtagcaaagagtgtcactctaagactctccatccgtaatgagattcatgcatccttcataggattcaagcatccatcctatagttgttatgtagcaaaaagtgccactctaggactttccatccataatgagattcatgcatcctttttaggatcctagtatctgtcctagagttgtcacgtagcaaagagtgtcactctaggactctccatttgtcttggattttgtgcatccgtgttaagattttgaggtgttggtcaatcattttcctttatttccacaaagacgaattcgagcttgcttctcgggttcgacttgaaagggttgagctttggtaaaaatgaggattcttgaagtagtaataaagattgattacgcgcaaaagttattttaggttgtaccatttgactaattatgaagaacttgtaaaataatgcatttaaaaaataaagattatctctgatattgaattgaataagtgctaaatggtaatattgtaaaacctcagattgtcatgagcttacttctttggattgttcaaatgcacatatcttattccccaatccaagtatgggcacggtactatagtgatgcttggacttgaatcgtatttggattttcctcaaatgcttatatattttttcaagcaagatcttgcgatgttagagggtgtggtcgacgacaaagtcattgaccctccggtgcttaagttagtattggaatcttggagtaaaatttaattgattgaagtttttttacctgacggtcaagtaccaagctctcgtgatgtttgtatttggatcttgaaatgtcaggaagcgcgctcgacgttcgatgcttaagtcaagaaggtgcaaaaagtatgattgaaattaaaacttaaaattgaaaataaatttgatagtttagagatgatattgtcttagatgaacaacgttccaactgttgcttatatcatcacgtccatctgatgtttgtagtttgtaggctccttgt

SEQ ID NO: 16989 - DNA, 6136 bp, Cannabis sativa
  modified_base (5191)..(5193): a, c, t, g, unknown or other
  modified_base (5393)..(5405): a, c, t, g, unknown or other
  modified_base (5971)..(5982): a, c, t, g, unknown or other
ttactatgtaataagaataaaaaaaacgacttgtttttgtcctttttttgttttgttttataaatctcttttttatttttttttttataaatctcaatgtttctttcaattatgtatattatctcaaaaaagttagtatatatatattttttttaaaaaaaatctcactttattttgattatttttgctccatttttttttaaaaggaaacatcattttttgtcttctgtgattttttttacctatttttcgtctcatgtgtttctttaaaaaaaaaaaattgtttgacccctttcttttagttctttttaaatttttttttttttaaaaaatctctctttttatgtactctactttttttaaaaaaaaaaatatatatatatatatatacattttaatcttttgtacatatttttttctcctgtgttttctttttcaattttgtttgctattttttttaagttttttcttcttattttttattaataaataatattgtaaaaaattgtacgagcttgatgttgagtttggtaaaatgtaatggtaatagtaataataatgtaatgtaataagaatagtaataggaattgattatgatatttagtttcttgttagaataagtgataaattcgcaaaattattttcactttaattttattcttatttttttaaaaaaaaaaatataaagtatctgagttattttatttttattttatttaatatttgtaatttaattcttattaaatagcttctccaatgttataaagattctattacataatgtaattaccattacatgattatcaaagattataatagtaattttgattctgttaatctctattacatcgaactaaacgtgatattacatgtgttgttaatcattttgtacttttttattagtagataatggtagagaaaattacatggtcttacatttaaacaatatgacaaacgatacactttatcttagaagcgaatatgcatgtgttacactgttcacatttaaacgtaattaataaaaataaaatatatgattaacctataaattttgacggagattatgtgccttaacacgtctccacatacctagtatatatgcaattttatgtgttctttagatttttagtttggttctaagaattgttgagatttatggttagtatgcttttattattattattattattattattattatttagctcaagctgctatattagtgcgtgcatctaacgactttgcctttgtttcttaattattaacagaatctatctttgtctctttctttccttccttttggcgttggtttattggaattgatctttttctatcggtattggggccaaaaaactggaccaatgaatgtcattcatacagaaaacgaaaaaagatgccgcatagctgaatgttttgattatacaccaaatcattctataggttcaaaagcccaaaggcgaaaaagcctgacacatgaatcctcaacgaaataacagcatgtcctcgattgtattaattattacactgtacctaaaatacaagaagagagaccaaaagggttaccaactaccaaatgaaagttcagcattcactacacatcgtccaaggcctatttcatttgtattttgtttctgaaattccaaaaagttgatcaaactgctttgtaatggaagtggtttcccctgcacgaaccatcctgattaacagatttttgtcagccaccggacacatctaatcatcatagtttcctgccttgtaccgtttatttaaaatacacacttttacagattctatacctcaatttgcacatagacacacactgaaacaaaaaaaataaggcattgtaccaccatcaagtgcaaatttgaaccaacatttcagctcaagtcacaatacaaaagccaaataataacttgcactaacgtgggtcagtcaatccggaatatgaattgtctaaaaatccaaaatttacctatattttgtcactagagtacaatttcacagctcgtattcctgagtaaattgtccttgtcagttaaccacgaactgaattggctatgccacaccagttattttaccaaagcgattgcagcagataggttaatactgaaagagccacaaactaattttttttcttccttgcattgaatccatgaatattcaattaaatgattattgacagcaaagatgagatttacaagttacctcaagaaatgaaaaaacccattatctctcctgctgcagtctcacagtcaaaggtattcattcatacataattgagtccgatgtctaaaatatgggacacagaatatattatatatccaacaaacaagggacggaaagtagactccgaaaacattgtttcagagaaaatgcatatagagggctaaatggaatttacttcaaacaaagcccgaacaaattgtaatacaaattgtagttgaaaaataaataaaacgagatacctacctcaacctttttctccttttaacaatattgatgaaaggaagatgatatagtgtcagtctacaaagctgtgagataggaaacaaaaaagtttcacccatgaagacaataagtcagggctccaaaagcacgtgtttgtaaaagttttgggataaaaatctacctcattaaatatcaaagctcagacatctatctacaatttcactaatatgggtgaactggacttctaggtgacctcctgtgtccatgcctaacaggggagcgtgacctgcttcgatcacggttcctgtccctagctccatctcttccatttctggatctccattccccacttcttcctccatctcgattacctctaccattccaatctcgagacctttcacgatccaagtcccgatctcgatatctgtccctctctcgctcacgatcacgatgcctgtctctatcacctgaaacacttctccttctactatcaagttccttctctctttgtttcctccgctcttctgtttctttctcccttgctaacctttcttcttcccttcccttttccttagccaactaaaaagcaatagtttttacttattactaatagaaagaaaaattagacttttctaagttgattgctcttgaaaggggagagttaccttgtactcagaaatgaaatctcgaaccatgccataaccaatatgctgtttcccagtgatatgggattgagtcctctccacagcatcattggctacgagaaaagaaccacaaatctcacaaagggccatcttcttctcttgtgcaagcagcaatactttatcaggcagggtctgctgagtcaaagctgccttctcagtattaagcgtgtctacctgttgaagcaagaacaagagctccaaattaactacattaaatctcatggtgatacattcattaatagttaaaaatttcaatgctaagaaatatagaattgatgaagtttgtgaaaaagtttggagaagtagatgagcaatcaaggaatgattgatgggcacctttctcatgagtgcttcagcttcatccaccttcccagcttcaccgagagattccacttgttccagcaagttctttatcttatcctctagctgagataactgttcagctttttcagatgacaatggctgagcaggtgcaggttccacctcttgagcaagtcgttcccgtccacgccttactcttctgtccaagtccataacctacagatttcacatgtagtaacaaagtaagctttgacaacatattgaaagataatcattagagatcataaagccgaaaggagaagtgaatcccaccaatttctcacaaaactgagctagctcagtttcaaattttggcacaaatacgtcatgccttggagacttctcaaaactatcatcacaaacgaaaaataaagtcaccattagatttgaaggaaacaatttaatattacaatcgcatcagaaaataaaataattatgaacttgcacaaattcgagcaggagacaattgtcacaaggctatgtaaagccagcaagttatcggggtaagtgaattatataatgcaagatgcacataaacaattgtaaatcaatgttttatatcttaaagaacttgagagaagagaatgcagcacaaaattcaagaagcagaaattagtgtagtttgcttgcataagattcaactgcatagcacaaaattcatcagcagcatgtatcaaaacctcataaaacatcaattcattcacctttctttcaacttcgggtcgtgtattcttgggcatggtcctgaagaaggtagaaaaaagacatctattagcaactttgcacttaacattatgcaaaggaacatgataaactacttaaagacttcaaaattcaaattctaaatgaaataataataataacacattcaacattttttattcaacaatttgatacttgaagattcaaataagtcaaactgaataaaaattcaacacaatgtaactcacctaaatcgctccgagtattgacgaagagatcgtggggacaaaaccgaaccatgtacgcaccgcaaacctccttatcatcccaagtaacttctttgaacccttttctctcttcgtccgtcatattacgagctgggtttcatcattcaatcaaaccaaaccgatcagagaataaatgaaattaaatcaaacaaaaagcaaattcaattgaagacaataaaatacataaacaattaattaataataccccattacaggaatagtagtataaatacctgcgcccatgagttcgtcaagcagagctctctgagcgtccatggctacggtgagtacgaatcaaaaggggaaaacaaataatgaaaccctaagaaaatggagaaggttgggggaatggaatgggatagtactagaattgtgaaagcgtaatcataaaatcctaggttttcctagttaggctttcctagggtttggtctgtagcactgagcttctctctgtggacaatagacttgcggagagcgacaaggaagctaatgctactgatgttcaccgaacaaaattttaagatgcggttttattttatttttattttgaggggattatttatttattttttaaatatgcatttgaaaaaaaggttaattatgatttttgccctctgaattttgacatgtactaaattataccccctgaacttttaaggttgttgaaaataccccctgaactattgagannnttgaatttaaggacttttgtttaatttcattcaattttactatttcaatgattgcttatgtactaaaccatgctccctagattttgatatttaccaaatcacgccccttgaactttgatatgtactaaattatagcccctgaattttcatctatattagacttttttactgaaattagaaaaaaagtctttaaatccaannnnnnnnnnnnntcagggggcatttttaacgaccttaaaagttcagggggtataatttgatacatgtcaaagtttagggggcaaaaatcctaataagccttcaaaaaatgatatacactttttctaaaaaaaaatgatatacaatttttttttttttgttaacaacaattagtatttttgtatcctaaattttttataccatcaaattgtgttatctaatatctatagtacacaactcactaataatatcttctaaaatatagttttttcatcatattatattttattttatcgtaaaataagtaggggtgttcatcaaaccgctcaaactgttcgtaccgtaaaaaaatgcgatttgaaattctttgcggtgcggtcgcagtttgaatttttcctaaaccgcgcagtgcagtgtgatttgcggttttgaattattaatatgcggttcaaaccgcaccgcaccacacattataaaaataccaatttttatatttattttggtctcatatgtgaatgttcaactcaaagctcactaattattgtattgttgaagcttaatttttttttcatatttattnnnnnnnnnnnnggtatttttgacaagtgttgctcaagctttattgtatttgtgatggtataattatttggtgatagtccaaactgtaaaaactgtaaaaatcgcaccgcaccacaccattttttgtagtgcagtttttgcgattttttaatttcgcggtgcgggt

SEQ ID NO: 16990 - DNA, 2560 bp, Cannabis sativa
taatgtttcttttgatctgagactatgtaattttgcagcccacaatgtaataattggacttttctcataacttaactgttatgatagagatatctactatttctaaagacattatttgtaacaaccatgaaatctaatttttcttatctattgacgcaacttttcaaaaaagaaaattacattaataccctaaaaaaacatattaaaagaataaaaaaaccaattaaacaacaatttctttaacatgtaaaaaatgtactatccgctaaaaaaaacttaattataagaagtatcatgttaaaaaagtaagagagtataatttattttgtcttatttgagagatctgaaacctcatttgcaattgcaagtgactgtgagggacttgataagtacccattaaaaaatcatattcatctgcgcctcaatgtccaaattcttagtctagtctcctctaaatcaattgtctatttgtttaattttagattctcggcgctgtctttgtttttaaacgtcaaaacaatcaattgactaccgaaaccccaggtccccaaatccatgtgcggtggacaatagacttgcctttgccatccaaagcgtgtaccgtgtacgcaactaaaatatatttgtaaattatctccttatcttgcatttcttttgaataattacatcacaagaaaataagaaagaaagaaaggaactagttttggagaatttaccacaaaataaagctaaggtaccgccacccccacgtcgcaaggccaagttgtctatcacttttaaatgtttctctaatcttcttatattaaaagctccaagtcggtagctttaaaaagtgatcaatcaaacctactatactactatttatccactttttaatcaactttctcgctctctcattctttttctctactatactagtatctatatatatataattacacaaccactccatcacaaatatttttcaattcaaattgcttttgaaacaacaaatttctaatcaagaagaaaacaatatggcaagctccattaatcttccggaagaattgatcatagagattatgtcatggctttcccctgagtctctgatccaattcaaatgcgttggcaagtactggtacaaactcgtgactttccttctcaacgatccatctttcgtcgtcaaacatctccgaaaccaaaacgacagcaacaacatcttcttctctccaagcattgccgtgagttgtctgcgcatatacgatacccctgtttacacctacaaagagcttttcgctttgatctcggttccgaattccaatcaaaacgactccgtttctgaagatatgaacctcccaatcattccgggggagaaagatatgagtagccaaaccataagtcactgcaacggagtcgtttgtgtagccgattactaccacaacattatcttatccaatccggctatgaaaaattcccgggttctgcccgaacccggtctcatgggtcgattcgtgttgcaaggagtcgggttcgggtacgattccagaaacaatgactataaagtcgtcaggtttggtcgtgaccaatctatttaccccagagctgaggtttacagcttgaattccgattcatggaaagagatcggaatcgattccgggaccgattactttccgagtctccacatcgacacttactttaatggagctttctactggctcatgtcgggccccaggtttatgatccaatatttcgacatgtccgatgaggtgttccgtgatgttacgttgccggaaagtcttcaaacggcgaagtcgcagtggatgagcctcggggtttggaatgattccgttgcgctgtttttctgtcccggagagaaagggactccggtcactgttgatatttgggtcatgaatgaagaatgtgttaatgggcctgattcttggaagaaaggtttgacaattaggccttttgaagggattgattgcccattgggcttttgtaatgaagaagaatttgttatgagatcagccaactttagggaggtagtgtgttataatgttcgaacccaaaatcttaggaatataaaggttgaaggtttggatggaattggttgtcgagctctttcttacgtgaagagtttggtttccgtacaaaccaggaatgagaaatgaagtaggagagaacttttcccaattggagtttgtttctttttcttaattatttttattttcttatattttatttattttttttaaaggaaattatttatatttttttttgtattgtacataggagtttatttatttctttattgtaacttgtagtcttgtttatgcttgatggatatgtaaggtaagtcaaacgtaatattatgcgatcaattttttataatttagtgagaaaataaatattttatatactactactagtgaaacaataatacgtgctctccataggtgaattacttaaaaagaaattatgaaatgcaataattttaaatatataagataattatagagtaatgatacatcatacatgtacatatgataggtaaatatatatagagaggaggtttcaatag

SEQ ID NO: 16991 - DNA, 4138 bp, Cannabis sativa
tttatttttatattttgaaattggaaaatgggaaaataattccatgttgccttattttttattatttttttaataattccatggaaaaatttggaaatggcaaaataattccatgttgcgttattaatacacattatattgttcgtctataaataaatacatatatatattttgtctctcgttttcagggttaggtttatttactctctcacagtaaaagtaagcactatcacattggctattatcttatttatatttgaaaagttttaagttaatctaccagcttaatttgaccaagtcagaagcctcattacaaattacaatatcattaattttttttaaaaaaaaataaaaaataaaaagtcattagttattatttggggaacctcagagaatctttcatacggtcttcctctgctggaaaatataaatagaaaatgatgatatttctctctttcttttacactataattcatctgtttattctatattcttttacagatattttcgcaccttgtgcatatacactttttctacttatacctgtatgtacagtagactctattctagcttcagtcctcaactccatgcctttctattattattattttttaatatttaatgcataaacaatgcttctacaaaataaaactaactattattaattagaagatcatcatctaaggatttccaatctgtgtttttggatggatcagttcaacaacatgtatctataaagttcgctacaaccatcacaactataaaataaaccaataattttattttcttcttcgtctttactaccttctttagatcatttaataaccctattaaataatatttacaaattatatatatatatatacacatcatcatcatcgttcaacgtgtgattctatattcttttccttcatttactataccctttggtccccattttgcccccacaaaaccaaaccctaacggctaactctaacatccccattctcacgtctttcatgtccacaagtaatctagcatacaacctcttcctaatatatatagcatgtaggcttatttataagtattaacaatttttgctacaaaagaattcattctaattgtattaacactattattttgatccctttcaaaaaaaaaaaaaaaaacattattataattttggtgtactttcaaaaggaaaaaaaaaagggaaaaaagaaatcattattatgatgtaaaagtaatatgtatagtggaaatttggaattttaaatcccaatatatgtgtttttttttcactataaccacttcattaaattaatatgtatgttaatatactatataatcacatagataagaatattaatttttttccttgtggaaatatatgaattagtttaatcaacaaaacttttctcagaaaagaaaactagctaggttatacataatttatttatactataatcgctatacttataattaaaattagtaaaaaggtagtcacggtggtttgctttgttaaatatatatatagacaaaaaatcattcggcaaatgaaagatgatatgattgattattctgctttgaagcatttacaaaagccatatagctagactagagagagagagagatagcaatcaaaatgatcattttgattgccaaaataattaaccattattgctttcatatgatttagttattactacttttttcacgcctaaaaattcagaaagtaattgctactactttcaaaagagattttaatcgattaattcagcaaaaccaacaaaaaaataaaaataaataaaataaaaaggagagattttaatcggatggaatgtcacatgagcagtgccactaaaaaaagctactaaattcctgagccgttctcaccatctagaaactataatacataataagattatgtacgacaaaaataatgatcatctcttgctctgtaaaaacatttaacatcaaataatttaccgttttttacagttaaacagctccacacacaaaaatgatagtataataattccaactttattattattattattattattattattattatggtaattaaacaaataatgtaatcaaatccacgtggcattaattagggtggaatcaattacctaatcatgtccaaaattaagttgcttaaatctgtatattaatctgctaagtgaggggggctatctcttctccaaactccaactacaaaaaattaagaaatgtaaaaattaaaaatatatattatattagggattgatgggacctccatcattttcaatgaacctgtaccttacacaaaggttgcacaacataacacaaaaaccatactatataacaaaattaaattaaaaataatatattttttgatttggaccgttggattgatgggattttcattgatgccttacttgtgccattatttcacctcagaaaaatgctatccaaaaagttaaaagagtagggatactcagaggggcccctcataatcttactatgagcttccattattacacgcatctcacagatgatgctcattgcaccagttatatattcttggtgtggaacacaattaattttttttttttaatatacattgtaataaagccaaacctcattattattattttgtaaataaattccatccttttatttattagttttttggaacgtcaaacttaaaaaatgagataagaaattacatcttgctattaaaaatgtgtctaacaatataccaatatagcatccattaactagttaatatttttctattttatttattaaataaaaaattatataaaagtatttagatacactaataaaaacatgtcacaaggtttctcttagtatttctccaatattaatataatagttctcccaactgtactacagtaccattagctatatgtatccccaaaactgagatctggttgtaaaaatgacaactgaactttttcttaatttgggctttttctcgaattaattatttttaattgttgggttttaattattaattgttactaattaaatatatggtgtactcaccacgtcatattaatttaatttcaattagtactgtgtcacactaccaaaaaataactagtggctgacaatatgccgctataatatatataagaaactaaattaaaggaacctttaacaaaaaaaaatttgggtttcttctttttagctaatagattatgactataagagtatttttaatgttaatattgtttaaagatgttatatctccgtatcatttaaatatataatattttattttattttttttctatattttttttggtatttttatttttaaaaacacttcaatagtatgagacattttaagaatgttataattataatctcaaatattattatataaggtaaatagcgatataagtactcaaaattttaagtttgtaactgtcataaattcaatgtttatttttagcagcataagtaccaaatatttgtaaaactgtaatttttttttttcagtttcatcagtacagactccgttttgaatttattaaaagaatatttgcaagtaaatattggatctaaacctaatgatctagaatttgggtcatatctacatatgtgtcctgttaaagacaataacagagtctgtgctgataaaattagagaaaaatcacagttttataaacattagatacttatatcgctaaaaataaaaattaaatttatgtcacttaagaacttaaaaatttagatatttatgccactatttatcctattatatatatataaatcttttttttctcattaaactattatatatattgcacatttaattttttatcttaaaaaatttatagcatcaatgctattgtgtgacacaatgcaaatttaaaaaaaaaaaacattcttttatctttaataatatagcattcttatattttaccacctaaactttccagcacatcaaatattctctaaaatgttactattggaaatgctctaaccactcattatatattaattagcagggattttttttttttgagtaaatttacatactaaagagttattctagtacattgagcggaactttttaacttcatttttttagggtaaatagcggcaaaagtacctaaagttttatgtttgtaag

SEQ ID NO: 16992 - DNA, 5012 bp, Cannabis sativa
  modified_base (27)..(28): a, c, t, g, unknown or other
actaatcagattgtaaagagttttatnnagggcataaaacccaacacttatctatagttgtgctaatcgagtctcaaactcacacaacatggcaacaacttcaaaactctctgctaagtttcaatggaaggcttgagaggctcaatgctatctcaaccaacagcaagcttgttgggaatatgtttgcaaatatggcacagaagccatatggatccaacaactctcacaacacaggagggcagcgaagattcaatccaaataccagtggtggaagaggaaatcagcaggcatctggacagtttagaggaggaggtttccgaggcagaggaagaggaggaggaagagcaaatggcccaaaaccaacttgccaagtttgtggcaagtatggccactccgcagtgatctgttataacagatatgatgaaacttacatggggaatcaacccaacactgctggatctcaagacaagcagttttcagcactcattgccacacctgagatgctcaatgatgataattggtatgcagacagcggagctagcaaccatctaacttcggatccaggcaagatacaagccaaaactgagtatgagggtaaggaacaaatcaccattggtgatggcaggaaacttcctatttcacatgttggatctggtgtaattcaaactaagtcttctaaccctttgctgctaaaaaatatgctacatatccctagtatttcaaagaacttgattagtgtatctcaactaacaacagataataatgtctctatggaattcttttctgatttttgttgtgtgaaggaccaaagcacagggaaggtggttctgcacgagacacttaaagatggcctctatcaacttcacacttcaccacaatcatctcaatctgcctcaccattctctgctgtagctgtcagtacctcgtctgttaatcaagttttctctaattccctaaaagacatttggcatagacgtctatgacatccttccattaatgtactaaatcaagttctaaaaacgtcaaaagtaaaatttcctattaatgaaattcaaagtttctgtgatgcttgtcgatttggaaaatcacatgctctaccttttcaaaactcatagtcaagggcgactggtctttcggatctggtgcacacggatttatggggaccagcccccattgcctcacacacaagcttcaaatactatattcacttcctcgacgatcacagtagatacacaatgttgtatttactcaaaaacaagtgagatgccttggctgcctttgttcaattcaaggccatggctgaaactcaatttggtagaaaagttaagaaattaagaactgattggggaggggagtctcaggcattctcgactctagttgcacagaatggtattcttttcgatcactcttgccccaatactttagctcaaaatgggagagctgagcgtaaacatcgacacattgtcgaaatggggctcacacttcttgcacaggctgctatgccacaaaagtattggtctgatgcttttcagacagctgtctattttataaatagacttccaaccaccatacttaatcacaaatctccttatgaagtcatacactcaaagacacctgattacaagtttcttaaagtattcgggtgtgcttgttttccttgtctgagaacttatcaaacacataagtttcagtaccattctattaagtgtgtgaatcttggctatagcaatgtgcataagggctacaagtgtctaagtccgcatgggagaatatatatatatctaggcatgttgtttttaatgaaaaggaattccccttccatttcggttttcttaacaactaccaacctgaaaagtcagtcatcatcaccatgccgagtacctggattcaattacccttcaacactcagtcatcctttcccagtacagaaccaccatcccatcctccttccacacaagatcaggtatgtacttctattgatcatggctcaccaatctctgctgtccctcatggtaattctggtttgtttcccacttctattgatgataattcctctgcaagtcctggttcagttttaaggctcacaacgtgttactggtacaccttcctcgcaaccagaacaagtggttgctgctcaacaactaccttctgcatcagttcagccgcatcatcctatgataactcgtgggaaagttggcattttcaagccacaaattttgctttctacagccacttcacagcagccccttcgtgagccctcttctgtccaggaggcactcctccatgaggggtggaataatgcgatgggtactgaaatggtcgctcttcgcaagaacaagacatggtatttggtgcctccttctccggactatcatatagttggcaacaagtgggtttataagattaagtataatgcagatgggtcggttcaacgtctcaaagctcgccttgtggcaaaagggtttcatcaaaggccaggacttgactttggagagactttcatccctgtgataaaagcttctactgttcgggttgtcttgacaatagccgtggcttacaactgggatataagacaacttgatattaacaatgcgtttctcaacggtgtccttgatgaggaggtttacatgacacaaccacaggggtttgaggatccaacaaagccacactatgtttgtaagttggaaaaatcaatttacggcttgaaacaagcccctagggcctggtatgagcggctcaaagacacactacagcaatggaatttcgaaaactctaaggctgacacctccttctttatgctaaaacaacctgactatgtgattatggttctgatatatgttgacgatattgttgtcacaggaagaaaatcaaaggagcttgggtttttcataactcggctgaacaaaatcttttccctcaaggatctaggaggtttacattacttccttggaattgaagcatttagagatgaaactggtctctatttaacacaagggaaatacatctcagagctgctgcaaagagtgaacatgtctagcttgaaactaagtcctactcccatgacaaccaacaaaccattatcaatccatgatggtgagcctatgaccgatccctctctctacagaagtgtcataggagcactccaatatctaagtcacacaagacccgatatctcctttgcggttaacaagcttagccaatttctcaagagtcctactaacgttcattggaatgcaacaaagcgtgtgttgaggtatctaaaaggaactttgaatcatggtattcacatcactccgagtgacatgctgtctcttactggttttttcgacgcagactgggcttgctgcccagatgattgaaagtcaattgcagggtattgtgtatttatgggagatacattaatctcatggtcttccaagaagcagacagtggtggcacgatcaagtaccgagtctgagtatagggctcttgctcagcttgctgcagaacttgcatggcttcaagaactacttaaggagatgaagtttaaactgccagctgcacctataatatggtgtgacaacatgagtgcaagcgcactggctgccaatcctgtttatcatgcaagaaccaagcacattgagttggacattcattttgtgagagacaaagtacttcaaaagcagctacaaattcggtatgctccatcgcatgatcaaattacggattgcttgaccaaaggcctctcccactctcggttcaagtttctagtggacaagcttggtgtgattgaatcaccctctcgcttgagaggtggtgttacaggataaattatgcaggggtatttcagtcctatgaggtgtcccctaatctgttggagcatatagcaatcccgaggcaatcattgcattgcagctgtcacgtcaattccgttaggcactgattttaaagattccatctttgtaatgatttgttatacacgtgtaaggctgagattgcctcttgtacattcctttgtatttgtactttgtctataaatggaaatctctgcatcagcgataatttgagctgatcatttaattctcaatcccttagaaatttgactatatacatagccaattgatttggacatcaaaacacaagttagaaccaactcatgccacaagtcaaaagtaaatttaagcataaatctcacacaattattttacatattaaatgcataaatctcactcaattatttaagcatactcttattacaagcaaagataaaatagaagactattaaaaactattatagagatgagagtatcatcgttccatataaaaaaatattatacaaaggtaaaatatagatattaaaagaaaaaagcaaatgaaaagtcataaacttttgtatcatattcttcattttgaaaaaccttcagagccacatatggagttgtagtgacaatcaatatattccaagctacaagcaaactataatttaatcaagataaatgtcacttttgaattagggtatttgaaacataaaaggaagttcataaactattttttctttttttctctattccaatatgtaaataaaaacacttctcagcaattcaatgtttaataaaatacaaatcatggtgtcatgtgcaatgaaatattcacaagaagattcaggctttatcctccttaactatcaacaattgtcatttatatgtaaccaccaaaatgcatgagtagatcatcaataataaatataaatgacatatgagtgcataacatggctttttactaaccagtacttgataattccatcccagccacatgttgctactttattttgctgcaatgtatgccacatagctccaatgcatataccctcatgacacatgagagttctgaaactaataataattcaatagtaatcaactaataactatagctctcatgtgtcatgtactgttacaatatataataaaagctaaatctattctaaaattgtaacgtcctgaataaataggcacgctacccaaaatacttatgaa

SEQ ID NO: 16993 - DNA, 5142 bp, Cannabis sativa
atacatataaatacatatatattgtcattgtgccattcttttcttcccatactaacttctcaattttttttttgccaccacaaaaaatatgaaaaagaaattcaacataaatataatcaagtataatatagagtcaatatattatttatgaaaaggaaagaatcaaattattaattaaaaccaaatatataaatatatattaaaatattatggtgtctctcaccactatgatgattagtaaaatacaaaagctcattcaatatgtttcactaacatacaaattacaatccttttttggcttacatcaccaattcatcttccacaggcccctgcagtttctcattctaatatattttacttacaaattatattattttttatatatattaatatattccaagaaattttaattttaattttatctttttttatttcctatctatctctatcttgggataaagacacaatgtgggtagtgttgttctgataagaagaagccaaataagaaagaggaaattatggagagataacaaagtgtgtcactttcaagaaatgaataagatagtaactgttgtgtttggcttatttaaattgtaatagttattaatttttacaatatgatgaaaataatttatttattactgtgtggcatagctagtagtactaaatgagggagacatatatttatatatatatatatatttatatattttgtttgtaaagagatggtcaaagagacagtagtataatgctctgtcaatataaaaaaaaaattcatggttaattgtcaggaggggtggggaaatgaaagcactgaaagctcctttggtcatcatcatcatgttgttttacagggaagaaatttacagatttctctataaaaccatcataactacactatactcttatatatatatcatcatttctttgattttcttcccttaatatatatataaggaaatttataccatacatgaatctttttttacaaagtttttttatttattcttttacggttttgtattgttttaacgttatttttatattgtcgcaataatattatattattttttcacagcatttaaataactattttttagaacaacatgtaaacaaagatttgtaaaaaaaatctgtaaaaatataattaacttaaaattccgtaaaaacgtaaatcttgttggtatctctgaaataatcccatatatataatatattatatatataattgatcatcacaatactatgccctacaactaactaaatcttttaaggtaatgcaatgtaggaaattaatgaattaatttcatccattttaaagtattgaaatatcattttctatattataagcatttcattttgaaatggatcaataaaaactattttgcaagataaaaaaaaaaacattttttccatcaattttttttatctattttttcattccaatctaattttattttctctaaatatacatttacatatttgcttatatatatatatatatattatatatatatataaatgcttgaaggccatatatataacattttctttaactaataatatttatttaaactgaaattaatttattgttttgaaaagcactacatgccacactacattactgtaggttatatttaatgtacataattactcatttattaactcatccataattaataagcatgcattagccaatatatagctatatgatctatatattgataatattaatattattgtacttcatgtttgcctagctttctaatttcagcatctatggtatatgtaattaatggcattgtcatattaaaatgatgattaatgtatatatatagtattactattagtatgttataataaattaaatgattcaaaattactttcatatatatatagccattttgaaagtttaatttagtttaatatataatatatatatatatatatcattatatataaaagaaacaaaacgaacttaatttgatggatggttaccttacgaaaaaatgatagtaactacaattttttggtcaaataaattaaatgtaatataataatggcaatagtggtatagtgtactatatatcactgcatgtcactttgtttgaaactgtttaaacaatgaaaagagcaagaaaattgaacttggtttttgggactaaaatgggagagagactgagaaagatcgtaataataataataataataattaatattattatgaattatgaattatatttgtattattactgatgatctgtggtggtagtttttttcagctgatcgataataccggaaaggtactaaacataattgggtcagaaagaaagatacgggtcatcaaataaacgaacacaaaacactccatagtaactaatgaataataatgatatatttgtactatacatcctctatatatatatatgataatatataattaagttttgataattatattaataataataaatcctattgtgattggtaaaaaaaaattacttgagggtataactcaagtggccaaggtgtgtgttggagtttttgagttcaaatctcaagttatacaatgtaacatgtaaatgtttaaatagaaaaaaaaaattgtggttggtaattaaaaagaaaaaaagaaaaaaaaaaatacagtcatggagaaacaccatgaggtgatcacgtcctataaataattagcagttttctattattcaatattactgtgaaataagtgagactcaatattaaattatatcaataccaatacgacatctcctaaacatgcccttaagcaattctcttgtttggatttctaagtttagctctagctaaaatattcttttacaaaaagtaagcttcattagcttcatagataaaaactattgtgataattacataagataccggtttttttgttaaaaagttatatttttacgtttaaagattattttttttttacatttttacggttttctatagaaataacacgaaaacaataagaaaattacacaaaagttacataaaaataacatctaaataacattaaaacaattataacaaaaaataacatacaaataataaaaaattaacaacaaattaataaaaatataataaaaagattgtattttctgtaaataaaatttaaaaaatcataaaaatatttaaaattctataaaattatatttttgttgtgtttgtgtatttgtgaaataatctctaaaaactttccgataagttaaaaaagagaagtaaaaaatctaggcaaacaaaccctaaatagctagagtgtgtgtgtggggcctaaaataaagaaatgaggaaaaaaaatcatgctggtcatgaaaaaaaataactaaaaagaataattattattattattatttagctatttatctcatcactattgcacaatttttttttaattaactattgcacaatattaatttgagagagagagagaaaaaaaaaagaaaatatattaaattaattaaaaatgtagtgttttccatgttggtaggcctagctagtttcaacctacctagcttaataagcccatatgtataataaggtttgtatatctatctatatatatataagaatgatgtgaagatatcatgtgataataagaaggatatatgttattttttttccttttctctttctctaaactcatcaaatattaattaactaataatcatattaattattattattattattaataataatttatagtatggatcaaggagaacaacttagccaattagcagtgactcatcttctacaacacactttaagaagcttatgcattcatgaaaactctcaatgggtttatgctgtcttttggaggatccttccaagaaattacccacctcccaagtaagtctatacatatatatacctaacttaattattaattattatgatatcatttattatttactaatgatatgtgatcttattattattaattaccaaaaaaaaaaacagatgggaaggtcatggtgcttatgacaggtcaagaggaaacagaagaaactggtacatatatatataataaattatatatatacataattagtttttattatttatatgaatatatatagtcttatatatatatatatgtatgtgggtgcaggatattagtgtgggaagatggtttttgtaattttggtgcatcaacaacaacaacaacaacaagaacaggtttagagacaggaggaaagtcagttgggtcagttaataataataataataataataataacaataattcaatctctacatcgatgtacggaaactactcatcatcatcaccatcatcatcatcatgtgatgaccataataataataataataataataatcaagaacatcactactttcaacaattccaaggtcttcaaccagaccttttcttcaagatgtctcatgagatctacaactatggtgaagggtatgtaattattaattttatctaatttttattataatatttcgacaaattctccgaaaaattaggttttcgttaaaagttgaaattcactggttacccaacgaaaattataatattaattttattttttaattaaccctagaaaaacaaaaattgttgttattattattattattagtaatttattggggttttattaattagtttgataggaaaagtggctgctgatcatagtcataaatggatatataaagagcctaatgatcaagagatcaacttcttatcagcatggcataattccgccgactcggtaataattaattaatgttaattattattatttcattcattattatagattatataatatatatacttttttttaattattttcatcaaatttttaatacagtaccctagaacatgggaagcccagtttcagtccggcataaaggtataatattaattatattaattactattagtttaattacactacaaacagttactaattattattcaattatattaattaatttatcattttttaatatattcagaccattgccctgatagcagtgagagaaggagttgttcagttgggatctatccataaggtatgccatttatagcttttccatatactattttgtccacacaattattaataaagcattgttattcga

SEQ ID NO: 16994 - DNA, 8386 bp, Cannabis sativa
aaattatataaaaaattactaactcatcacaacgtatataaattaagataaaatagattctgtatttttcaaacgttatcaattggattttatttttaaataataaaataaattctgtattttttaaaatgatacaaatataccaattgcatatttatataaattcaacgaaatttatgattttttactcttaatgtttagggatgtacataaattgatcaaatccaatgtcaactaacatagaattgatcaaatctaacatacaatagatgttagatcgattggatgactgaaattaattggatcgaatcagatcggatgataaaatttaacatccaatatataatttgattagatctagatagacctaaaaatattggatgtagttcaatgaacacccttaaatttgatgagtttttattcactaacaagaaaacactattatttatactattcatactattatgattcatgaggacacttttaacataatacatttttattttattttttgtggaaaaaaatatttttaactatcttaggtgatgagtctgatgaccccagtttatagaatatacatatttatgatatgtcttgtgtatatatatatgtacaaaagtatgtgttcttatcatgatatcatcactacccacaaacatattaataagtaattttaattaaagtgggaaaatagctttctatagtactgtattattaaaactagagtataaaaatagctactctactcctcaattagtttttaattgtttattaataaattgaaaattaatgttaattttatataaaaaaatatatattataaatattattttagactttttgttttgtaaaaattaccaattgaactttttattttgttaaatgataatgtaaaaataagacactgagttcaattttaaacaattttataactaactttaagacaattttaaatatgtacagatacaaaaatgtaactatgataacatttctagatcaaattattatataattttattttgacaaaaaatcagttcagaatcctgtttgtacaaatttaaaaaatacataatctatttgtcatttaacaaaatagagtatttaattaataacttttacaaaacaaataatctaaaaaaatatttacccaaaaatatattacattattcaatattgaaagcataaacataattgtaatggattgataaaagtagtttgtaatttttgtatgtttctttttttaatttaaacaagttctaagagcaccttaatatatatttttttaatcttatgtatcatcaaatttttaattttctttccctactttacatataaggaatttaattttatattaatatattttaaatcagtttatagatgtatttttctttataatatattgttagtcatttcaaataatatatacgagagagagacatgtgggaaattaaaaattaattttaaaaaatattaacgcgaataagatcatgcaaatgttgatatactaatattgtagcaaaatccatagtgcaaaataaaaaataacagaatcaaatcttatatcccatatgtgtatgaaaaaatatgattaattacctcatatactatttgtaatttttttttttaaataaacataagttcttactcttatatatcaagaaaaaaaaaattcttactctcttatgcaaaaaaattaataaataccctaaattttaaaaattaattactctcagtgagtcccatatcccacatcaagaatttgactacctaggtataccaaaagaactaaaatcttctttctctttctttgaaatttctcatgttcacactccaaaaacagaattattaataaaatatcaattattgtataatatttttttggttagaaaggacccttaaaaagtgggggaaaagattgatgtagtaaacattgtatttgtctctatcatttttgtgtgatggtgcacattatctacaaacaatatatatataagctatactacacacataagaagttgatattattattaataatttcttttaattagacacaaaattaagtctacagactctagagtatatatatctcctcaaagagaaaaaaaaatcctagagattaggttcaacatcagactatgtatattaaatgaataactaaaaataataaaatgattctttctttaaaggtggctaatcaaatgatcttaaaacaaaagtcaattgtatttttcattcccttaactcacaatacctaccctacagattttattttattgaaaaggaaaagaccattaaataacaaaagaaattaaagtgggtcgactagaatagtccttgattgttccctttgtatttttattttatttatttgtattgaaagaatttctcaataggtagttcgatggtttaaaaatatttggtgaccaatttttatgggcactaacttccactttatttttgggtagttgcaattcgaattacgtaagatcttaacacagtaatattatattaatcaacttaaagcctccctctcttctctagcctctattctattcctctttcttcctttgattattgaccacttcaattcaagccccaactaaaggaccactcatcaattataaatagcatagcatattttgtacctctttttaaagaattagacatatcttaagactttccaactatgacttggaaatgggatcaaagttgagattatagtggaaaaaagttaagaggctatttgctttacaatttaaaaattattttctgttttttaaaattaaaaacaatttttaaaaactaatagaggtcgtttggcaaaattttttaaaaatagttttttaaagttttaaaaaattaaaaaacagtaaacatcaaaatactgttttcaattttcaaaaacatttttttttgtctaatatattatattttgtattttactcacatactcagatcccaaatctgaaaccatacccaaacttggacccgaatgggttaatgtcatggtatggtgttaaaaagttaattttttttttcctaaaagaaaatctaaagatagtttttaaaaatttgtgagaaacactattaaatttttaaaatgacaaaaaactgttttctattctcacttttaaaaacacaattttaaaatctgaaaacccaaacaagctcctattttctattcctcagaaattttgattcgatcgttaatttaggtagttatacaccaaaatgagtctctaatattttggtgcataattttagtgtcatatcattactcttttaggtagttaccaccaaccagggtcatgtgcttttttgctgatgtggagcttcagaattctttctttctttgatgaaaagtttccaaaatttgactacttttcacaattgttttgtatgagtttttctgtagactgaaagtaaataaattaaaaaagaaaaattaatgttggcttggcttaaactttatgcgtatctttttaatgaaaattggggttgacaagagtgctttgtctgggttttgtaaccataattaaccgttgagagcttcaagctgctttcgaagatcttctaaatcgtcaatattagaagaagctgatgcttcattgggctgtgtttggtaatcatctgcacttggaagctccctaataagaccatctggtagagcatctgaaattaaatgacaacataagaaacctgagtttgatgcaaacatgtttatttatatcgatttcgaaaattcatgatcctaaactttgtttgaaacttaaaacaacaggagaaatccaatatgaagaaataaaaatattatgcataagctacattcactctctttaaggatggtttttatccatacttctcttgaatcagttggtggcaaaataaaatcgccagttaagtgctttctttcggttgtaacaccattggagagatttcaataagaatatacatatttacaacctccagttgagctttagctttagcatgtctcattaataagctagtggaaatttaactacacaccacttgtcacaaatttagaaaaaggtctgtgcaatgttgtacgccatttaccaattgcgttgttgataaatggagagaatacaatagcaagcaactgtaaaatgaattacagtcgaagttcctttacttgaggtttctggaaagaaagatgaattacctgaagttttggcgtccaccttatccagctcactttcatcgacaacactgaaatgtcaagagaaggataatgaaaatttaacactcccgaaaaaacatagtttaaggaaggaacaggaatcattaatacaatgtaagccagtaccactttcaaaagaactccatgcaattcgaaaaatttcatgtacttatgtcaaatatactaatgtaatactattaataactaaccatcccagtttgcaaacatttcttttccaaacagcatattactattaaaaagaaaaaaaacaggcatcaactcatcttgttcaaaaccaatcaataatcagggaaagcaccttatactccattcattatcaagatgaagtggggcttcaacaaccaaagatgtttcagcttccatttttgctttagctgcagcatccctggctggctttaaaattaagtactctttctgcaagtaagaagtgtttgaagaatcattacacaacctaatgaacggcgtgcggacataatgagagaaaattgctagaccaacacatccgatccaattaaattacctgccgttccatacaagctccatttgaacattgaggatttggcttcatttccatggttgggaagaagtctttaagagaattgtatccctgtgttcatgaaatgtaacgtcgaaatcaaatacggaaccttcacatttgcaacagaagtagatacaaagatctaaggcataagttacttgtaggttctgccacatttgataagcaacagcaaggtgaaaacaacacgattcattcatgaaatgaattgaaacatgcagttacatctacagttacattttatgatttgtctagaaaagagagttaaagaaaaacttaccaagtatggggagaccagcccaaagttcagcaaaaatttaagtgtgttttggactagaagcccagcaataactccctgcacaatagaagagaatttgcagctataaaaatgctaagctttatcccgctacaatgagtcaccataaacttgaatttcattcaatcaattaaagtctatattgtatacaacagagtaaccaagtcacaaaatcaaaactcatctagcttttctaaatcaacagttaatattatcaagtgaaattatagagccattaaaatatgattgaaaagaacaacttaccattgtggtaggtaaagatgcagcacaaaccccttcacgctttagcgtacgttcatctactccagatgccacaacctatgatataataaaagcaaaaacaaaaactatctttaacaatccaatataagcaatgtgagacatgaaagacattcatgtcacttttttttacatcagaacaaatcactatctccataaaaatgttaagaacattcatcaacttagtccaaaatcacataaataaggaaggcataccaaaggaggtgcacatgcaaaacaggcagtttcgcctggaatcagcaactgaatatgacctgacacagcatcttcggatacacctgaaacaagttttacggttttgcaactgaattcaattctaaggtggtacatagaaaagccaaatgtgtaaatatgttcataagcgaccaaaaacatgggcacaaacatctaacaagattatgttttgaaactatgaaacaatgtttggtacaagcaggtccagcataatgttcaaagcgattttaagtgttctaattgtcataaatcacaagtatacaaaaatataggattatgttgcttaccagattccatccatgtctggttcagttcgttgcaagcctgtatcaaaacataaaataatcatatttgaaattttattcaaagtaacaaaataactgaagggaaaggttcgatataagcttttgacacaattatcagatagttgtttacaaccattacctggttaacagccatcctcgcttcatagttatccacacagctaagtacaagatccactccactaccttctttgttcggccgaaaagatttatttttcaaacttgatacaaatgtatcaaaaccttgcactgtagtgatgttcagcgtatagctctagataccaagtaaattgtacaattagcaaaatagactgcataataaataaactttctttctcagaaatgcttgacaagtttaagctatattgaattttaattctctaaaataataaaataacaaatgtcaaaattcaagaccattagatgcaatgctgtcacaaaattcacaaccatacaaatttaaaaaaaatataaagacatcagcaaataaatattacatcctgtagtttctatttcttatgccagtagggagccaattttctaattagacatcactcaaattctttttattttgaacaaaaaaatcacttaaattctgatacaaagcaaatcagcgaaatggtagcactcaggcattctcgtccatcacatattaaaaatgtttgtggaaaattagaacatgaaaaaaaaatgaggagaaaatcttacctcaagtacaacatcaggatttatgtcagaaagtgtctgtacagcagcatctgtctttgtcatgttaacctgataaggcataacacaacatgcatgttacagcatacaaataaacaaaactaaaaataactaaaaaggaaaacatgttaagtattctgtggctaagtgctgctcatccgaaagaatattcatacattgtatgatgagaaaaaaaatatatattgcagaatatagttataaaccataactagttgctagtgcgtacagtgtttggatgattgactgatgaaagtatgacactggcagtcaaaacgaaagaagacttttagtatgaatcttagaacaagcttccataactttgtagcatataaattccacattgttttaataaggcaaaatctgtctgagaacttcaaagccagaagaataaataatgagaaataacattaatgataacctgctctggacgaaaaaatagccggttcatgttagccagctccactttgtcataatcatacaacaaaaggcgacctataccacatcttgttagcatttcagctgccacacttcccacaccacctactccctgcaatcccatggaaatgaccaaacaataaacttactttaaaaaaccattaatacaagaatgcttatgcagaatacacataacatatctcaaaaagccataaactgactagattaacatttgaggttttctcctagaggcacaattattacaaaattctgttttaaaatattcagacggcagtgcaaaatgaccttcaaaaagagaccgttttgccaatttattccttttataaacgcaaattacaaaagatatccacgtaattcaaggttttctcttatgggcatacattatcacaaaattaagttttttcttttttttaaaaaaaaaaattggatttgccaaaacattcacgtataggaaatttcaaacttgtatttccaacaaaagtaaagaactttgaaagaggagatgaatacagacaacaatggcaacagagaaatcccgtattctttcatagttctccacaatgcccattctctgaagagccatgagcctactgtatggattgctatccacaacctccgcactcatatcctgccaccacaattcaaacacaaaagtcaccacaataggtatgattacctcacaacaagtcatgattcaaacttacaatgtccaaaatacctttactttagaacgccgaactccagagtttccaagatttgcaatacgttctacatgcaattgtatctacaaacaattgaactgtaaattcaatgaagtagaaccaaaatcttcaaaacctcataacttattctttttttatcacatacaaaccaactactaaacttgaaaggaaactgaaattgaattatatgccattattacttgaaataagattagcaattaagattaacattcaaagattctgaattttcatcatttctgacacattcaagtactcatgctagaaaccaaatgatccaaattctatcacaattgaaagagattatcagttttcgcgattagatcccgcagtgtagctatttcgaattgagaactattaccttgtcaattggcgctcggtgagaaggatcagtgaacgattgcttcagagaattgagctccttcagcacctctttcagctcttcctccattgcttctctctctctctctc

SEQ ID NO: 16995 - DNA, 4900 bp, Cannabis sativa
gtaaagatcttactttgggtagcaaaatagcccaagaaaacagtcacatgacctatttgctgtatttaacatgaaatgaataggtgtccaagttttatagccccaactattacattaactctctaaaatcatgaacattaattcgcacctacttaattattattattattattattattattattattatttgtagggtctttttatttttacactttaaaatagttttttttttttatatttttacggaattttacaaaaaaaaatttattgtaactaacggaacaatctaaatcgcaaccataaattatatagcaacccacataaaaaccattggagaaactcaaaccataaataaaaaaaaattgaaaatagtatatgggctaattttccttattattattttttttttttttgaagaagaattttccttattattattattattattattattaggctacatagaatttttgtcccctgaactttgacacgtaccaaatcatgctccctgaacttttaaggtcgttaaaaaatacccctgaactattgaaattgttggatttaaggattttttttctaattttagtaaaaaagtctaacatgaatatatgaaagttcgaggggcataatttagtacatgtcaaagtttgagagatatgatttggtagatatcaaagtctggtaagcatggtttagtacataaacaatcactgaaataataaaactgaatgaaattagacaaaaatccttaaatccaacaatttcaatagttcatggtatttttaacaactaaaattcaagggcataatttagtacatatcaaagttaggattaaccttattattattatgacaaattaatagcatgtgagtccaaagatcttaattgacaataaaccaacatatatgaaggagtcatgtgagtttcaacaatgtcataaataatacaacacaataaggcaaaattattattagttttcaggtgaaaaagcaaatgaagcatataagccaaaagttcttgaaaaaatttccaaagatacccaactttttaaaattgtctataaaccgttatatattctattattctcttttcttattctgaacatgatatgaaataagattgaaaaacaaacagatcttatgagaatagaatcaataatatttttaggtgtattagaatcttcttccattaattcaaacatagacaagagaataataataaaccaacagcccaatcgaaaaagaagaataaagtatacaccttactcatgcaacttgatgaaaaaaaaaaaaaaaagaagaagatgaaacttaaaaataatatcttataaaaaaagaaaaggtagatgacatacttattgataatagagatatctacctaattttctaatggctttctcatcatcctcacaaccttaaattaatattccaataatcaaccttacattataataacatatccatttgaaattgtgatatcgtattattggatggttttaaagagaagaagaacacatgtatctcagctttaatcaaataatatactttaatggcataatttacattatgtcgttaaactatcataaaaataataaacagtaaagcaatgagagtagagaagcttataaggaagaaaaaaatatgcttacttctagtaaattaaagcttttttcaaacatttcttatgatttatagtatacctaacttctttgctaggatttccactataactacttatcatggaacaaagtacttggatggatatattttgtacccactacatttatgatgatgatgtcatcatcatcagatatattattgagtcgatttcgccttgaggaggcaatgacctactttttcttactaatcttgatgtaacactattactttatgtgatgtagtcctatcataatcctctaccttttattatgattattaaaatatatgcatggtagggctatttggggctttggcctaattaagaatctacatagctagctagcttgtttttgaaagctaatcgacattaataataatattgtcttgtgtcaagatgatcaagatttgagttacatctaacctaattaaggttattaattagattaattaaaggaaagacaaaagataaaacgtaatcaagggagctaataactatagatcaaataaaaccaggaggtagagttataaacacctcttcatgcaaatctccatggagaaatgtattgttgacatcaagttgatgtaaacaccaaccctgaatagcagcaagggcaagaataagcttgacagagacaagctttgtgacaggggcaaaggtttcattatagtcaattccctcttattgattgtatcgcttggccccaagtcttgccttgaatctttcaatggaaccatcagtattgtatttaatcttatagaccaacttgcatcctatggcatgttggccagcttgtaaccacaaccgggtaccattatcttcaagagctatgatttttgtatccattgtattatcccatactggtatgcctcaagcttggtgaaaaaactttagttcaaagttgctagaaatagctagcatagttgctcgaaaccttggtgacaacctgctgtagtcaattattttagatagaggatgagaagttgatgactttggtacatgagattgcacattattagtagaaagaaagcaatgatactcttgaagataagatggtttgtctggctagttgatctagtagtaacaataggttcaggcatgttaattatgtctagtttatgggttcaggcatgtcaaaacgactgttgctatgattgtcttaagtattaccagcaaattaccttctattgtcattagattgctgattagttttagtttgaggtatgacaattcttctctgtttctccttttgaattatgttggcataagccttgttcacatttggaaggggatcttgaagcaagatctaagatctggcacttaggtaagactcatttaggccaatgagaaattcaagcactttgtcttcatcttgatactcctgcatagttttcattgtctcacaagtacaaaaaggttatggcctgtatttgtgtagcagatcccataaacccttgagcttagtatagtatgaaataacatcacttgatccttgggttagtgtatgcatcaatattaccctacttatctatattctaagtatgtggtcattacaagaaaggcgaacaggacagacctcaccctggtcctcaattttctagactttgacatctccagcaacatcttcagtatcctcgctcggaggcctagcttgctccaccccatccatcgtgaatagccgagcaaagtgagagttggactctgaagcctttcttagggtccattttttctttgtcgtctttctacgtttggacgattgattcagatcaaaagtgtgcctcgcaatggtaacaacaacgtctactatgacttaataactgatcgatggatttggtcggccttctagtagtgtatcaattgtaccaggtcggaccttgtacgtccacaaaacaaggagatagcgtctccaacctttgttcaattcccagatgaattggttgtagtaaccttctccacttatctggtcagggtaccatggatgttgtaccatgggctctgaagacttagagtgatcactactaactttgcagtcatcaaagctggaagttgaagagctttaactgcatgaagacgagtcagcaccgagtcgaggatgaattttgtaaagaagttgaagaagatcctagtcgatatgatgttcacctccctagaactcaccagggttcatctacaaaagaagagagacaaaaggtgagagttggacggggaagagaaggcaaaacatatcgaatatgccgaccaggttaatttgaagaaaaaagaagaaatttcaccccaataatgaaatccctgaacttgagggttcaaaaagaatgttaatattcagaaacttataaatgggtaattttaaataatttctggccaaaatagctagtaattagaagcctacagaatcaacacgtatatcagtcaaaagttaaaagccctaatgagatctcaaatcagtcaagaacagattcaaggacccaaaatttacagcgaaatttcaaaaaaaaaaatgcatgtattcaaaggaaatcgcataagaaagaaaatgagataacttactcattgttcgtaggctcctaagtttgttcagacgactttagcaaatgacttccagcaaggggttctttgaagatttgagaggaaaaagagaaatatttgctctggttatacaagaataaaaatagctaaaagagttaaaagaataatttaaaattcaaaattttaggttttcctccccaaaagaaacgttagtacttattgattaatagaaatgtcacgcgtgcagtatcatatagctgccattgcgtgactcgaggtatagctttcaaagcaaggaattaatgcatgctctagagatcaaatggaccttcaatcagtcgtgttggatgaagggtaaaagtagggcatgcatcacccatccgatcagatcatgattgataagtcaacacgtgcgaccaaaaagctcctacatgaatttgggagacaaatgctatctaatttataacaaggtagtgtggcatccacttgggtgacacatgacaaatttcatgacctagatgaaagattctacttgagagctgtgtagggagattagatactcgaagtctgcaaaagctggaacgttcgaataaggtgtgtgagaacaccagaccagcttctatcatgtgagcagctcgcatgagctgaccagagggtgtgatttaaatattttcaaaaaagatatctcacatatcttcatacttgcaagacacga

SEQ ID NO: 16996 - DNA, 5698 bp, Cannabis sativa
  modified_base (4737)..(4742): a, c, t, g, unknown or other
aaatttaaattttaatagtaaaacaagttagtgaactattagtaaatttaaatttattatggactatgtgtacatttttgtagtcttgtacacgtttatattaagacacctaatatcattatttcaaaatttaatttaaaattatataaagcaatatatattttaaaaaaatattctaaattttttaaaatttttaaataataatattaaatatattatataaatgtaacatatgtacaagagtatacacatataacaaataaatgacatttcaaatttgctaacaattagtaatttaaaaaattttaccaccaaaatttaaaggttaagtacaagtagaataataatcgttttcaataatcgttttcaccatgcaaagatgattgttaaaactgcaataaataggcccccataacctacaactttcaaagcaagaaatccagaaatcaattgcattgtagagagtagttgtttatccacttgaaaatgcaaatcttcaaattttgtggagagaagatgtatatatataatattcaggatctccaaccagaggattaagtgactcagaattcaggaaaaaggaaaagtaaaataaagcagtcttataattgaattttaatctataacatggcatgaaacaatttaaaacaaaatgcaagtcctctgagctcaagaaaacaaggcaattcttgcaaataattccaacagataaagagaagcaaatcaaaagtcatcatcgtcttcctcggctatatgtttagcgagctcttgttcctgctgctgtctttccctcctcttctcagcactttctttttctttgtgggagtttggtgggaatcggagtgcacgcactgcttcattatgcaagttaagacaaaaggcaatcctagtgtcaaatgcactttgaggctcgtttgtagagtagatatctccagtttcctttgacaccatccatccatttccatgatcaagagtagcatcaattgccccatctcggattgccttggccacaatactctctgcatcagcgactggatttggagagtccaatcttagctttttggcaacatcaacaagagaaatccgtgaatatgagatgctaatgttacgcagcccagtcctaatgacattatggcgcaacctaacaatcaaattgtgggttctatctgtattgaaagtgctggagaacttctcagcaacacttctgaaaagctccaaatctccaattcgtacagcctgtaaaaaaaaatacatattaaagaatgcagcaaaagttcaaccccataattcatgagttgatatgcataagtcatgtcttgaagcaatgacagcatcaaaaaacccagaacataccaatgtcaaacaagagcaatatcaaattatcaatgtatgcataaatttttcggtacttaaaaaagttgacgtcaaaaaacatttaattaagtatatttgcttttacatttgaaaggcaatcaatcaagttcgtgaaagcatgtttctacagtagggactaaattcaatgaacaaaatcaagaaaacacaactcacatttgttagttcaaaatatggcctcaaagccttctccatccctttttgcataaaaactgtcctctcgggtatttcccccaacagtaagcggacaatgatagcccacttgttacactgaactcggaaaccaagggctgcaattggagctttcctagctgcttgcaggagggactctttagcatctgtatactccaactgaattgttctgatctttcctaagtaaaagaggtacctacaaaactgtaagaatccagcctcagaatatgtatcacatatctacagtacaataatctatgcagaaaatagctaaagagtaaaatagatagaaaaagacctgctggtttgagtgagcttcaaaccggggagccttggacctcagcttttcagcctgatcgtacaagttgtaatggaggtaatttcgaagtaacaggttaagaagcgtttcctgcatcacatcatcatgagagcataagactcaagacatacttagatagacataattgcttaggtaggaagatttacctgacccaactcatcatgacgtaatgttgcaatacgatggagagcaagaaggtttctgttaaatgaaataaggaataagccaccaaaagcagaagtaatatgccattctaatctaaattatggacaactatatcatagagacaccgatgacaaacaataactatagtccgagggaaacaaaggtaaaggttaagtaacactgcatgtaaatacaatgctaacttaccccctaatttcagcaagatcaccggtgagttcataactaagagaataataaaagtatagccttgatgctagaacatcaacagttctcctattcaggttcttcaatcgagcaatgctggctgaggcacaagctttggcctgcaagaaagtaaagaaacatcaaatgtttaataagcatgtcaaataaagtaaagagaaaggaaaaaaaacaggtgggaagaggccatgattgattatgttactcacctcactgtatttcttctgatcaatcagaaaaatcagcacaagcaaatagcagtaaatttctagctccggtatcgagtgctttactggagcttgagttgcagatgttgcagtatcaacatccatgtcatgttcatcctcctgaaatcaaaattaagcatatgaagtgcttcgtataaacaattaatgcacatacatctcattattaatagcagccagcaactttctaaatatattagcaaattccatctcatttcctttgtaaaccaatggacttaacaaaatttaaatccaattaacaaagcataattagcttcaaagaagcaatatagtctgcccattagaacttaatcgataccccatcatcacagaatagataagctatgtcttcaagaacattttatacattggaatatccacgatattggaagtattcagcagagcacagcaagaacacaaattcaaaaaaaaaacccaaatcaagaaaagagttaaaattttacctttgggatataggaagataaccgagtgtgcacctccgatcctggagtaagagcgaaattgaggaacgcagagagcactgaagccttcagctttcgcctcaacgccatggtcaggcgaacaacacgcacaattctccgaacctcccgtgcatacgcaccagtctcaataagcgatgcaatctccttcaaatctgaaaaaaaaaaattaaaattttacaaaacgcattaaaaaatcgaaagctcaagcacaatcgttcgaatctaccgaaaaaaaaaaagaacacagtagaaatcgaagaaaacaaaaaaaaagttagggttaaagtgtaatgaagatgagtgtttgaatcatacgttgcagagttgaaggagtaggagaagggactgggactgggactgaattggaaggagcctgaagctctttcatctccacgtcttgagtcatcttgcagagactgtatcgaaaatcacaacaaacatagaagaaaaaaaaagttaaatgtaaaatggaaatggcaaaattagaagtaagatatagatgatttgacctaaatcgtaccagagatggtggagctcgggttgatcgaagaagagattttagggtttcgcccaattttcgtacagtgcaagtctaaactggtagaaaggaagaagaagaagaagagagagaaagagagcatccaggtagtgaaatgaaagaagcaatctctcactagctgtaagccaaacgacgtcgtcgcattatttatttattttttaataaaataactcttaataccattttattttacaaaattatcgaatgaaccatttttttttttttgtatgatttgctgtataaatacataaatttaactaattttttaagtttaattttatatcgtaataatacttaaattataaacgtacctactacagaagttctataattataatttaagtattattactgcaaacaattaaacttaagtatttatttacaattaaaaattaaacatgtatttatattacaaatttctcttttttttactatataaaaaaggtaaatatattgattttgaatgttaaaaaagttatttattgtagttttgttaaatgacaaattagatttttttttaatggtacaattttttttttagtacaatttttgtcattttcattaataaaatcaatctaaaatcgatttttagtaggaacagatacaatataagaataatttgcatataagagtatcaattaaattttattgttaaatagtgattagaactaccactatatgatgtataacacatttttatcagtctaaataattttaattatttaaatattataaaaattattttaaatggttaatatttaatgctggcatttaactaaacacttatgatttgcaaataaaaatgaagttcaaagagagtgctataataaaaaaagataattgaaagtaattaagatctcaatattcccatgtgaattagatgtattacaatttgagaaatattaaaagggatctatggttagggatgcatacggagggggaattaatggggagtacttccctcgtcttcatctttattaaggattttaattttggtcttcgcttatttcccatcggaggatggtacggaaaatcccttaatagggacagggacgaggcagggaatcccttaataaaaaaataaaatttataataaannnnnnaatatataaaaatattaaactacatgaatattataatgttacacattaattattatccaaaacacaatttaaattcataaaaaggatactaatatactaaaaaactacaaacataacttataaattttaaaatattattagaaatataaaataaaatactaaacaggtccccgttggggcagggagtatcatctccgtcccatttaacattcagagacaaaaaataatcttcgttcctgccatgtttcccatttagacaggaaatctccgtcccattaggggcgggtcctcgcggggccatccctgaaaggaaatgtgcatccctatttatggtgcttaacacttttatgatgtgtaatattactgttggtgtaattttatatcaggtctcccttattttaattaataaaaattataaaaaactactaactaattataaaaaatcatgtcatagaggtgttaggcacgttaataccccatctcaaagtatacattatataataagtaatatacattttctcacaaaggaaaagtcctaaactagaaaacattcaaaatatgaacaaaaaatactcaatttttcatgaaaattactcattaagctataaataatagagattagaacattgttataagatactagtggtatctagcacaacttatagttgcgacactttgtaaatggttagtgatattctataatagttattacactaaattatataaaacttatacttaattacttcaataacaatataatacgttcaactactacttttttaacatttttatcaacaataatataagtagtgaaagcataactttgagtcactagagcactactcacaaataaaagttcccaaaaacattatttcacttgccaacatgaatcaatctctcattaaaattggtcacaaaaataaaataaaatctactattaaaagaaatagtagcta

SEQ ID NO: 16997 - DNA, 6354 bp, Cannabis sativa
tgtagtgacaatctcactcttcttgggttgtttataaaattggtgtcaacctcacctacaaccaagttatttttctgccggtgacaacctcacctctctatacaatggatgtgtagctttgaaaatacaaagcaaattctctctaataagatgaaatacagtgtgaaatcctagagagaattgcaagcacactagagaagataagagcaagtttggctctagtgtgtgtggttggtgtgtatgtaaaaagataataaatctttggtttagaacacttagaataattgtgtatgatgaataaatgctcaaccaccttaaaaatgtgatacaaatgagtttatatagagtttgaaagaaaactagtcgtttatagctgttgtgaacgaaaatccatgcaaatctgggctcaaatggttcaccatttaaaaaacgtttcatcttttcctaggaaaaacgattcaccattttccaaaatggttaaccttttaagtacagtggcaaaatgcaattttttaacttaaaatgcgcataacttttagctcgtttatccgatttcaaaaaatcaagttgtgttctcttagttaaaagatgaataatcttaaatatcaatttagaaaaattatatgttgttatttttgaaaagtaataacttattgttgcacaagttagtgagccaaacttttaacttataaatcctaattacaatgtaaatcactttagcaagactaatgtaaacttatacaatttgattgtgtgcattcttgatgtagatgagcttcctagcttaatttgcatgctttaatccaaagttgacttttctcgaaagttgacatcggctttgacgttgacttttgactttgagcttttgaagtcctctcgagagtaaaaattctcagctctatagaagttttcgagaacaatgcaattctaatatcctgctacgacgatagatgatattttggccattactctctcgatatatctcgaaattgaacgattcaagatgttttaaaaaaatgaaagaaagatctagaacttttcttcacaatatttttcctgaaagagaacatatcgtagtcaaaaattgacttgaaggttcagacttgattttgattacaaatggagcgtgttgagcatccaaatcttaaaaaatttcacccattgtatcttacaactccaaatccatgctaaatctataaaattcatcttatttaacatgttttctctcatttcaacccatataatgtattttactattaaaacctaaaacaaaaataaaacaagcgtaaacttgaataataccaaataaaattttatgtgtaaaacgtataaataccttttaaaataaactctaaaataaaaaaaaaaataaaacaagcgtaaactaaaaatatcttttaaaataaactctaaaacgcataaaaataaatcttaacaattatagcgggatttgaacccttaccccaaataagaaaaatgtcattaaagtcatccttaccactagaccacacaacacgtggtaaagttgtaagcttgtaattgttgattacaaattggtcgaaaggttgcataatattttacaagtaagcaaaaactccaccagctttggttgggggcaaacaggcccacaaagaaagcaaaatgaagagtagtagtagacttctatccttcctacactggtccccattccccaaagccaaaggaaagggtagctttaataagatagatagagagagcatataagcagtgagtagcctccacaaactcaatgaaagtgaattgaaagccacataggaccaaccaggttagctaatgactaatgtgtggatgtgtttgtgtccattgtggtgaactcagccacagcctcagcctcagcctcagcctcaccctcagttgtttcctttactattagtactaatattagaaccgtttccaacatgttcgcacagtttagaggtcatcctccacaactctctcaattgtaccggatctctcaactctttctccaccaactctattcccctaacacccatattattataatcaagttcaaccatgtctctcaccattaagcttcatctcattacttctcactctcatcatctcaacctcaactttcatactctcaaccaccacccaacaaagttcacttcttttaaccccaacattcgatccaaatccatttaccattccgacccattagtctccatcgtctataacaccaaacccaggatgcattctccgtctcggtcggttcaggctccgatcaagagctctctaattgatcccgatggtgggaagcttgttgaccttgtgattcccgagagtgaacgagcttccagggttttagaggctcaggctctacccaaggtgagtctcagtaagattgatttcgaatgggttcatgtgatcagcgaaggatgggctagcccattgaaggggttcatgagggaagatgagtatttgcagagtttgcatttcaattcactcagaatgaaagatgggtctgtggtgaatatgtcgcttcctattgtgttggccattgatgacgagaccaaggagcgaattgggtcttcgaccaatgtggggttggtaggccctaatggagatttgattgcgattctacgaaggtcagtactttatcaaagacgatagtgttttgatgtttgattagtttcttctttcattttttgttataatatatttgttttagtgcgaattgcctattaattgattggtttactgccacatgacttagcctactataatctttttataatagttcttgtttcgaagatttcccaattcagcgggggaatgttttagaaatccaaattgtttattcagtattgccaataaaaaattcaaaaaatatagattatgattttaaacatactaatatgatgtttttgactaatttgtgtgggcagagaatgatactatcaatttcatttcactttactttatttgggtagaagaagaactataggaataataatgtcaaatatgcacatgagacatggttacttgaggggctgtttaagtttaagaacaattatagatgacataaaataataaaagaaaacttgtttcctggttgcataaataagaacatgaacatatacgaaagagaaacactctctttaatttcctttctcagtactcattagggtccattgtgattgtagcacattttttccttcataaacttcaagtattgttgtgtattaggacaccacctgactgaatatgttgatttttgtttaaaacttcgatggcagcattgaaatatacaagcataacaaagaagaaaggatagcaagaacctggggtaccacagctccgggattgccttatgttgaggaggttattacttctgctggaaattggcttatcggtggagatttggaagtgttagagcccataaagtataatgacggccttgataactatagactctctcctcaacaactcaggaaagaatttgatagccgtcaggctgatgcagtatttgctttccagttaaggaatcctgtccacaatggtcatgctctgttaatgaatgacacacgcagacgccttttagaaatgggctacaagaacccaatcttattgcttcatcctttgggaggcttcacaaaggctgatgacgtgcccctggatgttcggatggagcaacatagcaaggtcactcccatgttcaaatacttcataaaatgtagacaaagatgatatctgtttaaagaaatgaatgttcttgactaaaagtttgttgtattcccaggttctggaagatggaattctcgatcctgaaactacaatcgtcgctatatttccatctcctatgcattatgcaggccccactgaagttcaatggcatgctaaagcaaggataaatgctggtgcaaatttttacattgtgggtcgggatcctgcaggtatgggtcacccaacagagaacagggatttatatgatcctgatcatgggaaaaaggttctaagtatggctcctggacttgagaagctaaatatattgccattcagagtaagtgaagccatactctccttgtaggcttttactttatagcttcttaaattgggaaagaacttgtaacactgctcccaagaaataattgtagcactgagctgatcacatttgatgtctctggggggtcatagcagttgcttatattagataaactgtcatataacagttatgatgcccattttttatttgaatcatttttcttgcatcataaaatgcaggttgccgcatatgacactgtacataagaagatggcgtttttcgatccttcacgtgctaaagaatttctatttatctcgggaaccaaggtagaaaatgccaaccatttattagtagagtagtagcttgtaaaacgtaataaaacctcaataaccatccaaaaacttcatcttttgtgtctgtcactgctaagctttctaatccagcttatatcttgtactttcagatgcggaattttgccaagactggggagaacccaccagacggtttcatgtgccctggaggatggaaggttctcgtcaactattacgagagcttgcaaacagaagagggatcacagcaggcagctgttttatctgcttagatattgagagtattggaatttcagttctaataaaataggagagtctaaagcggttaattgaagcaatgaataattaaaggttttgcacaaagccatgttgtaactgagcaagtacaaggatgttgtaacttaaattagttctctgttaggcttttcatatataatgaaaccaggttttgtttgccaatgtttgtaaaagaaaaatgtattgaatattttttggttcattatcttagaatattcaatttaattaatgtatgcaatgaaaatgaagctgtgtgttgataaaacttaaaaattgcccagttcttttcagatcatgttggttatagcagcaaccgaacacttccttctctttcacataacttatactgcagtgtttgcaactcctaactgtataatttcatgtcaagaagctctctacatgatggaaagatagaaatattttggattcaaaaagaaaaggagttcatgctagtgagttattacatacctgcaaatttagagatgtggtaacaacggtaaagagttaatgtcatataactataagttgatgggtgagaaagctactaaggctagtttagtggtgagaaagggatggaaaaagggagagatcatggttcgaacccaagacctttaagttacaaggtattaattgattgtaaaataccattacgctacactcaaaaaaaaattgacgggtgagaggcaaagcaggagcccggagcatgtgccagtgagggaatgatggaacaagcaaaatggggctatataaatattttccaaataatagatattaaagaattcttaatgtcattgttgttaaatttggtttagagaaatatatattggttacttggttactctgtatagtaaccttatttattgggtatctagttacggtatttattggatacctatagaatgggtacaaaataatagatattctagataattatcttggttacctagttaccttatatattgtgtagcgttcgtcatacctagtatgatttagtaccttgtttagggtcccggtagagaaaatcatatgattacatgcaaattatactatgattaatttagataatagggtgttttagtaattttaccctattaggatataaatgttaattttatgtatatttcgtctcataggctaactttttttttgacaaagtgattaaatcacttatgaatttacgatgtagacgtccaccaccggcgctggaacttcctcgaactagaatagcttatcgtctaaccacagagcatgctttgccaagtcatggtccgctaaattctcagagcaagccacatgggacaaaactacctccaaaaatttagacaataaagctataacatcttcaaacaacgctcctaactcgttgaaatacatcttcatgttttttatggccatcaccaaagctaagaaatttgaataaactggatgaattgaaagaccacacatacgagcccaattgagtccaactaacaggactaaagtttcagcctgtaacactaaaaattcacctgaaaaaacatcagaaaatcagaaaaaatttataattagaaaattatcaagctaatcaaaatcaatcaaacacaaaaactaaacgactagatcccttataaaattactagaactagccaaagggaataccctttggctagtagcaactaaactctttcattttacttcataatcatcttaggatcactatcc

SEQ ID NO: 16998 - DNA, 6772 bp, Cannabis sativa
  modified_base (72)..(74): a, c, t, g, unknown or other
  modified_base (5357)..(5361): a, c, t, g, unknown or other
tgacttgtttttaaaaacttcaaaaactattttttgttctcattttttaaaacaattttttgaaaacaaaannnagaaaacaataccaaacatgctaaaatattatgaaacgggaacatatattttttttttttttccaatatcaaatatttataaatatgaaatttctttttgaaacatatgtagtgaaaataaaaacccaactttttatttgaataatgttagtgtaaatatgtgaacataattaataaaaaacgtttcttgaattaggagaataaccagatgatcgccggcgccggcccggggagcagaaatttcttcgtcggcctactcaaaaccgctacttctctctctcacctcacccaaatccacgctcaagtcgttatccatggcctccaatacgacctcgccattgtcaccaaactcactcacagactctctgacttcaaagccattcgcaaggcaagaagcctctttctcaccattcccaaccccgacttgttcctcttcaacgtcctcgtaaagggtttctccaacaatgaatcgcctttgtcttccatatctctttatacccatttgaggaacaagacgattctcactcctgatgagtttacttacgcctttgctatttcagcggcttctggttttaaggatgctaagtatgggattctgttacatgctcattctatcattgatgggtttgcttcgaatttgtttgttgggtcagctttggttgatatgtattcgaagtttttacagtttgagttagcacagaaggtgtttgatgaaatgtctgtgagggatactgttttgtggaatacaatgatttctgggttagctaagaattgttgttatttcgattctgtaaggctttttgttgatatggtttctagtggtacaccatttgattctagaaccttggcagtggttcttccagctgtggctgaacttcatgagttgcaagttgggatgggaattcagtgtttggctatgaaggttgggttggatagtgatgtttatgtgcttacaggattagtttctttgtattcaaaatgtggagagattgatagagcaaggttgttgtttgggaagattagtcatcctgatttgatatgttataatgctatgattgcagcttatactagcaataatgatacggagtcctcattgaagcttttcaaggaattgcttgcttttggggagaaagtaaatccaagtacagttgtgggtctgattcctgtatcttctgcctttggtcatttgcaacttactaactgtatacaagatttttgtttgaagtttggtattctttcagacccttctgtttcaactgcattaaccactgtttattgtagactcaatgaaatagaatctgcaagaaaactttttgatgaatcaccagaaaagagtttggcatcttggaatgctatgatctcaggttatactcaaaatgggctcactgagatggcaataactcttttcaaggaaatgatatctgtgctaagtccaaatcctattaccattacaagtattctttcagcttgtgctcaacttggtatcctaagtcttggaaaatgggttcatggcttaattaagagcaaaaatcttgagtctaacatatttgtgaaaactgctcttgttgacatgtatgccaagtgtggaagcattgtggaagctcgggaattattcgacttgattaaacagaaaaatgttgttacttggaacgcgatgatatccggatatggcctccatggacatggtcatgaagcacttgagctttttaatgagatgttgcattgtggggttgccccaactggggttacctttctatcaatcttgtatgcttgcagccatgctggtttggtgaaagaaggagataatatatttaagtccatggttcgtgatcatggtttcgagcccttagctgagcactatgcgtgcatggttgacattcttggaagagctggacaagttgatcaagccttggaatttataaggaaaatgccagttgatccaggggttgttgtttggggttctttgcttggtgcttgtatgactcataaaaaccatagtatagcacgtttagcttctgaaaagctatttgaattggaccctggaaatacaggatattatgtcttactctctaacatatactcagctgacaggaattttccaaaggctgccatggtaagacaagttgtcaaaaataggaaactagaaaaggttccagggtgcactctgattgagattggtgaggacactcatgtatttacagctagtgaccgaagtcatcctagaacgatggaaatctatgcaatgttggataagttagcgggaaagatgagggaggctggatttcatacagagactactactgctttgcatgatgtggaggaagaagagaaggagctaatggtgaaggttcacagtgagaaactggccattgctttcggtcttattgctactgaacctggaaccgaaataaggatcattaagaatctcagggtttgtttagattgccataatgcaactaaactaatatcgaagatcaccggtagagttattgtggttagagatgctaatagatttcatcattttaaggacggcttgtgttcttgtggagactattggtgaagaaaattctttgcaagttaaggtatgcattgtcctactatttatatggtaacattaattgttcacaataattttgatagacaaaaattgatgaaatcagatgttacctttctctttatacataaacaaatttacataacttctattctatcaagtgaaaaccaaagaacttgtatataatgtatttctcagtgttacaataccatgattaaagtcattacttttgtttggtaaaatcaccttttgttggtcactcacttcaaattaaaaacagcaaatgaaaaggatgatattgaaaaaaaatagtaaagaaatcatgtgaaacaaccattctcaagaacaggttgtgttcttgttactgcagcagaaggcattttgctctgaccaacccatctacttgtaagaaccaaatcttcatcagcttgtttttccattatctgaatcttctttgttcttaaaaacctcatagagaaaatcccaccaaaaccaaccaaaaccagaataataaatccaagaatggagccaatcaaccaccaatgccatacaatcttccttttttgtaccctgctgttgttttctggaataacaactgaaaaatgaccctgctctctggatagacactcaccgaaataactcatctcactaagataaaagcttccattagctgcaaatgtaacacattttgtttcgggttttgtgctctctgcgagtgtcaagtttcgaaaatgaatcgaaataggcttccccatagtagttagactgacttttgtgaagctattggcactcggatttgatgcatcgaaagccatgaaaccaacaaccgaagtgattaaagagtaacctggtactttatagtaatgagaagaccaatttttcatgtcatgataaaccaaagcaagtcttcttacatgaggcaaagagattgttcttgaaggtatactaaagtagctaaaattagctccattataccacaatccccggcttcttatcttcaaaatcgatacttctatacccgatagattggctggcgggatagttttgtacaagacaccagtgtgaggcctgtgtctgacaagcgccttcgaagtaaaatcttgaagtaaagcatctaaagaagctgttgcagacttgttaaaacaatttaccaagggaaaacaaacagataagaagagcaaaacaaagatgtttaatttcatcttggcttggaatttggatccttcttaagacacaaagtgaaaaacttgatctttttaagcattggaaaaaaggaaaaagaagaaagaaaaaaacagtacaattatgataataaaagaaaagtgtaaataataaatatgtttgaaattgtttgaatgatgtgttttgaataaagatagtgagctgtgagcatggtatgaaaagggtcccatataaagagaccaaactagtaactaataagacactatctttctttatcaaaatttcactttgaatttaatgtagagaagaagcaatcttttcttttttcttcttcttttaatatcggcccatattaaggatacttaccattattggcgctaattgctctttaatcaaaatgtagacatttttgaggtgtgaaatcatgattcatggttgactagactgatctctttctattcatgatagtaatgttgatggtgttttctcaagcatttgttagacaatgcaaatactataggctttttagtaatttgaaagtagtgtgagagcctataaatatgtaattgggtagtcattaatggatattgattgagaaaatagaatttcgattaaaattaggagattgacaatgtctctaaatctccaaatacattcttcgagactgtcaaattgtcaatttctaaaatttataattgaactgaagttctattttcttaatccatatccattaattacatatttataggctcttatactactttcaaattactaaaaggtccttatagtattttcattgttttatttaaactatagtttctttttatgttaacctaaccatagttgagtttcaacttttgattcttacttttgggagaccagtactatcattcttattgtaattataatcaattatggttcccaaaaagaaaggaaatgaagatgttagtgtaaccaacggctatatgagaagcctcatgttttaaagtgaaatgaataagaagcatctttcccataaagaacaaaagtgtactaagcaatttgactagaatttatatgagaatcttttaactccaacttttacctccttatgttttgcaaatctcataacttttttcctttttcttttgcagaaataaatctcatagcttgtttgaattttgaaaggttttatctaataattattacacaattaatttctctaacaaattaggttcttcgttatctcttttgataactaggattttgacaattaacattacaaatttccttagaagattacttttgatactaattttggggcattggaatttcggggtgtggaattggaaatgtggaatgctatcacttgtctacatttatctatatgtttatgttttaagttaccgtttagtttatgtaactcccttatttatttaaaataaaatgctataaataaactggcgtgaaagtactaatgttgtctttatttaaaaaaagaatagtttaaataataaattgaaggttaaatttattagagtggatatttattaataataataataatnnnnntaataataataataatttaaatagataattagtcaaatttttaattttaaatttaaatctattatacagttggtatatatgcgtatattatacgatatatatatatattttttttcaaaatcctagcaaccatatatctatcgtatctatcttttatctaaaagtatcaccttctttatgtcaccaaatagatagttctaatcctgaaagttttggagtcaacaatcagccactcgtatctgaacaccagtattttatgtcttctgaactgagcaacttgaaatcttgaagtaatttatttgggtattaacgataatataaactaaattcgtaattgtatttttattttcgttttcagagaatagcctttcataaaactaccatatctctctccttatatgtccgtttgcagtgatctaggtaccatttcaaagataatttaatgatatacatattttgtgaagatacttttccctaattctgattatttcaatgtcaaaaaattcatattttcatgctggctgtcgaattacagtttttccagatttccttccgatattgcctcagtaaaagtataatatctctctcgatatctaattttccagcgattctggcaccgttagaaagctaattcgataatccatattttctttgaagaaacctttccctaatttggggttcttacttattaaaaatcggtatctttactcggttaggatatctcgttttaagttttatttcagaaaaaaagtgtccttagtaaaaactcaatatctctctcaattttgatccattttaaaagatctttatctcgtttaaaagcttaagaagagagctacatttttcatgaaggaaaagttgtctgaatcagggtgtaactatatttaaaattattaatttaaactgtatccataaatcagcatgatcgaagattttaaagaaactgttttaataaaatatccataaatcttagattataactctgattttgatgatctctataccgttagaaaggtctttcgattatcttaaaattttgtgaatagtagaatttctaattcaaaggttttatgagtcaaattttgagctaaacttgttgtatagtaagaattataaatatattgagtttatcggtggtctaagggttcgccaattgttgatagggcctagaagatatcgtaagagttaattacaacggagttgaggtaaggaaaaatagttatactttacttgtactttttatacggtttgagtacttagtgggacttgttgaattaattgtattgaaactgtgaaatatgatagtttcggtaaaatagtgttttgtcgatggattgtatatggctatttaatcatgttccaggtacttgaacgtggtcagaaaccacacatgtatggtgatgtggtaagt

SEQ ID NO: 16999 - DNA, 4267 bp, Cannabis sativa
gtaataaatttatagcatatttgagtaaaactaatgaaaaaagagagcagtaaactaataaatataaataaagtttaaaattaaatattgtgtttctcagtttctggtagtacgcttgtcttcgacttagttctgtttatttattagcaataaattacaataatttctattttattctttgcttaataaataggcaatcaatgctaagatacgttatgaataaagatctactagagtaagggctcacaagtcattaaaatcgaattatttattctttaaaaatctttttttattaaatatctatattagatataaaaaggtgtcaactttacatgatgcaacaatagttataatactctttaatatagtttacttatctagataagaagtatgagagaaaaatatgatatatgacccttcaatagtcaagaggcaatcatataagggccctccaacttagatagtatacttatccaaaactactctacaaccaaattatattcatatcaaacattacagtgatgattgacgagaatgaatgttccaatatgcatttttcaaatgagtcaatttctcatcaatcatatcaataacttgagagagaacaccaaagtaattagatatcttgtgagtctctgagtctctgaccctcttttcccacataatcaaatcattacatggtctttcttctcgagtcacacttggaaaaaccaaaaccatgttgttgagtttttcttatagttgaggctttgcctggaaaaaatgagaggatctcaatagtgaagagtgatatcccaattactgattgtgcttggaattgttactgtgaaaagattgtcttcacttctgtacttaatttcctcagaacttttagagtttactgagcaagacttgggttttgtactggagtatgctccaaacctgccaggtcctcttcccttaattcttattccacagttagaggaatcacttaataataaatcaactttctcaacagctccaccagagttgtacatgtttagtaatccaatagctgcaaattcaatgttcttgttgtaaacctgcaaaaaaggtagtcacattatgcgaacatattcaaatttatacgtgttagtgttggttttacagtttagagttgtaacataaaccaaccttaataggagatacggtaagaacttcacattttagaactttcaaggtgatgcttagagattcatcttttggtacacgagatagagaacctgaagattcaatcaattagccttttctttcttctttttggctaaaagggtgtgaattcttatattctcttttcatatatatgagaccttggaatggagagtaaaacacttacctgagttgaaggaaaagactgcacaatctccagtccactgtgtaccagaaacttcatcaaaatactctatatcagcaggtgagactagccctgagagctcatcactaacatttttctgaataggattgctcatacaaggccagcttcctgctccttgacaattgaagatgcctataactccagtgcatttgttcaagttccatatcttgagaagactataccaaaatcatgagaaagtaatcagaagagttatgtttttgtaaattgtatgtaatgaaaagactcaaagaatcatatatacctttctccatccataactgggtcattgaataaacaatcacgtgaaggcctccctggatatcttgctctgaggactgatccatcaggaagtacaagcctcttcagtacctcaaaatcatgatgacccggtttatcactgttaccaacaaagtaataatgagaagccaaaatattttttgaggaattgcaaagggaaatatatgcattgtaatgttaagctacctaacatagactccacaacctcccacagctctagcagcagcatgaaactcagctgcttcatggagactctgaaagttttaatgtaaattagttccttcggcatttggaaaaaacagaaaaatcataacagtacagctcaacggtaggaaagtaagttcatacatagaacatatcccaatctggtacaacaacttcaccaagaaatatgctattgtatgatacagcagctatgtgtaatgtctgcgtggaaggatttttcgggtagtaatcatctgatgctcttgttatggcacttacttttgagctgcaacagaagaatagtagaaaaagtcaccacacagttgggggaagattaatgtattataacatgctcatatattttggttcaaacaagcacaaggaatatatactggtaaatggagtcagtgcttagacccatgcagcagattatgctgttgtcttgaaaattgcttgatatggacttctcaagtgcctgttggaactgcttagtaagagagactcggccaccagagccagttgaaatggtttccaatatgttctgaacatcaacctttactccatccacaccttgtgaaacaagatatttgtgtagatcatcaagaaactggtgtgctttatcagcatcaattgcgccaactccatatttctccatgcaatccattgctaaatccctcatgtttgctaaattcccaggtgactgcactgggtatcttagctctgggttatactttttagttccaggaacatctggaacaagtcctccccagtaccccattaaagcatgccacacaaaaacatacctaagaattttgaaaagctaagatgaattattctgaagaagaatatatttttttgttctttcaatacaaacttatggaaaccttacttaagtccataagtattcttaatttctgaaacaaaactcttgagatcacttggtgcatcactttgagcatcattgcttgctcttctaaacttattgttttcattgatgctgagcaatctcccaccaaatctgcaaatttgagagaatttgaatgaaggggttctccatgtgcttctaaatatgacaatgaaacaaatgtacagaacttactgcgacccttcaacaaatggttctccttctttttggaactcatttgacacatcttgccacccgtcatcgattatgataaactttgctggagtgcctccctcagacaaactgtgtttgtatgacttgcaggtgagatagctctcattgaaaataatttctaaaagaagtgtggatatatgaatgaaatcaaatgaaacttcatttaccttttaagtccctctctaattccttgaggattaacatcttggtagaaggcatcccatgtacaccaaccaaaacaatctaacattccaggcatctatgcataattaacaaataaaaacattatgaacacaaatgttgatgaccaaaataatgaggcctctagatgtaatcagatttgcttagttattacctgtttggattctctgtgtgtaaaggtccctttatacttctccaaaatcctacatatttcaaagcacgcataagcatcaatgaattagtgaactagctaaccagatattcattacattcaattccagagaagcaacagttttgggctgcttgaacatttctactataaacttgaaaactggaaatttgctccgagagttctacctacttcatagattcttttattaaatcaaatgggtggtttccagaattcacaaaaactgctcttagagattgtgatgtaactatggatggatcacctatcaaaacacacacaaagaagctatgttattatattgtagaaatgagataagtgccttaagagtagtggtaagtattggtaacagaaatagaagaaagaatatagtggaaaagaatatcattaccactttcaacacaaaactcaagctcatttgatgaatttccctgtaagctgctcctgaattcaccatctattattggcaagaatacaacataagaagtctcatctgaatcttgtcctttaccaacttccagcagcaacatctgagtttcaacaggaatatcccttcctgaattaccaactcgcggtatcatccaccatagcttaaatcgaaaaagagatagaaacctgacatccctgcatgatgaagaatgtatactatatgttgaaatttctgtaaaatcatgactcattataaacaccagggcaacttagctaacaattaaaacacatattgttcatgaaaaaattggatgataccaagagaacaaagctgtatgactttacagaagtgagccaaagtattagacttcggtaataccatctttattagaaattaaggaaaaaagaaaacaaacaa

SEQ ID NO: 17000 - DNA, 9786 bp, Cannabis sativa
  modified_base (162)..(178): a, c, t, g, unknown or other
  modified_base (756)..(766): a, c, t, g, unknown or other
  modified_base (3510)..(3514): a, c, t, g, unknown or other
ttggtgatactctactacagaaagtatacaagggttagagatttgagcggaaggagttatttaattctgctgcacccaatgtaaagtttctcaaactttatatgtgtttaatatacattgttttaaaaaatttcatattttggatgttaaataacatacatnnnnnnnnnnnnnnnnnctggtaaaacatattccaacatgatgatgatggtgagccaaatgaacagtatcaagaagcatctccaccaccaccagctaaggctccagtaaggagatccacaagagagcgtaaaccaactttaagatacaatcctcatgagtatgtaatgctcactgatgagggagagctcgaaacttaccaaaaagccattctacatgagcataagaatgagtgggagggatccattcaagaagagatgagatccttgcatgagactaagacacacgacttggtgaagttgcctaaaggaaagaaaactctcaagaacaattgggtttacatgcataagactgaaaataatggctcacaacggtacaaggcacgattggttgtgaaaaaattcagccaaaagaaaggtattgactttgaaaaaatattttctcctgttatggaaatgtcatatattaaagttgttcttggtttagttgctcacttgactttagaagtagagcaacttgatgtgaaaattacatttcttcatggtgacttggaagaagaaatttacatggaacaaccagagggtttcaaagtcaagnnnnnnnnnnntcttgtgtgcaagcttagaaaaaacttatatggactcaaacaggcacctagacagtggtacaagaagtttgattccttcatgttgagccatggatataccaaaactacttctgatcattgtgtgtttacaaaaatgtctttgatgatgatttcatcattctcttgtcatatgttgttgatatgttgattgttggccatgattttagaaagattgaaaagctaaaggaagaattgagcaattcttttgctatgaaaaacttaggattgacaaaacagatacttggaatgagaatttctagtgacaggaagaatgggaaactttggttatctcaagaagcttatgttgaaaaagttcttaaaagatttaaaatgagtaaagctaaagcagtcagttctccacttgcaggctatttcaagctaagctccaaacattgtcctacaagtgagagggataaacgtgatatggcttcaataccttactcatctgcagtaggtagtttgatgtatgcaatggtctgtacagggccagatattgctcatgcagttggagttcttagacgattcctactatcctggtaaggattattaggaagcagcgaaatagatattgagatatctacgaggtacttccaggttgtgcttatgctttcgttgtggtgaacctatgcttgatgggtatatagatgcatacatggctggtgattatgattccagaaaatccacttcaggattcttgatgacattggtagggggagttatttcatgacaaacaaggttacagaaatgtattgttttgtctactacagaagttgaatacatagttgtaactgaagcttgtaaagaagctttatggatgaaaaagtttctacaagaattgggcttgcagaaagaaagatacattgtctactatgatagtcaaagtgccattcacttctctaagaattcaacattccattcaagatccaagcatattgatgttagatcactggatttgtgatgtgcctgagatgaaagaattgcacttagaaaggtgcatacgagtgagaatggttctgatatttgacaaagactctgcctaaagagaagcttaaagcttgtaggcgaagatcgggcttggtagagcccaccaactaaggcggatggggagatttattgggtctgccacttgttgttgggcttggattaataaaggataaagcccatttaaatgaaacaattaagagaaaaaaataaaggggccgggtgatggttgtgtcatggagaacaagctcaaccagcagaaagagaaagaaacaaaaagagagggaaataagagaaagaaagctagagagagaaagaggttttgtcactttactttgaagatcaagtggttaattctcatctattttagctcaaattttgggtagtgaatccttgcaaggtgctctaccaatctatcggttccgatttagtgattgtcctctctaaggtgctcttctacaatactcacttagtgagactcaaactttttttatttgtgtatccatcttttgagatgatgatgatgatgattgtattggtggtccaagattgtctaatcttgatgttgttatgagcctctagtcttactagagaagaactttgtaatctcattattgaactttagtgatagtggatgatttaagctgactacaatctcgtagttttttcttgcattgagtgtctaggtaaaaatcttgatgtctcacttttatgtttgatttttgtattttatattgcttgtggtgctttagttgatatttgatattgtttattgtagtgtttgataagtatcccatttataacatacaaagaagaaaaatattataattaattggaataagtttttccaacaatttttttaaggggagattgcacgtctccatgtttaatgtttaagttaaactaattaacataataaaaatattaaaatattatatacatataaaagaaaaaaaatgtacttcatatttaataatgagtcccataaataattctatttagtttattattttttttcctattagatatttagttttgttttctttgtagttatgcttttaccttgtttttttttttttcaaaaaaacaaagaaataaaaagtgaatgaatattcatatggccgaataactatgtttggtgggtggtaaatagaatgaaataactattattttcagtttttgaaaataagaaaggagtaacaattattcatattacattttatttttatttgtattctagaaagggaaaaaatgggaatagataagggaaagaagtgagaagaggagaggtgatgggttaggtggagtgggcttttcaaagggtccattgcggtcggggctagaaaaggaggtgggggcctttgataggctggccattattgaggggaaggagaccccattggcgccagaaggtaaagctaagccaacctcaaaaaagtgtggtgtctcataaaatcaacaaaatatgtggacccttcatgtctctggctgtggtcctttcctttctacatttttttttcctttgattgagaatattgaagagaaacaatagttacttactttagttttgcacacgagtcgacagtcacttcttatgtataaaatatatataagatttttttccctccgaactttgatatgtaccaaatcatgccttcttaaattgttttggcggttaagaattcccgctaaactattgagtttgttagatttaaggacttttnnnnnatttcattcaattttactgtttccgtgattgtttatgtacaaaactatactctcagactttgatatctaccaaattatgcccctcaatttttgatatgtaatgaatgatggccctttaattttcatccatgttacaatttttttactaaaattagacaaaagtctttaaatctaataatttcaatagttcaaggggaatttttaacggcaaaaaaaattaaagagctacatgtcaaaattcggagaaaaaaaaatcctaattagtcaaatatgtattccaagtaaaaaacacactatcattttgtataaaccgaccgttgagtgtcggtgctacaccaactttatatatatatatatatatataatttctttaactctttttcttaattaactggaaaaccagggcacaatagagtggtttcgattttgatcaatgtattactgtttttgtttattttaccactttaattatcattttggtttgcaaacgatcaagatcaaacaccttttactttgagtgtacagacaactaatgtttctttccatatcaactttgagattttttcttctgataagaattgatggacgtggctatcttaatcacgttaaactttatatttttcacttacactttcacctttcactcttcttaattattattagtaatatatattataattaacatgtaatgttacatattttctatagttatattatatgtaacattttatacgaaaatatatataattatgtatagatggtaatgaattcgttatgtatatacaagtgtaagcttttgctcgatacgatttaagcatgtgtaattgtaactggtatatacgacatagtttgaaaacaatattataaactatatatgtttgttcatataaatctaatattgggtagattacataactgtagacaagaattaagtttcgaggcagaaaacatgaacttttgaaattggtttacattcatgattatgtttgtgactttgtcgtctccacgtgaaagatttatgaaaaatttgctaacataaggcattacatacgctacctccatatgatcacacctatttattcttgcattatgtatattctcatttttattttatttttttgtatattctcatttacttatatacatattattctaaaaaaaaacacttttgcaatactataaaataaattttttagtcttctttaataattaatcttaacataattatcaaaataacaattattttgtaacctgtttgttaagcaaaataatgaagactaactattcattttatgtgaatttattttattagaataactataattattagaagactttttttttatcagctaattaggtacgataattcattaagatataaaaaaacaaatatttaaatttagtctaatcacaataattgaatacccatttgcttcacatccatttctgccctttagccttatttaggggtgttcatcaaactatttgtatcgcacaaattactggcattgcatagaaaatatagtttaaaattatttgtggtgcagttatgatttgtattttttaccaaactgcgcggtgcagtttgtgattttaaatttaataattcaaattcaaattgcactgcactatacattacaaaattgttaaattttacgatatatttttttttatatataagaacaaatatatgtaatatatgtgtatattatattatttttttagagacaattaatataatgacttgatgattagcttatacggtattatattaaaactttaataatattttttttattaaaactttattatatagattgatttttaaattttcattataatatttgataattaatgatcataatataaaccgctcaaataacattgtatttttgctgtgtgacttttgcggttttaaaatctcggttgctgtttaataaattataaaaacttcatatatgcagtttgattttataaaaaaaaaaagtacaacccgcaccacacattgcaaacactcctatttagaggtcgttttgtgagtactatatatgtagtgtaaaacttattaacatttataagtaaatatattaaaaaggaaatttattttaatttggatgtgaattatagagcacaaatgggacataataaattatatgtaaaatgtttaatagcattaataataattgatggttattgtccgtagttgaaattaactatctttgatgagttactatatatatatatatgtagtacgaggacgtagtaagattatatcgaggtcgatcgaatttattaattaatatcatttgattaattattatttagccaaatattctaataaagttaagttatataataaatcaacatacaataaagaaataaatgaggtgaaaagaaaaatgtttttttattaactagctaggcaaatttattatatatagtagttgtcacaagttaaacaattcttgccaacttttctctttttccttttatttgatatgttcttctagacaggaagcaggtcataaggctatacctttggcttggattctttctttacctcccacactacttgacttgtatatattttaattcaattataaattatttcaacttaataagaataaaaaaaaaaataaagtcaaacttctgtattttgctttcatacatatcttagtaataataaatattaggatatcactctcgataattctaagcctcacattctttttttctttgttttaaaagacacacacaagaggggtttatggtatatatataaatgaatggtatctaagatattgatctatagtgattgctttttctcaaagcgaaatccccaaacaagggaggccaaaagaaaaaccaataaatcattattgttattgcccttatctaaggaactccctaaatacaaggcaatggctcatggatgctgccccatacccacatgtaataataattaataatagtaataataataataataataattaaacgttctccaactttaggtcaagcaagtgtatagtagtatttttattattaaagcccttattcctctctaaagtagtgtatagctaattaaagcccatcccatactttgcccatcaacgacatccccatgtggacccaactccacatggggtgcacacccacctgatctcagtgccttggatctaacggtccatgttggttttcgaagggaatctaatggactcaatcttccaagtcttcaatatgggcggccaaaagcctttgtcccactcttgtccccatggtacaaggacaactaccctaactctgctcttttatggaacaacaaacaccattagctgctatgctataatatgtgtccaaattcatgcatatccttatatatatatactttgtcataattaaattgcatccaatctaatttctctccccctctctctcttcatcactctcttttttttaaagcgtggcttcaacttcccataccaaattctattgacctttatttatttattaattttttactttgtgttattacataggagttatactattttggaaaaatacctttgttatttatcttgaaactaatttgataaggttaatgcagtttttcattaacttatgttagaatttaggaataaaatgaatgaggtttcatttcaaaatcaattgataatgggataggagtagctcattgatcatcttatatatcacaatttatttctacatattaacaatgtgggactaactctaatacaccctactcacataacatttgaaagaatcccagaaggccaaatatcaaaaaatttgtgagtgtacaggtcaaaaaatttataaattttgaaacaggtcaaagactccaacattaaaaattagcaacacattggccgaaaggttccaaaatagaggttaaagggaacacagcggaagtatctttttagactagtagtactttcgctcacaacggatcacactgacaccatgttagaatttgagaataagatgaatgaggttccatctcaaaacttattatatcataatttatttttcatatattaacaatataggactaactctaataacttatttaagaatatcgtaaaaaaaaataaagaatagactcatatttaatgattgtccaaaataaattgatttaaataaaaaataaaataagacagaatatttttatagtaattcatcctctttgatacagcgacaatggactagttaaactagtatgttgttaatttacattatttattaaaaaaataaaggaaaatattttacctaatactttaacactttgtaaaattagttaaaatgtatacattttcattattgcttttgtaaatatatttttgacaaaaaaaattatgattatatattttcgattgaatattgtctaaaacatatatttataattttttgtcaaaaaaatataatgttttttaacataattatgtaaatatcccttatacaaagtattaactaaataaacataagctagttctataattatacattaaggcgttgcaataatataataaattgtaccacattatattattgtctatgtatagtaattgctacaaatattaaaaaagaaaacaaaatatatactaaaaagctaatgctggttaaagtggttaaatgtgtgaatgtgtgtgggtaggggatgggctctaagatagctttattttattacattttatttcacgcgcttatgagaggggtatagtattgttgctctattattaattttgtattattttaattattattaattggtgttatcatcttctttctataaaataggtttcaaatatccattcatctccatcacttcaacacttttatttctctctctctctcaaccattctatagcaacacagctggagtttacagagttatatgacagtcggagaatttcaactacacatccaagattttgtaacatagaaaaataaaaagacatggccatgtttgaaagaggagatgatgaactcaacctaaaccttgaggcaacagagcttaggctaggattaccaggctgtgatagtactactacagcaacttctactactcaagagtactctgagaacagcacaaatactacaaaaggcaacaacaagagagctttgccttctgatgaaacattcaaatctaactcttcatcagaaaccaaatctttcggtcaagaaaacccttcacccaccaagtaagaaaatattctaatactatttcacatgattgtcttcttcttttttaagagaggattttattaagttatagtataattgaccaattgatattatacgttacaggacacaagtagtgggatggcctccagtgagatcttaccgtaaaaactgcttacagtcaatgaaaaaagtagaggagagtggagtatacgtgaaagtcagcatggatggagctccttaccttagaaaaatggacttgaagctctacaaagggtacccagaactccttaaggccttggaagacatgtttaagtttaaagttggtgactttaacgagagagaaggctacaatggctctgaattcgtccctacttatgaagacaaagatggagattggatgttggttggagatgttccttgggagtaagtgttttaattttttttattatcattattttatgcgttgtgtgtgtatatatatttgattttgttattattattatgaaaaaaatagctaatttggttctttaatttctttttttttacagaatgtttacctcttcatgcaaaaggctgagaatcatgaaagggtcagaagctagaggcttgggttgttctgtttgatgaaatataatacatattgtcatatatatattatatatatatattttgtatgcacacctacttacgtgtccagacttgactgggatctcatgttgaagaggaaattatataaggctccatcttcatgaaagcttgggctctccgtgcagatcgaagactaattaattaatttcaaatcttgattattattattatgtgtaattttgatcatcaaaaggaatattttacatgcatattcctacaaaaggaagaaaaaaaaaagttgaaatgcgaagaagtaattgtcgcttgtatatattttgttaaatcatatatatgtgttcgatcttcgaaagcaattactgtacagataaaaagatgaaatgagttaaaactgaaatggaaattaaaggagaaaaaaaaaaaaaaaaaaaattcgactttggtttctcccagatgtattg

SEQ ID NO: 17001 - DNA, 2412 bp, Cannabis sativa
tctctctctctctgttcttgttccaacgcaggtattttgctctccgatgcataatagttattttttattttatattatttcgaagctaataatgtcaatgtgtgtttttctctttcgtttatttaatcattttcatgggttattgaagcagaagcgggtttgagaagaacgaaaatgttgacatgcatagctcgtccgaagaaactcggagatgaatcgctgagtcaacctgaggaaaccgattccactaacatccccaacaataaacagcaagccgcgatcaaatcaatcacatctcaggtatgtattactgctgccatttttgggtttcaaacgaagtatgaactgtgtgtgtgagtatgatcctgttttattatttatttatatttttgggggaattttcagctcaaggatatggcgttgaaggcttcgggagcttacaggcactgcaatccgtgtactggaccggcgacagtccaaggccgagttagaaacaacgtggaatcggatgccgactcggaccggttccgatggtcataccggcggacggggagttcgagctcgacgacgcccaagacttgggggaaggaaatggagttgaggcttaaagggatctcaagttcgagtggcgaagggacgccgaattcggccagtggacggagagtggagccgccgatcgtgttcgtcgaggagagcgagcccaaggaatgggtagcccaggtggagcctggtgttctcatcacctttgtttctcttccgcgtggcgggaacgatctgaagcgaatacggttcaggtgtgcccttctctcctattttttttttctttttaatttatttttttttagccgcaatcgacggacaatattttatcatgcgtcatcatgtgtttccgacattttgatccgacggtgatcgtgactttctttggaaaaagtcacgctttgcttgacatcactatatgcccaaaaaagaaatgaaaaatcttagtataaaacggtaacagttaaattattcggtggtttttcttttttttttttttttttatatagaaaatatatttggtggttggtatacagtacttatatattttagatagggagtgtttggatgctttttctttatggctcattaaactttcccaaattgcttgctggaaatggattacatttaaaaatattttctagcttttttaataaaattgtatagtgtatatgtgtttattagtcatttgggtttgacccgggtggaaccaacaaaactctaatcaatgattgaaaatttaatcataatgtttttatttatttatattcaaggaaataatgcttgaatttatgatatgataagaggagcatccaaacactaccttaagaccatccatattcgtagcttcgtacgaagaattttcctttaggtgaagagagggccctacttaacacagtaattctcacgcctcctcatcaaaagcaaacccataacaaaaaattataaaactaaaagaaaaataaagtccaaaaaggaaaactcattgtgacaaatgaagtagtggtggggcagttttgattgcattggtgggctttttcactgagtattgtcgaaatgtcgggagaagggtcttccctttcttttcaattcccttcacgcctgcctgattctccgtggccttgtcttcttatatgaccattcaactttatctattaacctgtgtagacaaagccagtaaatactgccatgccaaaactataaagaagacaaaatgttaaacgttcaaaatctttgtgttggcctacaaaattgaggcaaggcttacgaaaactcttagtcatgactcatggacttgtgatggacctcttgtttcttttactgtaggggacagtagcaaagtgagcattaatttttccttagtgattttttcgacatatatgacttgttgttcaagtccaaccaatgaaagctttgttgttgcgtcttagataatttgcttctctgtctctatcactttccacttggactctgagtagacactccttcaaattatctcggctatttctccttttctattcgtttcgtgtttacattttgttggttggtcttgtaaattaaaaagggtttattactgttggaccccaccttaacttgatgactattctatagcaccgctagttaagtcaaatttgtagcctcttttattatcatcaccactttattccatgcacctactggtaggtttttgcttttttatttttttctctttcatttttaatgatcattattgtttttggtcaaaaaggaatgcgagcttaagttagtgctttgagtgcgattaagttagtggcctaacacaataaagaacaatgaacttctactgaatcatataatgatattataggaggtgttttagtaagctcatgtaaa

SEQ ID NO: 17002 - DNA, 6893 bp, Cannabis sativa
aaaaaaaaaaaaaaaaacatggttttgttgacagttttttatttttcagtaaagtaattgagattagaaattatggttattttattacattttaaactattgtataatagtgttattaatttagctgtttcctaaggtgactttatgatgctactgtactatattcaaactaaactaaattattattttaatattgtaataattttcatcttgtgccctcggttatgagaattggtctatttttcatatattatgatttttctttgcaggagtatggatttagaattggaattttataccttgttttgtccgtttgccgttagatctggcttaattgcttaaaaactctttacccttttaaattattgatttaatttttatcagttttgtaaatttaatatatatttttctgtcctgatcctcaatttgctaattcttacttccttgtccttattttcagccgaccacgtcacgttgtaacaaaatgctttttaagttttgttttattttcttttcctccaacaagttagtacccagataagattgaaataatgttttaagcagtacatttataaatatacatatataatattatatccttcttcgtcaaattgtatggtccggaccagctagcaaattagtattttttttttctgacagtttcacaatattgatactacctaaacaagaataaaattataccatgccatatgctgaaacagtattatataatatatatattgttaaccaatcaatttctaagtccttcaattgaagaatttttttagtcgtccatatttgcaaaagtaagctacatgtttagatttgtaattcatgattatcacatctgaaatttatgtatattacttatttcaacttccactaataaaaatgctttaccctatttaatatgttgcttgcttggcttgacttgatttgactaggagatcctcaatgaacttcaaatgattcaatttgacacgtgttttccatattattacaaatttcattaattatgcaaaaatctcaatttcttttatttctaaaagttgaattttaacagttccttgttcaagttcggcagaaatgtaatattgtcttttcttttttgcttaaacaattgcagccaatatggaccgaaggggaaaggtctactgaactattcaaccaaactagtagcagcaagtccaagtccaagactttaccattttaccctcaaagagtctctcctcaaatattttcagatcaaaaatcttcttggaaattttcaacgtcacccaaaacaaactcctactccgaacttgagtcttcattggacgatattcgggtagaatcttcttccgaagaatctgaagcagagactgaggtggtaataataataataataataatggataccaacgaaaaaaaagctttcaactttggtctgatttacctatgttaattacttcttgtaatataataataatagtttttcttgtgtttgttgcgcctttttaggaaagaaacagaaacatggccttgtttgagtccagacagagtcaaacccagaaaccagagcaacccggtttggcagaatcaagttggtacgcaataacatatatttatatgtatatattaaataattaaacaccagacaagacaaatatgtaacattgtaataacacttggacttttttaattgtcctttttacgatcagttctccagataatgttataggaaaacaaacacctccaaaggactttgtgtgtcccataactagcaatgtcttcaatgatccggtgacccttgagactggtcagacttacgagcgccgagctatccaagaatggctcgatagaggaaacgacacctgcccaattacgcgccaggagctgcaaaacacacagttgcctaaaacaaactatgtcttaaaaaggctcattgggagctggcaagagctcaatcctgatttagtggctgcagtaaaccattctgaaaatttatgcataggaattgaccaagttgtgaattccaactcagatatgatgccttccaattcacccaacagtgtcataagccaagccaccattgaagggactgttagtgagctgagacatgccatttccaatctctgcacctctgagattctcaaggagtctgagactgcagtgcttcgaatcgagcggttctggcaggaagcaaatatggaacatgatattcagattatgctatcaaagcctcctgttgtaaatggatttgttgagatacttttcaattctgttgattctaaggtacttagagcaacaatttttcttctgtctgagttgggatcaagagacaaagctgtgatccagacgcttactcaggttgattctgatgtggaatgcattgctgctctgcttagaaaggggttgactgaagctattgtgttaatatatttgctaagaacatcaattcttgacttgacaaagttggacttggtggactcactcttaatggccataaataataaagagagggatttgtttaatatgtgtgtgaagccaaaaacagctgcagtgattttgttgggacaggtttttgagagctgtgatgagaccacagctgcttctgttgttaattccatggtttctggaaaggagattgaaagtgttgttgattgtttgggggccgaatcctcggaagagaggattgctactgttggaattcttgtcaagtgtatgcaggtagatgggaagtgcaggaacattattgctgataaggctgagttggctcctgttttggaaagcttaatgggtccaaatgatggagaacggttcgagatgattaactttttatcagaattagtcaaattaaacaggtaacatctcttaaatcttaaagatctcttccatgaatcttttggagttgagttgagcatgcctggtaaacttttgatttttctttgattcagaagaacattcaatgaccaaatccttcacattataaaggatgaagggcctctcagtacaatgcatgcccttcttgtttatcttcagacagctcctgatgatcaatgtccaacagttgctggtctccttctccagctagaccttctggtttgaaattcttctactttctgctttactattaatctgtgttatcctactggtgatcctcaattgacattgttgtctttttgtctgtagacggagccaagaaagatgagcatttaccgcgaagaggcgatagatactctcatatcttgcctcagaaatacagaattccctggtgtccaattagctgctgctgaaacaattatgtcactacaagggagtttcaccacttcagggaagtctcttacaagagctacccttctcaaacgcgctggcctagacaaaagctataataatcttgtgagaattgaccaactaagcagtttctcagcagaagctgaagagagccttgtgagcatcctaaaatactgtgttttgcattattcgtccttttcttaattttcatttcatcctttttcttatctaatttcattgtttcaattatagaaggaagaagaaaaggcagctgaaaattgggaaaggaaaatggcttctgttctggtgagccatgagtttggtctactctttgaggctttatctgaaggcttaagaagcacagattcagaactatgttcaacatgcttcatatcagctacatggcttgtagacatgctcaaaactcttccagatacaggagtacgaggagcagcacgagtctgcttgctgaaacggttcgcttccatattcaagtcctccagaaatactgaagagaaaatcctttctttgcttgcactcagcagcttcatccaggaacctggtgagtgaaaatcattagaagaagtagtcttagaattatctagacagattcagaaagtgtcagccagattgagtttgtctttctctgtgaggatcattttaggtggcggatttggacatcttttactcattttatatcttcttggggcattaaagtaagacttaattctgagattccagttacttagctactgtttattgtgaatttcagaggggctacatgagttaacttcctatttaaaagacatatttaaaggtctgagagtgctgaggaaatccactcccttagcacttgaaatgctgaaaatggtgtttgaaggccaagactcaagtgctgtaagttctgttctgttatatgtttcttctgtatcttgcatggaaaagatgatagtgctttgactaaacactgtttgtgcatgaccacaggacttgtggagtcataaacaattagttcaagtagattgcagcgagaatggagaggttctatctttagtttctttcaaagacaaaatcttttcaggccattcagatggcacaataaaggtatcttatatgtttcattatcttaatcttaattgtaaagctctaattagatgtgtattgtatggagtctgatgatattacctgttactcaattctgaaggtgtggaccggtaaaggtagcattcttcatctgatccaggaaattcgagaacatacaaaggcggttacaagcctaactattttgccagcagcagagaaactgtacagtggttcacttgataggacttcaagggtatgatttctaatactttctccaataccatgtaaagccatacctcctttttcatactgaatcattcccttcttttctggagaacaggtctggtctatttccgacaaagcaatacattgtatacaagtacatgatatgaaggatcaagttctcagtttagtcatttccaatacagtttattgctttattccacatggttctggtgtcaaggtacttaacaacacagggttcagttttgaaacaatacatataagctgaatcaagtttgtttatgatttgacaaactcaataatccaatgtatgggaaatgaacttatatactttgcttgtgtttgtttaacttaggttcattccgggaatggatcatccaaattgttgaatggaagcaaacatgtgaagtgcttggctttagtgcagggaaaattatactgtggatgccaagataatagcattcaagtatgcctcttttgtgtttttaattattagtttgagcttggttccaatccaactagacttgtttctttcccattctgataaccaaaaaattttgcaaactttttcaggagattgatttggccacagaaacagtcggtaccattcaaattggttctaggaaattgcttggcaaagcaagccctgttcatgccttgcaaatatatggtgaacatatatatgctgcttctacttccttggatggaacagttgtcaaggtaccttataatattattacatttaattaggattttttttctccgaactttcacatataccaaatcgtatatcctaacttttcaagccataaaaattctccaaaactattaaaattgttagatttatggactttcatccaatttcgtcaattttactaacaagtcactaatgtgacaattgtctatgtaccaaattgtgtctcctaaagtttgatacatactaaatcgtgtctttgaactttgatatgtatctaatcgtgtgtctcgaatttctgtccacgttaagcatccattagtaaaattgaacaaaagttctttatcgaaagatttcaattggtcgagaaaaacttttaacgaccgaaaaatttggggacattacttgatagttatcaaattttagggagaacaaatttgcgtattattattattattatgaacttttttttttctttgatgagactataaatccaaattttcgtatgaggattactaataatttgtatctgaattaatgtatttttgatgagggaagatcttaagcacatcagactacaatatagttggatcattggttactacattggaagtaagagtgatggccataagctcagaactaatttatttgggatgcaaaaaaggaagtgtggaaatttggaatagggagaagttgaacagaatagacacactacaaactggttcaaattgcagagttctttgcatggctcttgattctactgaagaagtcttggtgtttggtacttccgacggtcaaattcaggtaaattttatgaatcatatcctcaacactacatgttatgatgatgatgattgcttttccacttgtacagattttcaaaaaagaaataaaaaaaatactaatttgcctctcttcaaaattaaataaagaacaaatgattgaagagactccatattattgtttctttctttggaaataaaaatcaatttttatattttatattttctttacttttgttggtttgcaggcatggggattaagctagctaaaaatagaggatgttgcaaattttggataaaaagtcatcattttttcttgtagagttgataaagatatgatattcatttgattatttatttgtttgagaacaactagtgaaaatgtaaatagcatatacaaattacaaagtaccaaagaataacgtactttatgcatcgtatataccaagtacaacttaagtacaacataagcctatagaaaacacatcacagatcaattatcattcctatttttctgtcttctccttccttaaataagggtcagtgcagttagatttttcaatattaataaaataaattaatgtcttaaaattattgtatctttcagatttgcttgattagtcaagaggtacataacattgattctgaaatggtaaccattttaattagaacaatgcaaaagtggtacaaaagtgtttttaatttcatactaaatttttaaattttctcctatgcgcacatgatgtcaaatgtactaaatgccattactattgttttttatcgtcaaatattattagcactaatctttacaataatta

SEQ ID NO: 17003 - DNA, 6770 bp, Cannabis sativa
tagttattgattttttgagcttcaattcaacatgaggtttggatcaacaaaaatagaaaaagaaattgattagtgtaggtaacaagcttctaagctctctctactctctttatggatttactgtatttcacacattagtaataaactcggggaccgagaatttatatttatacaagtgagatgtttcattaaagtctctatcacaattaatcatcagaatattttgataattaattaaaaaattaaactaaataattaacataacaatgatcatcaatttgtctataaataaaatattaatttaatatataaaatcaatccattataattaattaattatatatagtgtgaacaaaatattctaacacaaatatttctcattctattatcatgattaaaattttagaaactaccgtaacctgaattaagcaccagtggatgggcaataaagacagcttgtgaagggtatacattcccacccaagaattttgaaggaatttcgcagcaatatttcagtaagtacattttttagtagtttaataaattgtgttacttatagttacagatgacattagagaagacagaatgctttttttctcttggctgacaggaaatgtaaaatttagaatttaatcttccgatttggacattttcttctggtgcaattatatattttaacagttgcaatttttgtgtaccgatgattatctcattcgattcggatgcaaaagtcacagtaacatcttcacgttcctttcccagcttcccttaataaatccagtgtgtttctcgtataattacacaccagatatgggagttaagtttgcctaacaagaaagcaaagcataaaaagaaaaataagtatgtagcactatacgttaagtcagggggccaatgatgtcatcaataatgcctacattgtcagatttgtctcaatcatgattacattgattagggcaacatggattctgaattactgagccctctagaaaaaggccttagctcatgcattggcgttatttgggagtgtcgacacactgtctttcctctttttgatttatttgtaaatgtttgtttactatgatgccaatatatatgtttggttgcttctcacaatgttgtcagcggtttacagtccctttcttaccgtaacccatatattttttgtttttgcaagttttttggacacgaaaaatgcagagctacatgatttgaattttatgatgctatctacgcgatgaatttgtggtttgtatcatcttaaaacatgttttttcaatactacttgcgccgcaactcttccttttattttatttattttgttccttttaaatgtgtttaattttcttttttttctatatatgtgatatgctctgcttaaggatatacattatacacatgtgacgcggcttcttggccaatttcaatacaatccaaacccaatgtttttgaatctatctgtatttcattcgctggcaacaaaactttgaagtgacgtacttatattgtttgatctgataatgtatatataattcaaataacgtgtggagactggagactggacacacacaattattacatgaaacattttgctaattttttaacacataatcatacatactatacattcaataatattacattcttgtgtaaattaataaaatacatactttatacctacgtagccaacttgccagtagtaaaaacaaaaaagaaaatatggatacatttttctgttctctccctccttttccttaaaactatgtatgttatgttcaatctcatcaacccatattttaatcgtaattctaccagcaaattcaactcaatatataacaaattagattatacattaattaattttcttgaggacaaaatttgtttttttattttatgttgtgaaattattattattaattaaaaattcacacaacttgaacggcggtgtgacgcagagcagtcatgggcatagcctccaagagatcaaaggtcaacatagaggccttgggcttggtagggcggtcggagtagctaaccggcaacggcgccggcgtggacctctcacactttccgagccacttggcttgcatatacttgtacttccgccatggacctaagtgcatattcttctccttcatgcacttcttagccgcagagcacagaatcttaatcacgctccctaatctctctgttttccccacgaaaacctccggtaatcgactaattaatcgattgtaatcttcgctagccctagccatctcaaactctgctctgaaatttagctctataaccactctcatctcacctctcttcgaactcgatctgtctacaacttccaagtaagtatgttcccctgaataaaagaagaattcgattttttgtttagccaattgaagtaaattcaaatcgttgttatataacgatgaaattgaattttgaattttgtgtttttttacctgcagggatactagatgagcttctccacttagatttacaaatcgaacaatcgtatccgagatttatgagccggttacagacctctcttcgcaaacaattccggcaaactcctcctcccaccgtcgatctcccgcacgcacactgtgagattatcgtctctttcattgcttctttcgtagcttgacgtatcttcgattcgattgaattggttctacaaattgttgtctgtagaaacgaattacgaatacgatttcaacaaacaatatttccaaaagaacaaaaaaaaaaattaatgaaattgaaaaattctcttcacacctgaagaagattaatttgttcttcccaatacgccttattctcttcgacatcgcaaccatcttcctcatcaccgtagtcacaatcgtcgctggagctgaacctactttccggcgactcgtcagcgtgttcctctagaaatccgaagaccatgtcgctgagagagctcgccggagctacggcactaaagtcaataatgtcgttatatctccgacgaagagatgcgtttccggccatgattggagtggtctgagctagaattggaaggagcacgtggattgggattttggaatgtggagcaagacccgattcggggagcgaatttatagtcagaattattggagacaagtaccaaagattgggacccacgcgcgagcaagctggtcacatacgagacgccgcgaatatcagtatctgttggttgcttacgtggcacgtttctgtgtggttaagtagatcagacagccaagctccacgtcactctgactaataattcggtgcttcacattttgtttggatatactcgaatatccataattactatttttcgaatgtaaattatgtactaggaatatacgttttttattgcttttttcttcctttttaccttcaatggttattaattatcatatagaatgattgactaataaaagaaataataaaacaaataaccgtaatcgtaaatatagctttcaacgttattgttatagaaaagagaaaatataatcatttacataatatatgtctataacttgaataaattttccaataatatttttattaaatgatgttaaaactaacacggcaattagtttattgttatagaatgtaacgtaggaaaacgtagattgttcatgtgcttttcttttcttctttgaattagttagttttgtcattttagagcatgtgttgagtacttaatcaaacaatttagtttcgcttatagatgatatatttagttatttataaacattatgtataacaacgcctatttttgacttgaaaagaggggttcaaagttcaaacccaataaatgattattgatgatatcttaatctgttatttaaaattaattaaatagtgttagaaatgcactactaataataaatagtattatttctaattatctacaaataattaaatagtattaaaagcattaaaagtatgtccataataatattaattttgtatatggaaatatcaatgattaaagattatataattggctgggtgagaggtttatcctaataatatgtggaaaaattcatggggaccacagagatgaaataaaggggcagctggcagtaatataaatggcaaaagggaaaagggacgatttattattagtttaattaaatatctaattttaatttaatataaaaaaatttagaaagtataattaattaatcacaaaataatatgtttagaagtattaagaccagtacccaatatgcgttttcgcctgagattgctgaagtggtgggcatgaaagaagtcttgagttggataaagaggatgaatgtaacagatgtggaagttgaaactgactcgttagtcactgttcaggctatcaatggatcagttcaaatgtcatctcagtttggtttgattgttcaagactgtcgcctcttgttatctgagttacaaaatgtttttatttcttttgttaaacgatctgcaaatagggttgctcattgcattgcaaggcaatcctgttttatgtcagattgtatgtttgatgaattttctgctccatcaaatttactttcaattgtaagggatgatattatttcaagttgaataaaatcttacccctttctcaaaaaaaaaaaaaaaagaccagtacccaataataatactcaattaataataatggaatggactcattcaacatcttcttcctatcaaaagtgggacccactgtctctctaaagccatattaagttttggcacattctatcattatgctaattaattaagagaacaaatggataattaagatagtatattctaacaaccactcaagcagaattggaataccatgtattgaatctgaaacaatggttatcttttaatattccaaagtacccccatacctactaataccatatatctctctcaactctcaaccattgatgttgtacaagatttttgtcactaaattaggtatcagctagcaataaggggatcttatcaagaagtgctaaatcaatatgctaatggtataaattagcattaaatattagtgaattgaacttgttctgtacaattacaatatttaagaaaaataaacacacacacaatcacacttttaattcctaacaacaatagttttcgctgaaccataacaacaatagttagtaataggtgtcctaatattaagaattatttaatattaaataaatattctttaatagtgttattcgttgtgtattattttcccaaacaaagatatgtgtctattctattttcccaaacaaatatcttttgacatatttttacaaatatcttttgacatatttttatactaaaaaaatttcaaatatcaatgtatctgactcgtagtaagatgtgttgttatcctaaatccgccatcaatgaaaggtaatttgtcattacaaatttggccgatttaacttttatgttaatttaagtcaatctatatagaattttgtaattatgaaaatcaaagtcaaaggagtttttaattataaaataaggtaaccagcatagtgtaatcaaaaaattaagaagttataaataggaaagttaaaatattttttaagtaaatataatttttgactatgtattttataaaaattattaattggattctttattttattaaataataatttgtactttttattttttaaaatagtacaaaatagtaccttaagtttaattttgtcaaattataacttaattataacttatcctagagatgttaagaccaaattgattatcaattttgtatatgttcatgctagagactagctttagattagttattaaaaaaatggattaaaattgaactcagagtattattttgtattattgaccgagattttcagcaactacctaatctcttaaatataaattataaatgtgtttaaagaatgtatttttttacgtggttggagcgttaacaagctttagtctacgagtcagttttattatatgttgaataaagttacaacaatggtgttttttacttttacagagatgatttgatagagttttcccccttagtttgtcaaattcaatcccttttacagtcgtacttatagaggaaatggatgggcttttttggagggggttggggctcgttccctacttccaactgtcctttgtatgggactttccttagcaccttttgtctggtatcaagtgatctcgggttgcagaggtggtggtcatcgtgtacacttggtcaggatgtcagggcttacaagtgtggtgtctccacttcttgtaccctctcagcaaggcatggttgtactccatttgcatgcacaccttgttctttgtatgcatgcctcgtccttccgatcctacctcagatgtattcgttctcaacacttgtaaaatttcactaagcatagttgtgtcatagagaagagcattcccaagtaacttaaggtgaatgctttgccgagtggctcaccatgcatgggggtcgagtgacatgcccatcatggtggccgagtgacattcctatcatggtggtcgagtgacattcccatcatggtggctgagtaacatttccatcatgatggccgagtgacattcccatcatggtggccgagtgacatgcccatcatggtggttgagtgacatgctcatcatggtggtcgagtggcttaccatgcatagcatgtataaccatacatttgcagtgatctttcaggtgcatgtttgttgatcttatagtgaaacgtcaccttatctcaggagttagccttgttaatttttggcatttgttgggttttatgccc

SEQ ID NO: 17004 - DNA, 6933 bp, Cannabis sativa
  modified_base (40)..(40): a, c, t, g, unknown or other
  modified_base (1161)..(1167): a, c, t, g, unknown or other
  modified_base (1557)..(1562): a, c, t, g, unknown or other
  modified_base (1913)..(1917): a, c, t, g, unknown or other
  modified_base (2081)..(2082): a, c, t, g, unknown or other
  modified_base (2287)..(2291): a, c, t, g, unknown or other
  modified_base (2723)..(2737): a, c, t, g, unknown or other
aagtttaattttaacgtacttaattacaatccttgtgggntcgacctcactcttggtgagtttattacttgtaacgatacgtgcacttgcgtgtgtgaaatatcacaacaatctctcaatgtatccaatagaaaagtgatgcacaacggtcttggctttgtccttgtgaaattccataattttttgagatgtgcagagtgagatttttagagaacactaacgagtgtaagagtaagataaaaacttgttaaaatttatcctgaaaagaagaatatttttaattttttgattaaggagtcatttcacccaaatttaacgtgaaactaatttttatattcaagtcttagtagtacgaattcattgtaactactgggtgccacattttataaaggggtgccactataagaaatgtgagattttttcactatttcgattaaaatgattattagtgttataaaactattttttctctaaatgtatcaaataaaaaagtgatgcacaaccgtcttggctttgtcctagtgaaattttacgatttttcgagaagtgtagggtgagattttaagagaaatctaacgagtgtaagagtaaggaaaaaacttgtttaaatttatcctgaaaaaagaatattttcaatttctgaatttcggggtcttttcaacaaaatttaacgcaaaaataatcttcatattctagtcttagtagtacgaattcattgtaactactaggaaaaatatttcgagatgggttcgggccacatttctcaaaggggtatcactatcagaaatgtgaaatttttactatttcgattaaaatgattataagtgcttgaaaactactttatctttcaatgtatccaatagaaaagtgatgcacaatgatcttggctttgtccttgtgaaatttcataacttttcgagatgtgttgggtgagattttaagagaacactaacgagagtaagagtaaagaaaaaacttgttaaaatgtaccttgaaaagatatttaaattttttgaattaggggtccattttaaccaaatttaatgcaaaactaatcttcatattcacatcttagtagtacgaactcattgtgactagtggtgtaaaatattctgagatggatccgagccaaatttcacaaaggggtactactatcagaannnnnnnattttcactatttctattaaaatgaatgttagtgcttgaaaaatactttttctcttaatttatccaatagaaaagtgatgcataacggtcttggcttcatccctgtgaaattttccaattttttgagatgtgtagggtgagattttaacagaacactaatgagtgtaatagtaaggaaaaaagttgttaatatgtaccctgaaaggaagaatattttcaatttctgaattagaggccattttaacaaaatttaatgcaaaaccaatctttatattcacgtctcagtagtacgattcattgtgactactggtaaaaaaaaattctgagatgggtccgggccacctttcacaaagggttaccactatctgaaatgtgagattttcactattnnnnnnaaaatgattgttagtgcttgaaaactaccttttctctcaatgtatcaaatagaaaattcatgcacaatgatcttggcttcgtcattatgaaatttcactatcttttgaagtgtgtatggtgagattttaagagaatactaacgcgtataatagtaaggaaaaaacttttcaaaatttaccctaaaaaatattttaaaattttaaaataaggggctattttaatcaaatttaatgcaaaacatatcttcatattcacgtactagcagtacaaatttaatgtgactagtgaaaaaaaatattctgagattggtccaagccaaatttctcaaaggggtaccactatcataaatnnnnnattttcactatttctattaaaatgattgtttagtgcttgaaaaatactttttatctcaatgtatccaatagataagtgatgcacaacggtcttggcttcatccctgtgaaatttcatgattttgtgtagggtgagattttaaaagaacactaacgagtgtaagnntaaggaaaaaacttgttaaaatgtaccctgaaaataagaatattttcaatttctatattagggggccatgttaacaaaatttaacgcaaaaccaatctttatattcacgtcttagtagtacaaattcattatgactactggtgaaaaatattctcagatgggttcgggccacatttcacaaaaagagtaccactatcagaaatgnnnnntttttactatttcgattaaaatgattattagtgcttgaaaactactttttctctcaatgtatccaatagaaaagtgatgcacaacggtcttggctttgtccttatgaaatttcatggttttttgagatgtgtagggtgagattttaagagaacactaacaagtgtaagagtaaaaaaaatatgttaaaatttaccctgaaaagaagaatatttttaaatttttaaatagggagccattttaacaaaatttaacacaaaattaatcttcatattcacgtcttagtggtacgatttcattgtgactaatgggaagaaatattctgagattggtccacaccatatttcacataggggtaccactatcagaaatgtaagattttcactatttcaattaaactgattgttaatgcttgaaaactactttttctctcnnnnnnnnnnnnnnnaaagtgatgcacaatggtcttggcatcgtctttatgaaattttacgattttttaagatgtgtagggtgagattttgagtatacactaactagtgtaagagtaaaacaaaaacttgttaaaattttcagtgaaaagaagaatatttttaatttttgaattaaggggccattttaaccaaatttacgctaaaccaatattcatattcacgtcttagtagtacaaatttattgtgacaagtggagaaatatattccgagacgggtccgtgccacatttctcaaaggggtaccgctataaaaaatgtgagattttcactattttgattaaaataattgttagtgcttgaaaactaccttttctatcgacgtgttcaatagaaaagtaatgcaccacggtcttggcttcgtgcctataaattttcatgatttttctaatgcttctattattgagacacaatttataagaaaattccattatgatactggatagtcaagaatattgagttggtaagctaacctgatgagacttgtctccagtttgccaagactaatcaggttctatttttccttactttcttttattttcggtatgttttaacttttgttttattcgtttattattatttttctaagaatcaatatcatgtcattttacattggctcactctctagtgttctcgtttcatgcatttcatgtatatatttttaaacaatgaggacattgtctgattttggttgggggtggtgagcatattcaagtatgtttcttaattttttgtcaaattaatattttaatggccaaatttttcagaatttactcatttattctcgtagaatattatttttaagccaattttcgctatctttgttacttaaaatttttctagagtataaaacgcacatgccaaaatttgtgataagatggttgttagcacatatttgcttaaaaaacttgccaagtttaagtgttcatcttttttatgagtcgcgagatttgagaaaataacttttaaatttttattgattcttaaaaatggttataattattttggacatgatactagggtttgattggatattgcttttcaatttctaactccatgagaaaatacgtaatcataaaaaaaattattttcaaaaacctatgaggctaatcgagttgggatttctacttggtacatttttcgaaagcgtctatgtgttataatttgcagttaaaaagttcaagtttcgtatacacactcgcaactcatgctttatttaaggtaattttgtatagttcttattggcttgttactaacatttttcttgaatatttgtgttatttttaaaatttttgacctaaaaatatcatgttgatattatttttattcgcttgaattgttagagactagcaataagctaattgggagttgtgattaaggcacaaagttgtacattttgtctttaattatggacataaaattaaattaattatatattttcatggtttacttgtttaattcaatttagctttacaacaactttttgattaccaaatagaaacataaatttaatgttttggtatttagttacagtccttgtaggacaatctcactcaagtgagtttatacttgcgaaacaatacatatacttttgacaacaacaaacactactattcaatttgattaagagtgaaagattgcataaaaaagaagttgagatatacagctatagaaatagtgagcaaagcacaacaaaaaacaaaagaaaaaaaatacatcaaaccatagaaaggaggcttgggtttcaaggatattgtcttgtggaatcattgtacaattgggaaacatgtttacgccaagacaatctttagctaaaattggtcaatgaagtctatcttaatcatcttaagaatcaggattagtgagattagctactattggaagaaagttattcaaacaaaagagaagtcaaaacttatgtttctctcaaattgagttccaagattttaatttttctattgctgctctctgaaaataatttaagaatttagaaatttggagttttgttgtgatatgagatagattttctatcccaaaaacagagttatcaattagttaactctgaaacaaagacttcctactacaagcacattttattgatttagagttattggtgtgtgtggaagttttactaagccctcacctatttagaacttgggaaaattacatttgtataccccttttaactaaactattttaatttttaccttcttttttttaatcattcatttacacccacatttataggtattgttccctttataccctttatttaggttaaatgaaaaaaatatattcaattacttcttctccagaaacacgatcactactcctctgctcctcttgtgtgcgatcaacgactttggccagtctgtggtgtacatctcaggtgtacaccaatattcaatcaccacactcatctcgtagaggaacggtggctcaactcagtctgccatgtcaatttttctggtatcctctccattgagcctcgacctagtttatttatgctatctgtagggtgtaggattgaggtttgaagaccccatagacatctgagttctttattatcttacattaatttattgttagtttatgttttgaatgaatttccattttttttttttttggcctgtttaattagcttgatttggatctcacatagttgtgatggttcatggtttatttctaaacaagctagtataatatttgattgttagattgttgatttatgttattttttttttctttttgagattttatttttttcattgttatctcatatgttgttctgttcttgtattatttaattggaaattgttgctagtattagggacctactaattagtgaatgatgtaatatgtattaacaatagttgtcttgtctaggataattagtgattggtctattttgggtgttaattgaaaattttagttggcttataagtctgtcacatgagctcttagtaatttcctatcacttttctttcaaaaaaaaaaaaaaattccctatcactttgattactttttataatgattaacaagctaaagatccatagtgagtgttctaagcattcactttttggattgtctaaaatgattgtagttataattactctattattgatttatcttattatgtcttggtaatgataatttcttacaatatttttgatacctggggctaattttcttatttgttttaggtattgctagtgaagctaattaagtaaagaggttaaataacaaaatatatttgtgctcattgttttttgtcatatgtcagttaaggtttcttattattaaaataattagattattattattagttgattcggtatcattccttttgtttgcagcatggagagaataacaattgtggttgttgggggccaagattcagccgagcctactaccaaagaagaattcagactaattttgtgaagtggacttattctctgtattgttattgctgatcataatcaggggtttttaggggaaggccatgctttatgctcctttacttgtctcaattctatcttgcattgtggtgatgacattgattgtggatactcaagtgatggtgactatatctgcggctggggctgggacggcactacagtgtttgttctatccaagttttgttgtgctccatttttatggccattaactatgataatgagagaaaacttttttagcatagaacaaatatcatgattatatgaccttaaagattgatcattatatggtgtggggttcgataaaacaaggattaatgtgtagattctagctaatttatctatttattgtacgcttgaaagcgatttggagttaactaacgaaaaaccaagtccactgagtctggttttcttttttgtaatatcttaagattggcataatcactctttttagctctaccgaaaattttgagatccatattggcatgttgaattaacttgatcatcttgactaataaaaacataaaatgtgtattgaaagtcaattagtaaaaatatttgacatttttttagctctacacagataattaaaccatacgctcagataattaaaccatacgctggtaattatctacatgtctgtaagctttaattaattatccttgtaatactttcttagaaaactccaagagctttgta

SEQ ID NO: 17005 - DNA, 3045 bp, Cannabis sativa
ttttcttttctttttttttgtttttttttttttttgcgaagccgaaatctataatcttaaacgtatataagcataaatttagcatgctctatttccttttttcttttttcttttttttttttttataaatttgttgcaaattcatatgacgatttcgtcatttataaataaaacatgttctaaatttgttgctcttgataataatgaatcgtgtaaatttgcaataaagcatgtgtgtgataataatgggttggtggcttaatatatgttctcaatcgtaatgtatagcattagtaatagtatatatataagtatacaactaataactaaaacggaaggtcgaatataattaagcattatagactggtacataagattcattatttggaaaaagatgaagacacaaaataaaataaaaactacgtactgatcgatgtacatatatacgtacatgcaacataaataattaatccaaagataagatatggattaattaataaggatgtagttattaattaatttagatgacatgagtaatagctgcatgaattgcctctgccaggtaagcaacagttttgaagcccagaccagccatgttaattctcctgcaccacaaaataaatttaattatcctctaaaatattctttgagtttttatatatatatcatgatcattgttacctacatatatattaataatatataattaattatatttatttacctcgcacattttataatttataattacttatttaggacttcctctcacatttttttcttaatttttcgttgaaatatattttttaatgctcacacaaaatataatggaatttaatgtaagtcatataaactactttaattaattacccatctgaagatgtatagatatggtactctttagtcatgaattcgacttgatctggatttaagcctgtaagagagtacattcccacttgttcgattatgtggttccaattaccaggtgtgcctgtaaaattttgccattgaaatataaaatatatctttatgctttatactagtttttaattttttttttcttccttctcatatttgttaaaaaatatacctacaaaataaaaataaaatacattttaaatattataaacaaaaattatacaaattcattagaaaaaaattatacataatttaaaaattttattaaaaaaattaaaaataattattaaaattaacacaaaattatgtgaaaaataaatttaaaaaatattaaagtgagttttaaaattaatataagttaattattttctaatattgaagtgtatttataattttatgggttaaaaaaaaattatttaacttaaaattcctagtttccattaaaaaaaatgcatgatttattaattaattataattacttgcctttctcatgcaaagtatgaacaagtttttggcgcaaacagataaggcgagcagtagttttcttcaactcattactccactcattatacatatacctgcaaattagccatatattcactaattttcaacataacaatgaaaaataaatataataagactaatagtcactgcagtaaaataataacaatgagaatttgtaaaaatactttttttttatatatatatatattttatttataatttgactaaaaaattttatttataaaatacaattttgaagttttaaaattataaaaatatatttttaaaaaaaaaaaacaaaaaaacaacaaaaaataaacatcaaaacaattataaataaattataaaacaattaataaactatataaaaaaaaaccatcaataaactataaaacaacgaaaaagacggtttattatttttattgaaaaagtattttataaataaaaaagtttaaaatataaaaataaaaataaaattatattatgttaacatatttttgtatttttttttaaatttttgttctatgtaaatttttttaatagattcttggcacagatttgacttggccttacataatgaaatatataaaacaagatacactatagtgacataggtagataagtgtaaagtataagtgaaaatgatagattagaatattagatattgatatattgacataaaaaatcagtaaagaagatatcattttctttattaattaagaatagaaaaaaaaaaaagataagtcgaagattatatactctgtatataattttacaagataaaaacacattaactacctgttctttaggatagtggtgactatagaagccccatgaataggtgggctagaatacatgggcctaatcacaagtttcagctggctctccacattgctagccacttttgctgtcttacacacctgaaataagaagtggaatttttaaaaatacctaaaagattttgggaataaaaaactaaaaaaatacgaaacatatataataaattatttataaaaatacagaggagtatattgtaaatagaatgtttatttttctgcagaccaactttataaatttgtaaacatacttttttgtttggtaacttaagtttataagagtgtaacaatgttgtaaaaaacatttaaaagggtaggaaattaagatgttaagagttttgtttggcttacaatggtaagagcaccaacacgttctggataaagacccatgatctttgaatatgtttgagcaataagacactcaccaccatcaccaacgaataaccttacagattctgcatcttcttccaggcttccactaactaaaccctacataattaattaacaaaaaccatatgtaatgtgacatccacattctcatttttatataattcacagaagagatttttatgtatagtaggaggtactatactttgttttttacttttttttttttgaaattataaaccaatttctttaatataaatattctacctacttttaagaaaattttaaataatttattgtacttaaaacaatggatttttggctattttgagaaaaacagtagaattagaatgcctacttataatttctcaaaatgcagaactataatataatattatat

SEQ ID NO: 17006 - DNA, 4725 bp, Cannabis sativa
atacaaaatatttaagtcaaattccattcatactagcaaagttttaaagtgggatttttttctctttccgtacagttagtggaatgttgaaattctgaccagtggttttgcacgtccttggtatgggtatggaggggcagcatttgtcttatatatatacgatgggcacacagtgttcctagtccggaaaggtgcaacttttttaattttatcagggttttaaaacctgtctattcctatcctttttgtaggaattactagcccactaagagttcttcaaacgtcctgggttttttttgaatatcaactgcatctaattttcatccccttccatacagactccctttacatctctcttctttttagcttgactttgtgagtttctcagcgacttgggcttgttcaagatgacttcacaagagattaatatggaagttgttgaggaagttgtgagcttggtcgaaaacgtgtctatgaaggatttctctttagagttgactcttggcgatgttgtggctttggatactatcaaaaaaactgtgatgggaaagtttttcattaagagaaagattggtaatgggagacttagatccatactttctgagatgtggaacgttagtcccggatggcgcctccaagagattaaaccaagatcttcattttcagtttttagagaatcagatgctttgaaggttattgggaacagtccttgggctccttgtggaggtttcatgatggtcactctgatgtcgaatgatggaaaatggaagtcggtagatctaaatcatgtcaatatctagactagagctttgggtgtcccatatcgttatttttctaatgagaatgtggaaaaattgcgaacagattcggtaggtgtttgtcgaccaacaaaacgagagtcaagggagttcttcgatgcaactatatgcaattttgggtaatccttgaccttgcaaaacctcttatggcaagagttggactggacaatgaagatgttggagttatttcaaatataaaaggctctcccttttttgctacaagtgtggtgttattgaccactcagatgatctatgctctgctaggaaaagaatgatgtccttggatgatggaaggagtgtcccactgtttggtccctggttacggtttggctcacgcttcaaaaatggctttgatgtactcgagacaaaggatatccaagagagtatccatatggaacaagaagatgacacaaccttgtctaatgatggtcagcgcggtggttctatggggacagatgaacgtgtttttcaaaaatgagacaattcattcagtatcccttattctgagagagcccaaccccaatggccctttcttcctactgttggtttgaagtatgggctttcctctccttttaagaaacacaaggtcggggtctcctcttttaatcctaagggtggaccaaaaaagtctaaaagaaatgtccaaactagagttttagggcccaaaggtgtccaaagaaacccatttttgggagtagtagtgaccctgaagatagtgtggtgggatcaaaaagaaaggaaattactcatcaagcggtcaacgagtttgagggcaataatttaacggtgcctccaggtacggtggaagagggaggtcacaaggatgcctttgctaaaggtagctcgattccggagcttccatgccaatctgcgatggagattacagtgtggccccctctatcaaagataggggttgcttacttcgaaggataaaggtgaaaaatgaaaagctgaaaacagtttgagggatggagaggttcagtggggagatcccaaggaaggggtgcgatgatcacctcttccaagagattagatgtaccaagcaccgtggtagaattaatgacaaacctgagagtttggtggccttaaaacaagatgacagactgtttgaagaaaaggaggtggtttcatctaatactcggaaagactcggcttcaaagtttctaataggtgaacacctcttaactatttttggttccttgtcacttattttggatgctaatgttgccagaggtagagtccctcttaatacgccagttgataacaaggattttcttgtggccgaggaggcgggccttattaagctccccaaggcaccatgaaaatgctatcttggaactgctggggcttggggcaagctcgggtagtggaagccctctggggtttggtgaggagggaggacctagatgtcttattccttatggaaacaaaagttaacaatgctaaaatagagagtatttggaggtggttaggttttttcaatgttgttatagtggatctagtggcctttgtctttgttggaaggttgggattgatttatacaaacggaacaatctaaagtggtggtaaggtttaacaatattatgaactatgtagaatggttttatttattcgtgtatgctcctcatgtcaagagtgctcgtaaactattctaggagcatttggccttagacgcttctcgtggacttgaatactttgctcaatcatcagtttaaatttggtggtaatattgggtcccaaggagattttgatgctctttcaaacttcctgctgatttcgggaggggttggtctgggaagtatggggaatttttttacctggacaaataaaagaaagttctcagctctcattaaggagcgactggacagagttattggggattcaaagtggattatttcttttccaaagcaagggttaaggttctcactatcagagagtcggattatgctctagtgttgttggatttgttcttggattgagattctactcattgaccattttgatatctggaagcttcgattcgtgatccctcttgtaaagatgtggtcaaagaggccttgtggttagaggttgttttagcttccagttggtatcaaaattccatctcacgagacgtgtacttgctaaatggaacaaggaattctttggtatctgtaaggctaaactcgattctccaaagaaacttttattagaagtccaatctcgtcccctattgaaggtaaattctgattttgaggctgatattttactagaaattgaagaggtttctaagcatcggtgtgagatttggcgtcaaaaatatcgcgagacgtggttgaaggacagggacaggaatacgagatttttccatgcttctactgtgataagatagaaacatagatttatcatggcgatctcaaatgatggggtcaattggatctcgggtaggggctcgattggtgattatttcattcagagatttggaaaagtttttcagtcactccgtttccctttactaatgaaattagtgaccttattagccctgtggtttcggaagatatgaatgtggagttgtctagagttccgctagtggaggagatccatttggtggtgtggtccatgggccctctcaaatcgcctggtccggatggtatgcttggatgtttttatcggcatcattgggatactattagtgcggacttgattggcactattcatgacttctttgcttcgggagaatttgtcaagacattaaatagtatatttttggttctcatctcgaagaggcctaatgcgtcgaagtttgatgacttctgactaattttgttgtgtaactttgcttacaaagtcatctctaaattgatggctaataggctctagaagatcctgcctggtcttatttctccattctgagctccctttgtgccgagtagatggatcgctgaaaatggcatcttggcccatgaagtcttggattcttgtaagaagaaaaggaggtagacatcctttgtaggattgaaacttgatacgtcaaaggcatatgatagctttgaatggggttttctggataaagtcctagaagcattcgggtttgataccaagttctgggctcttgtctataaatgcatcagttcagttagcttctccattttgcttaatggaggtcctttgaagcgttttctcccttcctagggacttcgccaaggtgatcctttgtcaccctttctttctatccttagtagtgaagttctctcgaggctccttattcaagaagaactaaatgggaatctccatggttttaaggtatgtccatggttttaaggtatgttctaacatagggtacatgatctaatttggtgggaccaggagtcagaggacagccatgtcaccatacaagggccttccggaggcatctcttggactttctctctggatgtgtctcattgattgttcggagggcttcgtttgctccgtctcctaaaggctggatggacttcagaaagctaaagggtctcgtttttggaggcgaggctctcctagacttatgcggaccaattatactttaggaaatttcgcgtgttgtccatctagaaacataaataaaagaaaggaagtaactttatagtcatatatttttctaaaaaacattatatattcatatttgtggtgtataattaagccacattcatagttatattaaaaaattaagtgatcaattacaattaaataaatctaattttctgtattttatacacagtctaattacatttacacttatagtttagttaaacagttataaatttaagatacaactatcagatatataaattatcaagatttataaatataaaattaaccttcataatacataggggtgttcatccgatccaatccgcactaagtgcggatttcatattttggatccaat

SEQ ID NO: 17007 - DNA, 6748 bp, Cannabis sativa
  modified_base (5091)..(5093): a, c, t, g, unknown or other
ctgaactcatacaaaagaatccccggccgaccaccgatctgttcgatctccgccgccactctctgttgcaacctccccgtcgatatcataaacgccgatccaaagaacaagcaaccttcgtacccacctccgcctctcagaaaactcgattctggccaacagtaaaccagcccataaagtaagatcatcagcagtagtgagctaacgtttctcatagcgtaaagcactcctctgaatccattaaacccatttaacttggactcaatcgaaaccttctcgtcaaacctcaacgacaagggttggattctcgtctccattaacgctctgttctcttcttccaatcccaacgcatctcttctacacccagatattgctctgatcacctgtattttattcttccctttagaacacaaagaaaaaaagaaagaaaaagacaacaatcgtaatgttgaatgatttgattcgaattggggttttacctgacgagagagttgtggagtgagatggcgatgagcttcaagagaggaagttatgttaaacccagaagaatagtaattctccataccagaaatcccagacttaagaacatggcaagcttcccagagcttagaactctcgtccatgtactcgtcgagccacttgtcaccaactggcaaatgaagcttttgaacgagaagggtgagttgggaatggaatgatcggaggagggttagcgctctttgaaggaattggattgacatgaagttgttagagaggtaaactctttccagatcatcgattccacgagtcaggaatgagtagaatccattcacagagtttgtagtagaagaaggatccattcaaatatgatttatgatccaaaaagaaaagaaaacaaaagaaaagagaccaaaccaaccaagtaaagagtaaaaggaaaaggaagaaaagggttataaagaagagaggtatttaaatggagaagaaagcattagattattaattataataataataataattagaattagaatttgaagaagaagaagaagaagaagggaatatcttagaagctcaggtttctaaggttgaaaaggattgttgggagcaatgatgagtgtttcctacagaggggaaaggatgattggtaatatgccattttcattgtttaatgggcagaaaggaaaggaagtagcaaatatttataataaaattgttaattgttgttattttttatgatttcattttaattataataatgatacactaaacaaacattacccaatttaacaaaaaagagaaagaaaaaaaaataaaaaagagaaagaagaaagtaattaattaggagacttttataggagtggttttaggaaaccatgaatttcccgtgagctcccttccaatatcttccttttctccaaaccccctttttattaaagtaatgcccaattacccatcatcatcatttaggggtggggttatagagagagagagagaaagagaaagagggtaatggtaagtttattataatttagtgttgggggcttttttgttgttattagtatagaattagagtgaatattagatgttggggggtcattgggtttgcaaagtgtttgactggattgactgggattatggaatttctactctaaaacttctcacacccaaaaaaaaaaaaaaacttattacaaattcaagaattgaggaaaggagaggcttttgattttgagtgcttctatgggttttggctttccatctttttttcctctttttcttcctcgagcaactgactttggtcctttactaaaaaaaaaatcctctattctatagaaatttggtgggtttttttgtgtgtaattgatttggtttttgggtttgttattcctagatatttagttttgtttttgttgattttttcaaaagaggataagttagaatgatgaggttccttgtatattgtttgtccttgtaaccttctaccatgcataatcagtcttttcaggacacatacacttaattccttgtttatttattaatatttcttagaaaaaataaaataaaataataatctttcactttttcttttctcttgggacaaaatggattgtttgtgcttctttcaagtccctcacgttgaattgattatacgcattaaccctcaaaaattgagtaattcctttaatccacaccgttcactcccttctctacaggacccatcaaacggcggagaaagtaaatcttagtgggaatgatcaactgggtccccatattttgttgcactccactaaatgggttctcaatcattaacttgttttacacattaaactaattacaacaaatttattttaattaattgactcccattcttcttcacttcttttataatatatatttgtttaatttaattagcttttttttttatatatatttttattatatatctatacatattaatgtgtgtggggtgggggaccagaaaatctaaatttatattgggctaagtaaccatttatttatataaaataaattttagtataaagttgggtgctcgtgggtttttggagaatgggatacatataaatgatatcttaagagtatgttggtcttttaagatttcattggaaagccaagacttcttagaagaaatatattaaggccattgataagggcgctcctatattattttgctcacctaaatcatataataaaagtattgctattaaggattaattttacgattggttaaatgatattctataaaaattattgtactaaattataagaaatttaatatttaattatactaataacgattattatagagtagtaaacactacttatccttttcactatttctcatataataagtagactcttttcctttatctttttatttttatattttggcatccactaactatacttataaaattagattcggtagttcccccaaaaaaaagaggaaaataattttaaggaaaagaaaaaggtagggtggaatatatgcaacctcacacacacttttatgactagccatttcaatgaattgcattcattcattattttctttttgcataattaatataatacaacaaagcaattttttgttgtttggtgtcaagctattattattattattgagttgtgagcggcttgatagatgccttatccatatgtacatacacatttttttttcttttatatatatatatacacatatacatcatattcaatatagaaggaactataaaatataaaattagtcggcaagtattaaaattcaatgcattcaactttaagtagaaaaaaataaatgttgccgtgcaaaaaaaaaaaatgtttttttagtttccttttttatttacctcttaaaaatattaacgcattaaattttttactaaatatatatataactagtacaattaattaaatatgaagagacaaactactaaatgcaagttcttggtataacatgaaaatgtctcctcgagcttaaattgtaaagtaaccaactttccaaccgttgccctttccctttgcaaataacaaaaccacttaaaataatttttcaagtttgtcatgctagttatgttatggtataagaattggacaagtgggtgaattgttatggttattaatggtaacaaatgtgacatttttctttaacttttattatcaggaatattatccaaaaggggtaaatatagctggcaaagcatatataatatatattatatttatagctctagctctagtagtgcactactactactactactactactactactactactactattattccttctaaaaatgatcttgaagtattctcccaaaactactttgcttttggggttatgaaattaggtcaaagtaaatgcaatggatggcttgattttaagtccctttcacacccatcatgatataattgtccaaaaatagtcttcatagaagaatgtttccttttcttctcttaatggtcttagatggatacaactggatggtcctaaacctctcaatatatgaaagtgatatgaagaatgattgttatagaaatcataaatgtatttattaattctcacctcctccccaaaaactacaaaaaagaaggaaaaaatagcattgatgaaaaatattgcatatataaaaagttttagtgctaaccccatatttcataaaaattaatactttcaattaggagactctcaatgcttaattgtaataatagtaatattacatgctaaaactaaaagatgttagataccacttgtgtttttaagcattgaatattgttatgggacactaaagtgtctaacaccattatgaggtgcgcgtcctataattaattagcaatttttttataattctattaaagtaaaataaataaaactcaatattaaattacactaatatcgatattatatctcacatcaagatataagccctttaaccttagttaaaaagttaaggtttttgataagccctattaatctattgtagtagtcttgactacttgcttatactatactcatcatattaattagcaaattcaatttggggtttatttgggaccacactcacattttatttcctttatgtgttaataatgaataagatataaagggattcttcttcaaaagcctactttgtacttcagatgagagatttgcaaatctcttatgaatggatacatgagatgttattgccttaatcaagattaagattagggttaggacttggaataaatagagtgttcatgtttgactatcctcttttaaatatagagtttatttctattgtttataagtttcaagttaaaacaaatatagattcaaccattgggaatctactttcctctcctgaaagagattagaaaatctttttcttctttttaaatgtaaaattctatagttcaaaacacatattgatcttcaaccaaaattatatttcaatgacaagtcttaacattttaacgacttatttacttgtgttatccatttataaatatatatatatatttatataaatactaagtattagtaatatgtatttgcatatttacttagaattgtactagaatttttattacttaattattaatttaannnataataataaaaaaaattaaatttactagaatttaattatatttttttaaatatagtttaatttaattttaaatttatttctcaaaaaatatatctaactaattttagtaaataataaaataagtaataataagtttagatgttttaaactatataactaattaatttattataaagtatgattagtcaattgaatcaacgtaattcaaataaatataaatttagataatttgttataaaaaatatttaattttgttgatactttaaaataattatctaagtcatattttaataaataaattaaatttagatatataattttttttaaaaaaaaagataattaattgattgatttaacagtgttagttttaacctttaactttaacagaaaaatacaaaataatcgttaaaccaacaatttttgttagatagtcacatttaatataagagagcaatgtttaattgaagtgatatttattaaaaaaaatataataatattcaaaattttttgtaaattataattttagttacttttgactttatagaaatattattgatgatagttacaagttttgtcatccgagaagatgtgttacttcggaaagaagttacggaaagcttggtagtcatcgggaagctttgttagtaaagttgtggccagtctggatggatcttccgtgaagcttatcttctgtaattgtaatatctttcggatagcttgttgtcaaaccagagacgtaccccccagatagcctattgtaagtcacatatgtttatctgaaaggagggcctatacatatccggatagcttgtccgtattaaaacttccaaattttctgtactgaaagtgcgttatcaaaactgacgtggattattgttgctggtgatgagttggatcatttaagacagtgtaaatgtgccacgttaatttcagatataatttttaggcaacaatataaatctataaatagctatcaatctttgtaatttgtaggtgaatcagatcataattgcttgagtgaaaattatgatagtgtaatgttgagagagagagaaaccttttttttttcgtaatctatgcgagtttgtgaggattcttctaatattgataacacttatatcaataaagatatgactgctgttgtttcgaccgagatgtagagcattgcacaaaactcgaactcgttaaacctggtgttatttttatgtttcactgcctttattcattacttggttcttgttatctcttgatatattgttcttaattgtgttgtgtgtttagttgtccgatatactgaatcgtaagtcattgattgtgttttcgtttcgcacaataaatatcatacattttttctattttttcttaaaaaaagtaataaaaagatattttttataactgtaaaagttaacggcgttacaatagtgattctttaaaaaatttaaatatttttttttctatttcattgtttaaaaggaaaataatactagaaatatatttcggttaagatatgtggattgggtaaaaagaataataatagaaatatatattttagatatgtgtaatagatttaaatttgaaatgcaatgtaaaagaataatttatgttatatagccccagggccagccctgaaataaagtgggccacaggaaaaaaa

SEQ ID NO: 17008 - DNA, 10346 bp, Cannabis sativa
atctcagcgcggcgataacatcgtctttcgcgactgtgagtccttctctcgctctcactctcaaattttctcgatctatttttcgataattcttacgttaatcacgatagttgtcggataaggtttttggttggatctatataataacgcaattattagtccccagatcaattaaccttaccaactcggatgagtccactcttaagtcgactcagatccagttcttaattttcgttttcgttttaaacagctcaaagatacgttgtatatacataggtaatttgcattctaatattgttgctgtttggcatatgattgattcattctagcaaaaattatttacggattaactttaaatgctaataaactattctcacgatccaagtgttgctgcaattaattgggcactctccctcttttttaattttcttataaataaaattttaggaaatgatatgtatttttttttcttctcatgaatgtagatcgaggtgaagtacagaaagaaaccgcggagatattcttccggaaagtgaagttttggaaagaagatggccaagaggaagctccccctgtctttgtaggtattatcttactgaaaggttgaagagtttattcatgcgacggctgtagaatctgttcctcgttgatcatttaacaaaaattgtgaaaaatttataatcttgatttttatgtcagcgtatttaactttggtttctctcagttgctgttgattgtcggattgaagcttcaaaataattgttatctaactaccctctgcttttctttaatgctcattttaagcatgttctgctagctgtgaccggagttgtcttatagtgatagatcattgatagaactcagccaatatcatgaaaaacctcttctttatttctgaaatcctagtctccaaattagagactaaagcatacaaaaacacagtagctaaataaagatcgccaatctccactttgtccaaaactacctctgtaatctggtttcaatcattctatactcaacttacccaactaactaacaaccatatcctacaaactaacaatcttacaacaattacaaaacactcagccactaacactaacaacttagttagttggttccttttgcacctcacataggtcccaccctgatttcgaaccttgtccttaagcttgagttagaaaagtggaacttcataacctcaaaagactcccatgttgcttcaagctttgataagccttgacttttaatcaaaccttccacctctattgttgttgtcttcattctcgtttgcattgagagcattattgttccatcaatttcttgggctgaactactaaatccaacttccaagtgctttctttagctgtgaaacttgaaaaagggtggatttaagctacttccaagaattctagcttactgctacttcccccaccttactaattcccttacgtgggccataaattctaggagccaacttctcatcaactcttctagccaaagcctctataccaaagagtttaagtgtaagcaaaatgtattctcccatgagtcccatccaatagttgatcccactccaataaatgttgatgttgtgaagatactgctgtagaacatctcgcaccactcttggaggtgctcaaccatataatgctttgaaaggcgtcatttttatggaaacattaaatgtagtgtcattccaatattcacagcagggcagccaccctacccacttctttggtttgttgtttgtagaacaactcaaatatgtttctatacaacgattcaacacttctgtttgcccgtctcattgcagatataatgaaatgctacacttcaatgctacacttcaacttcatgccttgcaacatgaatagttcagtccaaagtaggctgaagaaaaacgttgcttcagtgtaaaatggtggattttaatgcccatgcattctaacatcctctctaaggaatttaagagtcgtaaagtggctatatttgctcagtatatccaccaccacaaataccatatcaaacccatttgcctttagaagttatttaataaaatccttaataattgctttgcaaaccatccttggaagtggaattggttacaataaagaataaaccaacttcgctaaagttgaataattattacattggccaatggccaccacagactcttgtagatacttctttatgcactcattcattcccaatacaactctgttgtcatacatttaaatgtttaaaaaaatttgaaggacctccaataactctatcacgagtcttctttgaaaacaaaaaaaaagttttcttcttttaatgtttgaaatcgttgctccatgagtaacttcaactcaaaccaactttgttctcagggactcatcaaaattgttattcaaaggtgactcaaatcgtctttatatactcaggcaccgtactattttgcttaagagcaaacaatctttgcaacatgtttccctcctttgatgatcgatattgttgcaccattagcaacttcaactcaggccaacttcgaaataaacttttgtgatgtagccagtgagaccaagaaagtgcatctcattcaaaacaaactatatcaacctcccatttttgagcatttgtaagttgatttagagtgaaatattttttaccctaaaactccaagaatttgggtttgacctatttaacccaggcatatctagctgtcgatttgactaccacatcacccttcgcctccattgttttgatttttatcaatttttgcctccattgttttgtttttttatcaactttcgcctccattgttgttggcatgtattgcgtgaaagttatctttgttgttgctcctagtgtccttaacctatgcagacaaaaactcatccctacttgcgtcaatatcactccacttttcgccattgtcatgctgcctccatcgtctgccatcatcttgctccctgtaaattgttcgccaccttcatttaggcttggctcgtgacttgttgcttttagcgtccccaactcatgcacacaaacactcattcttaattgcgtcgatatccctccattgtctcccatcatcgcgctgcctccaccatctgccatcattgcgctacctccactgtttgccattgtgatgccgcctccatcgtctgccatcatcgtgctccctgtaaattgttcccaccttcacttaggcttgactcgtaaattgttgcttttagcgccgcaacccatgcacacgagcactcatctctaactgcgtcgatatccctccattgtttgcatcagcgcgccacctccaccatctgccatcattgcgctacctccaccgtctaccatcatcgtgccctatggattttttgccaccttcaattcgacttgggttgctgttgcacctcctactagagctgccaccaagttgttgactagtcggcccttggattaaccacgtctctttgagcttctccgaacttgcgcattttttaagccgacaccatgtatttctccaaatatgataatttcaactattctttgctcattatctttactttcttatcttaagcttcacctttattctgacctttcaaccttacattttaggatctgaactctgataccaattgatagaactcaggcaatattgtgggaaacctcttctatccagaaactatgaagagaaagacctacttgtatctactcgctgcttttctttaatgcccattttagggatgttctgcttgttgtgactgtagtcgtgacgtagtaagtcaattttggtgggctgggagctccggaagaatctgcaatatttcttctgccgagggattttcatacaatgaatagaatactaaagggacatttcgttctagaaaatctgctattccctattctgaaaataggatttgtacaggatattctttgtgagcaaaacatattgttttgcggtacacttattggaataaattataagcttaaaagaaataagcaaaaatgactgttcactatgtcatgagtcaacaataaaaccagaataaacataaggcagagctactgcatcaagtagtcttatgatgatagatcatcaatagatgtaacatatggcatattcatagataattattgagacatattttattttccactttatcaaaaaaaactatttatctatactaattttatttctttgcaaaaaagtataaattttgttgataattttccagctataattacttccttgtggtattttctgtgtttgattgaaggatctctttgtatacaagtttgataagctgtactaatttgttttttcatgtgcaattgatagaatgtggatggtgtcaactactttcatgtaaaggttgtgggattattgtttgttgcaacaacaagaatcaatttgtccccttcttttgtcttcgagcttttacaaagaattgcccgtgtcatcaaagattaccttggagttctcaatgaagattctctaaggagaaattttgtactcgtgtatgagttgcttgatgaagtcattgtaagatcctatcatattgttggacatttttggttggcatattttttagcatctatatttatttgctaggtagttttgatatatggttggaaatataagattcaaaatttccttttcttcttggactatcagtcacttttctcttgcatttagaaattcacttgtcattgctgtggcctgtataagtagtggttgtaagagaggaatggtagtctctttgatagcattgtctaattgtttccttttaactgaactgcatcctcttttttggtgaacattgaagtttttataatcctggaaattattcttacgtttgtgatttgtctgttggaagtgacttgactatcattttcttctgtcaggattttggctatgttcaaacaacatcaaccgaagtgttgaagtcctatgtattcaatgagccaattgttgttgattctgcacatttgtcacctcttggtcctgcttccctattcatggtatgtgatcccacgtattttatttattcaatgcgttgcataattagtctaacggtataatattccaatcctgttttgacaatttcttcaacattatgattaaatcctgaacatgtggatgcttgcagcaagggaccaaaagaatgccagggactgctgtcacaaaatctgttgttgcaaatgatcctagtggtagaaagagggaggaaatttttgttgatataattgagaagatcagcatgacttttagttctagtgtgagtattcctgtcctttgctgattttatttgtttaacttttggtcctgttttctgttttttaacatgattgtagacaagatttatggatgatgcgatcctcaatcttgttttgaagatgccattgtggcgtagatagtttgtactagggctcatataccatagttgatatcttgttatgtatatctttatacttcaattgctcagcagtattacaccctttttttattaacagaaccttgttaatcaccaagcatcaacgcatgtgagcactcatattttatctacaaatatctatagaaagaaatatgcatgttttctttctttctttctttaaaactgaattcttcattcttggcctttccctaaatttatctataaatgcttgcaagtcttttgctatcttgacctttctgtaaatttaactgtaaatgtttgtaagagtattttactttggctgtgtgttactcatttcgccgtatcgtgttaatgttgtttaacagggatacatactgacctctgaaattgatggcacaattcaaatgaaaagttatcttactggaaacccagaaattcggttagcacttaatgatgacctgagcataggaagaggtgggagatcagtctatggtatatgtatttttcttttcctggatttattttctcctagacccggatgtcttagcttcacattctgcataaaaaatttcttgaattcttttaaagtagttggagaatatggatgtatcatgtatgactgagtcacaaactgatataattctttgaactctgaggagaagcatccaacttattatgggtttgtactttatgcaataaaagggtagaagataattattgctttttattgtttaataataatcttgttgaatgtggtcaagctttattttaatattcttgtgaaggttctctttcttttttgacaatctcacgagacaagggtatttctttctgaaacagactatagaagctccgtcggctcaggagtagtgattcttgatgactgtaattttcatgaatccgtacgtcttgatagttttgaggcagaaaaaactttgtccctggtaagtcaaatcaaacttagataatatgagattgacagtacttgtttaactttaaagtataaaatgatatgttacacttctgatttttgctaggttcctccggatggtgagtttcctgtcatgaattatcgtatgacccaggaattcaagcctcctttccgtattaatgctttgattgaagaagcgggagcccttaaggtaaaaccactttagcattttagagattaaaaatattcaaactgacaaaagctagttcgatatcaacatattgaaagaatagatgtgatggttttatatggctattatacactaccagaattttattaatcatcaaatttatattccttatgttgctaataaaattcaaaattacactttacttatatgaagggattgttactagtactgactgatatttactattttactttggaatcgtccttgtaggctgaggtgattctgaaagtacatgcagagtttccctctagcattacggcaaacactatttctatacagatgccactgcctaagtatactatgaggtaaatttgttattaccttgcttatctgtaaattttcaaggctaaaattgatttacgttgttttagtttttttggctgaatggatcctttcaaaagaatgggataatttgcattgataagtttctgcctcttttcaagattataaaattcagctggaagatatcaattatggggtgtttggtgtaagagtttcatttgatggttttttagttagtttagaggagttgagattaagggaatctcaaactcaaagtatttaaagagtttgagattaccccaaaaataaacttaaaagttggaccagcttaatcataagcattccactaacatcataccaaacataggtttgtttttcatttccatttccaagagtccaaactctcacataacaaacactccattaatataacctgctcacattctttttggtccaatttgtttgcaaagaacttacataacttcaaattctgtttaccttttgattgaaatagatattaagaatactagtgctataggtatgtcaatattggatgacgtttggatcatctaattatttgaaagatgagatgaccttttgtataatcagcaaaagatcatttggtccgttggcttagcttttataaactcttttttaacttttaggatgaaaaaatccgtcaagatgtgtggatgaaaaataaaaagttcttttttaatttagaagtctttttgggagaagataggatttctagcttctcccaaaaggacttttctaaagctatatttaaatttggaataatttacatacttcctaatttactcacaaaaatctttatttagtgacatccaaacactttgaaaataatttttcattaaaaaataatatttatataatagttatcttaatagaaaaaataagttacaatgtttacatatctcatacatttagttataagcaaaagctttaactaaacggggttttggtagtttttgtgttttatttttatccctgttattagattggtagggaactgaagtccgaggcactcacacatacacacccactcacccacttgagctagtggctttggtagtctttgtgttagaaaaatttataaagaaacattaggaagagcactttaaaattaaaaagggaattgtggaaggttacttaccgtaaatttctaaatgcagcagctaaaacattacgagacaggctctgtttcttgtcgagtatttgcaactcttttatggtaactaatattttaatgaaccgtcaaaggtttatgatctaggtgcatcaagaagccaactggaaaaccttgggaaattaacatacatatatttgttccataaatttttcaattttgttatttcagagcaagttttgagttggaaactggagctgttggacaaactacagatttcaaggaagctaataagaagcttgaatggaatttaaagaaggcaattattttttatctttgccctcatgttttttcagtattttgcaattttgaagtgaaacagatgcacctgatttcctcttgatgcatttactgtgctcaactgaagaaagaagatgaacatttattcatattaatgtgttcaattcaaacagattgtaggtggatcggaacatacactgcgagcaaggctaacattttcacaagaatcgcatggtatgattatttattattgacattcaattattttaaatgtatactcttctcgttacttttatgaggttgctttccttcccatgttcatgcaacatatttgcttaatgcaggtaatataacaaaagaatccggtcctgttagcatgacatttaccataccaatgtataatgcttcaaagcttcaggtaagctaatttaattaatgtggtaattacctctgtaaaatcttaaccgttggctggatacagtgaggtagatcaagtttctacaagtacttgccaccagtttactgaattgttctccagaagaaaatcctatgagatggtttaagtgttagtgtgttaacactgtcaagtactgttacttgttagatgctcacgttacatgactagacttagcgggataaaagatttgaagttgatgattgattatatctatgttatgaactggtagtgatttgttaatggtggttttatgtgaagagcatcgcctcctaatttggttccagtcatcaaaatctaaatttatcttccatgaaagcttaaaatctctgcctaaagagggcaagtaagatagagtactgtcacaacttttaaagggtgtacgagaccagcttaattgaatgaataacttaaaatgatggtatctattgggatgcaggtgaagtacttgcagatagcaaagaagtcggggacatacaatccatacagatgggtgagatatgttactctgtccaattcctacgttgctcgtctgtaaaatggtaaagcatcggctgcaccaatctccggacctttttctggtgattttttctacatcagcttttagaaactgcctttgtgttttttatttttatctattgcgatcctgtaaactgctgttgtctagaaccattttgattggtttaacgttgcagactcttgaattgttaagttttcattttccttttttttattcatggaacgaaagttcaagttcagttattatttgtttcaacttttttgggtatgatatatgaagatacaatactccttcagaaaataaaaagtaataataatgaatctttcaagccaaaggaaataatattttttgttgactttgacgaaaatgtctgcctataatatggcagccagccagcattgaaccaaattgatttgtgagaattagatctatgcatgaaagcaagcaaaaatgcgtctaatattgttgacatcgaggaagatctttgccaaaagacaatgcatgaactgtctggtaatcttcctgaataataatattgggttagtcatacattgaataacaagtatcaatggtacttgaattcaaatttgataattgaagcacatggattaagcccagaaaataacttatggttttccttttgataaatcaagcactaggattcagcccaaaaactaacaagcagggtttttttttttcttattcaaaagactgcaatcacaaattgagtgctttcagtggatttggtacaggtacagctcagctgaactctgaatcaaagtcctttgagttgtcttctctgattttggttttagagttttgtttttaacttttaaaagagacgtgtttagttagaagtaatgctacttgaggctaggcgacaactcaatacttatagtttgtattcaaagaaaacacgcaaaaccaagtgtaactgacttgtttgcattctcttttatcttcttctaaaggcccactaaattttgcaccagcttcaaagaaataataactagacatgactatgtttgtcttctaccctttctctctctctctctct

SEQ ID NO: 17009 - DNA, 3671 bp, Cannabis sativa
tttaatctataattatcaattatcaaattaaaaaaatcaaattaaaaaaaaattaatttaattttttaaaagataatatttttattaatgggagctataacctccacattaatacaagtgggtgagcatgtagtatatacaaatagaaaattatcacaattatttatataaaaaagtaaaatatttattaaaaattaactattaatgtcactgttttttttaaattaattttttttgggattaattaaagacttgatattgctgaatttctatatttatataatttatcaaataattaaaatttatcttaaagataagtatattttatgtaccaagaaaaaaaaatgtttttcatgcaagttttagtcgatgcctaaataaatatacatttttataaaggtaaataccattaatttggatactgtgtgtttttaagagttactaattgcattacttatattattgtaaacgaatttctttttgtttaataataataagtatttttcttaaaaaaaaaaattacattacttaatacttatcttgttaaatcacaatttaaatctgtatttttcagaatggtacaaaatttaaactataaaatcaatttttgtgatttttttaatattatagtcaacttggagtcaatttctaacacgaatatatataaaaaatataatcaatcttatcataatacttactgatcagattattattaaattttaatttaataaaaattaagctcataatttattttgtataattttaaaaaatataaaatataaactattatttaacaaaatagaaaatcaaatataatagcatttatcatttttttaaaatacataattatagtacttaagttttgcttgcttttttttttaaaaaaaaaaattgcttgttgttctttttttttttttttaacacaatatgtttgcttgttgttcaagttatgtatatacatacaaatataaaaaaataaattaaatttgtattattctttatgttttatatgactaaattccaaagcaaattcatgattaactggcaaccacttacaacacaaggttttattcttgataagtttctccatacacaaaagtgggaaatagaccctttcatttcaatatcttcttatatataaatatttatttaaagataacatagaataatatgattattatgtatatatatatataaatcataaaacacgtccatccaaccaaccaaatagattgatatgtgaacggttgacaattataatattattaatagacatatattaattcaatgctgttcaatttttggaccatgctgaaaaaaagaaaaagattgatgagttcattataggttcttatcatgcttaatattacttaattatggtttaattcatgattattaagcccctaacctccaaaaactactgcaatggaagctacttaattatatatattttttgaaaaaaataaaatattaagacattatttattaattatacataaactgcattgatatttatgctttactatttttattggggatgattggacaaaaatatatataatatatatatcatataatacttaaatagagaatgttaaacataataatatggtaaagtatatttcatatatatatactacaaaaaatagttacttttagtgatagctgtttagttataatataaattttttatgactaaatgtgacttttaattagtcacaacaaaatattacttgtgactaaaatataaaatttagttacaaattgtcactaatttagttctagtcccaacaagtattgtgactaaacaacaaattgtaatctttatgattaatgcctttagccacggatcttttagctacaacataagaatgatgttttataattaatcacaaattttattgtgactaaaagtaacattttctatagtgatattttgatatattttaattcattaacatatttcttctagaaaatattaatattaacttgactaaattatttgaggcttatatatatatggtgataaacatatgtttaattaatattagactaacttttttaaaattgtatttaattaatttagtgatgaaaattagaacttatatattaattagatgataaggattgatcttgagtgagatgatgttgagttcatctatatatgttacttgtataagtaaatcaagttatatttggcaatgtaatgtacgtaatgaactaagctatagctactatacatagcatttacatgattcataagcctaaattcgtatataatatatatttatatatatatatatatatatgatatttcaatcattactacattaccacatgcatgaaggctatgtataatttatgacaggttatatatatatatatatgtttatctatacgaactcaagcagtacatggggacagaaaatgtttgtagggagctaattaaagtgtgaaaaaattattttacgggggccaaaaataaatttttaataaaatacaaaaaaaatacaaaattataactaaaaaattggaaagaaaaaaattattttgttccctcaactcaagtgatgcacctttcccaatggtgataggatgaatgggtccttgcggagactcactattaaaagagcaaaaattatcattctaaatgaataatagggcgggaaagagtattaattttattctcgaatgttagttaaataggacagggatcatagggtcatgatgataacactcattctttggagtattgttaggttatgggtcctcttcgagacatgacaaatctccaaaatacacttttcgagttagtgccaaacttcaaaatagaagaaaattttattatcttctttttatctctaacaatagctacacaattacatatttatagtctttcacactctttaccaattacaaataacaaatactttatttattttttaatagtgttttattcatattatttatgtaattttcagcatttttaattataataataattagtgattttttttttaataatttatatatatatatatatatttatttaattttgttgatgattgatttttgagccttttatgtttagatcttggagccgcctattgtgattgaccctaggcttgggtctagatcgggcccaacccaacaaatttttttaactaatcttaattaacacttttttagctttaccttttagttttacttctaataatcatttttgtaatggaagattgctagtaataatcttaggctgtttgataaggagggaaagtaggatggatggagaattttgaaaagatgaggaataggatgatggagaggatagttactcttcttcgtgttgtttgatattaaaaataaaattggaattatggtaagtaaaataaatattaaaattactattttatcatttttaatataataatatattttaatttgaaaggagtaaaagttattttatgtagcctttttgtctatttcgtcaattctcctatttctggagggatgtgtatttgaagggaaagagtttttctccatcaaagaaaattcatcaattttctctatccctctccttctcccctcctctcccatctactaaatatagtgtaagtcgaggaaattacattgtatacccactttactactttatctattttaatttttac

SEQ ID NO: 17010 - DNA, 1996 bp, Cannabis sativa
tatttttaaaaagtactatatattgaagtgtttttaaaagtaagagtgtcaaaaatgatgtgaaagaaagataaaataaatattatatttttagatggtgtataaatttttaaggatgctaccattagagatgttctagtgtaactaattaatgacaataatgaagtattaagttctaagcatttaaaaattcagaaattaaaagatgataatttacatttttttcttttggatgaaagatgatactcttatggatccagctttaaatttgatgatctttctgtagaaaaagtgaagactgaattaatagttatgagctgaaaattttatcttctggtcttttcattaataatttatttatgtttataatatgagaaagaaaaattgtttgaattttaaacttttatactctaaataaaaatatataagatcaatataatggtacttgtatttccattcttgaaaaaaaaaaattagccaaaatgaaagctcaatattaaatacattgtaatagtatactactacaatacaactatttataatctattaaaaatcaatatcataccaaacataccaaataaaaaataatcataaaaaagaaactactaatataaaaaatcacacagactcattacaaaataaaataaaaaatgcatagaaaaaattcaataatgaaatactatacctatgtaaaaataaacgtaaaaataaacaataaaaaacaacatgaatctaacaaaattcaaaattagtaaatttatcactaataaaaaaaacaataaaactaacaaaatatatatgtatgtatgaaaccctacaaacaaaattacatatgaaaatactgaaaaatagagccaaaatacacaaattaaagaaaaatagaaaaaaaaaattataataaaatattaggcggttcatcaaaatacttattcttttttttaataacatctgaaatagctcttatcattttcttttcttttcgatttcttcttcataggacatctttcgtgttttgttactagttagaacaaaattttcattacaatcataatcgttcactatataggccatttctctttgcctatttacatttcagtccttaattaaaattaatcacttttcatttattttgattaatggatattttttggttttatttcttttttctattttacctttttctactttgtctttcaaaaagggtttttttttttttttttgactaccttcaataactccatgtttctctaaaattaattatttcatttttaggggtgacatcatcaactacttaataaacgatcaaccgacaatcttattttctttcattaataatgtggtacgactatttatgtaagataaatgcatgtgtctcacgttggcttaataatgctacaacaaccctaaaaactcttttagtcaccatcatataaatatatatatatatatatatatttgatggaaatatatatatatttattgaatggtaacaagttagttggtgttaggaatgtgtcttaaaagcatatgtaaaaatatttattatttttaaattgaataaatgaacataataatttattattattatgtctgaattgttaaattattggttgaataatttaagtaaatatcgaaaaatttcatatttattattgaaaatgtaatcttatattagtaaaagagaattaagatcacacgaatgaataaaatagtcaactaattaaagttttagaattctttaattgaaattgtaaatacggtttagtatcatattagtacaaatattatctagattcaaattattaatgtagttaaacatctcgaaaatataatataattatatatattttatatatatatatactattagaaaatgttcttttttcattggttgctgttagatattagatgtatattagctgtaaaagaattagatatttagtagatatttagtagatatttagtctcctaactttgtatataaatatgtattatt

SEQ ID NO: 17011 - DNA, 5546 bp, Cannabis sativa
acagactccactccctacacaactataggaagaagaaattctcaaaatgtctcgttctaaagacccatgtgactgtccaaaatctgactctcacaaatgtcttccgctggactctcaattctttcgaagattctactatttctctcgttccaaacagcccgcaatatggccaatagtgcggtcctccacagacaaatataatttttcattatgtgtgcaatgtcatttccactttttcaaactctcgagctgtttcctctttagcttcttcttatgcttgtttacaaattacaaggcctctttcagatggaagttcctagctatatccctagcactgtcatactcattaagctcaaccagcatcttctttatccggcgtgcaagtccgttagtgtcactctcgcttacacccgaggcacgtttcttctcaagagtttttccgagttgtagaacataatccaccaagggttgcaacttgcgtctgcacatttattttaaaagagattaatatcatatttgaactgtttactgcattttggtttagtgtaatttgaaataggtaagaatgaactacaaaatttcacagccttcttacctgtgatcccaactggtgacgcttggacctgcccataccccaaataacgaagcaactaccctttcagttctcgtaattgcatcatgaatgtttgctgcaatacttcgaacatgaggtagaacttttcggcacaaaagctcatcaagagcaagcttttccaaaactggcagtgctaagatttctttccacaagcaaatgtttttcatcaaacggacagacatgccaaatcgatatgctgcaacttttgcagcattaggcacagcttgcataacgtgtggactccatgttgggacctataaggtgaaaataataaacaaaacaatttatctttcctttcaaaaaaacttaaaactttatcaactacacgataggaaagcaaacacataaacaaatatgcaaaacataaagaatgtgaacaatacttgtctcaatgcattgttcctttttttttttacaaggaaacatttgttccaaaaaaaataaaggacacatgaaaatttatgtggctgcatatttaagcatgcgtttaagaatgtattaccgtaagattgtcaacagcatcagctagacgagttctaatagcaactaataaatcagcgagagcatcactagaagctggcacataatctgttaccaagcttgtggccgcaactgcattctttgtctcttgtgtactaagcatatcccagcaataaacaatttcatgatgcaaaatagggagggcaaccttttccaccagttcaggaacaaggttagcatcagcatcatcatgtgtgaaaccactcccatcttctggcaacccataatccattaataatgaatgcctgaataaggagaaaacaaactcagcatatttaaagaattaaaagcatgcaggttatagtaataccaaatgatacaaggaaaccaagctagaaaggcatttgtaatagacaaacaattaggtaaagtaacataccacttcatatttaagaaatctgttttctcgtggagtggatcccacttcaacagttccagcctcacgtagggagaaaatatagaaggaacacttaatgacatataagaatctctgtacgtggataagtaatctctcttccactcttcaagcctttctttaactactgaaagttgggaatattcttcagatgcatcactaaaaatttgatcagcagtatggagcaatgtttcaaattgtgacttgtacgctgtactctcactgtcactctcatctgtgctcgattctccttcaattctttgataggggacatccacatccattgtcgataacctcttagaatcaaaccgagcttttctgcgtcggcgagcctcagccctccctttcatctccatacgtttctgcaggttcacatctctgccatattcatctaatttcactggtagatttgcttgctcacttaaagcagaagacgcagcttgtgcagcaatcttggctgctgcaactatgtcagcactgccacctttttggctaagaacaaacattgctgcattaacctctgcctccacccccgtcatttcatcctcgttatctgcaactcttctttcgactatagccgatgcccgattttcatggagcttctgcatttgctcttcaagttcctcaatatagggtgctttatgctgtaaagtgttaaagcaaaccattaagtacgggtcattgaagaccaacacaccacagacatcctaaataatatgaaatattgactaggaaagaaaaaaggagcttgacaatagcatcttaaggcaggattatgtgaaaaaaaaaaggaagtataaatagcaatgagaacaattaaagcactaacaaaaagatatttctgctgcaaagggctgccagtcaaaatgaaagtgaatgtattttttgttaatgaatcaagcgatcagaagacgtcaaagtgagactcttggacttgaataaatgaccaaaataatgcacttaaataaataaatgggaaacttccataaatcagtcttccttcaaaacctatctcagattacaaagtaaaaaacatatatatttgtaaaaccctcaactggtttgagaaagtaactactcatatgcttgtttgtgttatattaagtcaacaagaaggaaaactgaaagtgaaagtgaaagggagggagaatggatagataagaaagccttgataattactcttccaaatttaaattctcacctgaagaaagtcacatataagagaaacaaaatttcgaagtctttgcatgtatttgtacttctcatcagcagcagacagagatttctcaagggcagtgatattcaatagtgaagcagataaattttcatcagtcttattcaatgacagcacagttctgccatgagtttcctgagcagagaaaaacaaaataagtttactccatttccatgataaaagcacataagactacaagcatgtcttgccgaagttctattttttatttgtttgaaacaagaaccccacctaaccaaaagggaaaagtgcatatgcaatatacaaaagatgcatgtacggttctacaatatttaagaactagtgaactacatgggtggtcaagagggacgaatattggagcttgtgggagcgaaccacacaacagaccatttcagcaatccctcctgggtgtcttgcaactcttgccaaagattgttcgattaaataaagtcgcagaaaaaagcaagagccatgctacaaatattaatctaagtaaagaatataatttgatcttagcaaccgtttttgtatttacaaagttgtccaatctcaactgaaaatgcaaacagctttctaacctcgcttccatattgttctagttttttttttttttaatgttttctcatcattgatactgcataattttctttaacatctttttcttggtttgacagagttgagtgtccaaattttcttgaacaattaaacatgccccacaattcaacttggttatcaatgctgtctaatagaaacaatactaaaatactttcaatgctgtcccataagacaacaattaacacaacacggaacaaaaagaaagaatctgcacatgaaaaccattacacggcaaatattcaagatataataaatccaataatccatccctcataagttctaactctaaaacaaaatggcatgcttgagtatgaaattcattttggcctaaagtaacaatttttagtacctttagtctcctcacgttatctagcaaagctttcctggcaatatcagcttgctgagatatcgacatcatgcccgaaccttgtgatgctccaagtgacccacctatgctagtactagctggtatagtttgggacattgttgggtaggtaaacttctgttggggcacactttgaaccacaggaacattactgccaactctactaactccatcatcaatcctcttccctaaccctttcctaaactgttcttcctcccaaatcttttcctcctcgtcatcttcgtcgtcctctgaaatctccttcctcaaccccaaatccgttgctccatcatccacatcaaaaacacccttctttggtccatccaccttctccccgaccaatgcaatgcggcttaaattctccggctcctcatcgctcaaaccctccgctgcgccgtggttgctcccgccatccaaggagataaagtctggcgccgctgctcttgactgtcgcattcgttccctcttcgcccgaatagcatttatagttgcttgatcaggaatcaatgaatctttatccttacctttcccaatccccattgaagccaatcgagcctcagcatcgtctttgtccttcctaaataaactagcccctttctcttcaccccgatcatcatccgagtccaatgcatccgcttctttctccttctccgataaggaactggtaggcttgaccaagccctttaacacaatgatgggttcagacgagggtttcgattctgaagagggtcgagagctgacaagcattcgagtattcttctggagttcacggagagcttcttttgtgtaagtacccgcttggggttggacattggaagtcatagaaggagaagcagaagaagaatgacccaaacggtctttaagtgtggtcatcttgtgcgaggaggagagcttattattacgagaagagggcttgttcttattggagggtttcgaagatgggcgagaagggatttcattctcttcatcatcagcaaagctgaggagcttcggagcttgattagtgggcttcttggccttggtgactgccatggaagtggagatcgaggagggtttcgaagaagacttggaattggtggttgtagtagtagaagtttttgcggttgttgacggtccattgttgttgttgttagactcgtcttcttcatcgtctccagcacgacggcggaagtttctagctctgctggtcatggataggactgtacgtcactacaccaaaattaacttttagtaacactgaaaattaaatactgaaaaatgtcatatttagtgacttttaataacatttatattttttttttaacaataaacatttatagcttttgtaatatttcgaatgtcactaataaatttttatatattactttttatattataaataattttagtgacattttaaaattgttactaaaataatcaaaacaaatctaataagtttgccaaacatttgaaacaccacttaatatctgaaatgagaaggattgcagtcacaaaataaatcaaagaaatagattactgtctaattttcaaaatcagctatgcgagtaaactcatgcagaagttgctagtatctttcttatgctatatcagtggaataaaacagagaggtccttaacatatatacattagagttgtacatcagtcagtgtggttagtttttactacatattttccaacccaatgtaaagaacgggttgcaaaagtctaagtgcaacccactcaa

SEQ ID NO: 17012 - DNA, 5147 bp, Cannabis sativa
  modified_base (27)..(30): a, c, t, g, unknown or other
actaatcagattgtaaagagttttatnnnnggcataaaacccaacagttctcaccattgttgttacttaaggatggaatattcgccaaatagactttagcaatgcttctcttaatggtctgcttactgaggatgtgttcatggttaaaccccaaggctttgtgagctctacttgccctgattatgtgtgtaaattgaccaaggttctttatggcttaaagcaagccccccgcacctagtttgaaaaacttcaaactactctttgtaaatgggactttgttaaacctaaatctgatgtgtcattgttcatatattgccgccaggggactattcttatgtatgttgatgacttgctagccactgggaccaatgctcatttgaattctaaactggttcatgatttacattatcagtatgcccttaaggaccttgacaatcttcactcttttcttggtgttgaagcctaccaagatcaatatagtttatacttgactcagtccaaatgtattgttgacttatttgttaaaggcaagcttgatgaagctaaaccacttcctactactgttgttgcctccacagttctcaccaaaactagcggtgatcttatgcttgatccctttttgtacagaaacacagtggaagtccttcaatatctgattttcatctgtcctaatatctcttatattgttaacaagttaaattagtacttgcaagctcctactgaactacattagcatgcttgaagatgggtccttcaatatcttaaaggtaccattactcatggcattcatttcaaagtcactaattctcttgatcttgtcggttttactgccctaacgatcgacgctctacaagtggttaatgcacttatctcaatggtaatattgttttatggagttctaaaaaaacaaggtgaggtggcgtgtttggtatgaaggaaagacaatatgttggatgaaaagttttgaaaggattggaaataagagggataaaggatgatagttactcccctttgtgttgtttggaattagaagtaaagttaaataaatagagagtaaaataaatattaaaattactattttattatttatatattatactttgaatggtaaaacaatcattttatataattttttttttgtctttttcttcaattctcccattttggagagattagaaattgtatatttgaagagattgagcctcccttcaatcaatcctctcccttacctctcttgccaaacaagggcatttatcaactcctctatccctctccctccctccctctctcccctctaccaaacatatatccccttttgatacttgctcttgaagaatataataaggccaatttatttttcctcaaaaaaaagttcaataaactctcaactgagtcctcgcttcaacatctttaggttgtgatatttgtaaaaatttatagatgataaaagttacccttataatgtacatctaaatttataagtatacatgtttcataatgctatatcatttgagagattacttaagtctgaaaacatgtatattggtattaatttgtattttggcaagacgtacaaatcctcgaaagcaaataacgatggaaccaagaaagaagctttatttcaagattaccattaaagagtaaagacaacacgagaatggtccaatacaaatatggtactaaagatggttactagggaaacataccattgtagtctcagaaatacctatctagatccttttttgtttgtttgtttgtctacatcaagttgtctcagggataggatagaatagttgagacatatttttataacttctataaaagcttcaacttttgctttgcttaaagaagtggtcagtggtggtctgaatggtctttctttttctttctaagctcattttaccaaatcacaatcacatgcatccatcccccacatatcaagtcaaaaaattcaaagtgaaataattacagtcctcgctggtccatatagaatattcaatttattaaagatattactaagccaaaaattcccgtgtggacattataagagcccccattaacatcactttagaaacagttcaacgtatgaaagaagaaccaactcatcaagataggcttataaatagttcaagtgtctactttttagagaagagtgtattcaaagtcattaaagaatactaataaactattcattgtttgacataaggggtctctttgtcacaaatctatatggcagtatgcagacaagaaagagtaaaagaaaaaacatctgagagaaaggaaaaaaaaatgctaaagaaagccctgttcaataccatcaaaagatatcatatcgcgactattttaatttcattactactataaaaaattgttaaccaccaccgaaatgataattttgttggagtactactggtgcctaataacaatattaaaaaaaaaattcacggaagcctaaaatgttggtcgcagcaactcatccagtgtttggatataataaactcctattctttttctttccctattttttaatcaactagcctcaccacctaatcttggatcaaaaaatttacacatagaaaggacttgaacagttgaacctcaaacttgtggaaataatccacatttttattcttttccttgaacacacaggacctctaaaatccttagtaagaaaatttaatcaatgaaaggtactaaaatcaacaggggtaagaaaacaaggaatgcacaaggtaccacaacttggtttatccatattcattgtttatcgagaaagagtatcttaaataatacaaagccataaacacaatagtgtggcaccttgtatggcaccgcaacagccaagttttggtttttgaagaagaaggcacgttacattagtaaacacctaattaagcaatatgcattataatatgcaccttcagctctcataccaaagctcaattatgtttcagcaatggactagtaagtagcactagtcgacaagtagtgtgtactaatatctacaagtttcaactctcaatttctaaaagcttggcctcatgaaagttgtgggccataatcaatgctccaattacatacattcatatgttccaattatatacatccaaaggagaactaaaccagtcattgcattgcaagattttaccacttataggaaaccaaaatttgttctaaaattggtcacattaagatgtgaggtttgatcatatttagcaaagtagtgaacaccagttgaaaaagaactacaatgactagttttcacctttaagaactgggttgcaacttaaataaaaaaaaaataaaaaataaaaaaataaatataaggaacgaaaggaaggacattaaaagacccataaagaaaattgagtccatcaacatttttttcacaagatttaataactaaaaacagtaatatccctccaccacagattctatctatatatatattaataacttccccctaacttgatccaaacatgagcaaagaacaaatctaggatctctttctgtgtttgtctttaacccaaaatgtcttctaatatgccatttacaaagaacaaactccctaagttaactcaatggtggactaatttccatccaaccactatgatttgtgttgaataaacatcccataccccaaatgtacaaagcaaataaaacatcaaaaaatataaaaataaagatataattaagacaagaattaaaatgtaatttaaaaaaaaaaaaaaaaaaagaaagaacaaagaaccccaaaacgacagcgtttagcaataaactcccgtttacctgaaaagtcagaaacttctccatctaggacttggaacgggtactgaaggcgaaagagggagctgaggaaaccctagctgacccgacgaaggtgaaagcagattgtattgtgacttgggcgagttcaggcacccaaatggaagtggtgacgttggaaattggaactgagaatttgacggcatcatagacggcgctggaggtggaggaagcatcccctgcggctgctgctgttgctgcggtagcgatggtggaacgggatgatggttctgttgtggtgtaaagttgctccaacgaggcgagaccaaaggtgctagcggagagaatcccgaggcttgtttctgattgggatcaacggtggacattgagttatgaaggaaccgcatgtaagcagagacaggtgactcggcggctccgtgaacagccggaagaggtggcaaaggagacaaaggtccgagtgggcgaccgattgagccaaagttgggcatggctacagtctgctgcggaggaggaacgtcgctgtttagcagggtaggtgggggccgattggtgaggtgcgctaagggcggaggacgtatccgctggagtcgggagctggctgccttgggttgatgaataggcggaggcggcgctgggaatcgctcgtgggctggagccagtgagcttctgaaccacgtctctgaagtcattcttattgatgttgtagacgggaggttgatgttggtgctgttggggctggagattattttgggtctgggtctgcggcggaggaggtggtggtggtggaggagtaggggaaggggcttgagactgtggtgtattgaaattaggatcgtcaaaggttggctttttaaggatgggttttgagattttatgagaaagcttgttaaggtgtttgagatactgatctctggtagcagcactagcactgttactgcttctactactgttagaggtaaccgaagaagaatcacctgaagattgacagcttttattatccatcttataatactactacttattattattattattactattatgattggatttttacaagcaaaccaaccaaccaaccaagaacagagaaatcaatctctctagatctctcttcctctttttcttttataaatgattttgtattttggggataatctctctattctattctccttttccgtcctgtgacagtcggcgagtagggacacggagatgagtcaatatatttatactatagtttaagacacgttacacaccaacgcctgacgtgtcaccttttcttctccaaccctacaaataaatttaagaataattatcttttttaccccctgtacttatgacactatactattatgcccctt

SEQ ID NO: 17013 - DNA, 6847 bp, Cannabis sativa
gagagagagagagagagagcatgagagagagacctcgggatcaaggtggtagagacgaacaagatcatcaagtgtggggatcagctgagcataagctgatgctggcgtcacagagctagagagaaattccacatactgaagaagtgtcccgtgacatctatcaaactgttcactaaccatcttaatgtaaggtgcatcagcgtttattacaaccctgcagaaagtaataaaatcatcacattaacgataaaaatacaaagagaagtaggaaagttaaacgtaaatgaaacactagtgaagaagaagaaaaagcagagagagagagagaagagagatttttttaaaaaaaaaaaattataattctgtaattattcagagtcaaatttgaaacaataaactttagaacctaaattacttgtaccaagaactgagaacaaaaaaaaacaaaaaatgcaaaacagtcctaacaacacagtactttgaaaaataaatgatttcaagaaaccactaactcagctgttttaggtttcatcagaatatgtgagaaatgttaggataatattccagttctatttgtttaacaaattacgtaacaaatcttacaaagagcgatgctgagcaatgagcaacaaaaggggtactgccagctttggttcatcctttggaagtagcgagtctcgtagcctgttagtggatttgatcaatgcctgacaagatagttacttgttaatttaaatgccttcacacaaaaaattacaaataactatttactacttaagcaaaaagatctaccaaaactctttaaacctatataagctacataccactcagtacattataggggaccaggactactaggacccgactatctaaaaaaatggtaaaaaaaaattaagggcaattaaataacacagacaatctgaaatagttatgagcacaactaagagagaagaattaaaagaattgattctagaaacagaaaaatgggaaacaaataaaatcctaaattaaattacaataataaataatcaaaactgatctaggaaattgctaaacatggtaaccacctataagactactactgtcttagcactggtgtcatttctcaatccactcttatgtgtagcttagtaaagaaacgagctcttgagcagcaatctttcttatctccctagctagtggcctaatcagacatgctcaataacattacaatgtaataaacaaaatagaccttattatttcgtgttgcaccaaaagaggtggcctggtatcggagagtctcactccctgccatggaatccagctgctcttcagtcaggttctctgtgtactggacatttgccatctgctgaataagctcctgatatgtaataaaaacaaaaaacaatttagcatcaatatactctatgattcagaaatcaaataacctttaacacataacccacctgcagaagaacaagctcaatccctaccccctttttcagctgattcacaagatactggaaaaggcccctcagttccatggacggatacttcttacacctgatgaaattgtgtgttagatgctgaaggtgtaaagctaccagtaataataacaataaaaggctataaaaacgaaataagacaaaagaggaacatttttatcaaagtgagattaacagctacacatgaaaggaaagtaaaagaaataacataacaatgactgtaatttgagcatcaatggaatgtaataaatagctgtccaaggccaagtgtatttcaaagagacactaaacaccattgttgacacacacgaaaggaattgaaatgacaaagtcctccaactcacggacacagaactatgaagcacatcacattgcagtaaggaacaaggtacacattgatgttgtcagcatattggcacatattctaaaaattaaacctcttttctctttatgcttaccaagtatctcacaattacttaatgtggccaatgaaacccacataaggacatacaactttagtttcaagagtctgggatgaaagcatctagagacaaatactcaccatttcaaagcaaataacaacattaatagtttcaaaaaaaaaatgaaaagtaccagtatcagccataatcttcacttttggaatagattttacaatacttgtacatggtgaaggactttttcctagtaaaatacaaaacataactaacaaaaaaaaaaaaaaactggaaacataaatgtaacactaaaagtacaatcaattgcaattgtccaacaacaaaacctcccatagaaaagccctagaaaccttgacaacttaggaagacgaagcacgtaaaagcaatgcagccataagcttctgttgtgagaataagtttcacatcaatacccttttgtgcctccgacaattgaggtgtagggcatccacctatcctggactgtaccttctagtatcaaaactgactacatcaggacccatggactgtacaagcatgaaagaaccataatctcttggacaacccataaactgagctcaaatgaaaatatatctcgtgaagatagaaaatcaaatgagcggtccctcatttttaagagaagcatctgtctatgaagaagcctcttttttatgggtcaatctatgaatacatgatacataaacgtagactgaaccataaacatgtcctggaactcgtcaaagttacatgtagaggacgagctaaggaagaacacaaacagaaaaggcaccaactagaataaatcttttgacatttctgtgaaacacaggaaaaagttcttcaaacttcaaacctcacttaatcctaagctccacagtgtcaaggaccttcaattcataatctacacaaagcatcaagttgcagagatgctcaacaaggcaagtcaactctggtgagaactaagtattatgagccatcctacaaacttctaattgcatgatacccattattcaacaactccatatcttgaataattcacaaaatccacgttatataagcaatagcccaccgaaaattatatgcttgcttctcacaacatttttcattacaagtatccaacttttattctttacaaatgtatgacaaatttttaccgctttctcaaaagctggaacctcgttcacaacagatatggacctttttgagttctataaaaagattcaaggacctctaatatatttcacctctgatttcatcaaaccagaccagcttccatctcaagaatctgagttaaaagtgtaaattagcgtctttctcacacctctaaatctcttttacggcttgaaaaagaaagaaatgatcaatagtaaattccaacactgcatccacaataaccaccaacagattcaaacacagtcagagagcatgacagttaggcattgaatctctttatacaacctccagaatttcaacacatgacagcaccagtcaagcctagatgctaagacagatctgaccttgtaaaccagagaaatataaagaaatctttgaattccagaatgtcctgagctctatcctgcccctggtgaggcaaatctgcaacccggaaacttaagtgaagtatgccaagacatatctagaatctatataatgagtttaagatgacagtgaaagacatacaccaaaataagacagagaacgcatctacttttcagcgatcaatagaaaaaatattttagactataattctaccacaggcagaaaaaacctaaaatctatcataaggaagaaatcacatataatagcataaagctgactaaatgtagagagaattatccaatacatacaggtgaccccaaaatgacgccaaggattgaagccagtctgacaaatttaggccatcatctttaagcttatctcgccctccttgtgccaaacgttcaatcacaacatattccaaaatgtcgtactcaagctggaagaaaagcatgaagataaggtcaaatttgaaagtcaaataacataccatgtattgaaaaaaaaaaaaaaaactctaacaaatcatgtcatcagcatactagacatcacatatagaacttagtcgagaaagatgcttgtaatattacttcattagatcaggcaaccaagaatttaataagcttatttggaaactgaagcgttttactttagtcggctcggtataagcctcaactttaacaaccaaataactcccaaaaacaccaataaataaataaataaaaataactccaaaaaaacaaagaaagagtaaacaataaaaataagcttttaaataataatatgataacttgtgatcatagaagggggaagattacatagcatcgtcactataatatacagacttattaacaataagtgatataactacatactacagtcatgaaaagttcaaaaccatgcatcctaacaaatagcattggctaatacttgaggtagaaggtgataatgtggtatacgagacaggagaagggctataaaatatacacagctgatatagtggttgaaagaagaaataagctgttatacaatagacaggcttgatacagtggcttgaagaaggttctattttagagctcatgcacagtttattttactttgggcgtcataattcataactcatttaacattttagttaacttaaagtcctaaaactattaggacataaacaaaatataacacacgcttagaaaatcacaaatgcaattaaagtattaaaccaaatggaagaaaaaaaaaaaagaacccaaaaggcttgcgaactttttgatcagctttgcctcaaacaaaaaaatatgatctctgtaaaggataacaacaatggatcaaaacacgcataaaaatttctccagaatggtaaaaaaaacacacctgggtcaaatacttaaatgcatctacaacaggagcaatcatatctctgtatgcctcaatctgcaaaatattgtagaattataaatgcattatttctatgcacagttaaaatcataatcagcagccagcagccaaatacaataattgcagtagaacagcccctatagatagcccatgttgttgggtagtggagagtgtgctgagtggttcagggttcaagttctgttaagatatattattagaaagaaagaaaaattgcagtagaacaaaatattacctgatgaacaatggtccgtaatacagtcattggattggcatgagctaactttgcaaccatccgacctagctgctttaagttctccttggcaagccgtttcaagatccttctagtgtccaactgtataaaatactaaaaaataaacatgctttccatgcaacaagcattgcaattaaaattgctactttctacaaacatcacaagtgatataaccaggatcataccttggctatttgtctggcagctagaagcataggcatccgctcatcttccttttcccattcaccatacaagcgataacgcacctaagcagataggattcatctagcaagagtgtctacgatgccaaataaattctcaaatgaaagattcaaatactgttgtggaaagccaacctcatatggaagaagactcataacttcccagatctcctgtccaactgcaggatttgctggtattaattgtagagaaggaagtaaacatgttcctaaggcttcttctatcctcaaccttgcttccttcagatgcaaacgaggatctcgattcacaccattaactgattcaggattcccaactgcctcactgctatctacaagctcaagtgcagacaagtagtatcccctcaacacccggcatacctacattaatagaagaatataagattaaaaaaaaaaattcaccttttgtttatgaaaaagaatgctcaaaaacaaaatacgattcagaatataaaaacgtaatgtacacacaccttctgcaatagtattgtatcacggtaaagataaggtccagcagagacgagcatctggaagaattctttaggaagatctatgaatgaaccacgcactgatgaagttaccgtatccactgcatcaagactagctccagatgaagatccaatggattgaagatgtgcctgatgaacagtcttgtataccgaagaaatggacctttcaatgagcctgaaaaaataaataaaataatagaattattgaaaccaaagttagatgtagtacctaggggaatagaaaattaagcttgattatggcaaatttccgcttcacattgagcactagatggagagggaaagaggcagaaaagaaaaacaagaaaaaggagcatgcctttcatttacctaaacaagctgttacagatttgtatatgctccacgggattcaaatgtgagagacgaccaaagagtacatttgcatgatacctgataaaagaatattacaaacacaattttaaatagagaaaacagatacaactactgtattaagaaaaaacaagagcaaagattattaggtcactccagtattcctacagatgttgaagtaaaaatcaacagagagagacagagagggaaaattgataaaataacacactctaaacaatgacacattcaatttgtgagatttatttgtacaaagtgcacacccccaaagcacatgcgttaaatattatcacacaaactacagtaggaatcatccagcggcaattaccatgaacttaccagtcatccacagaaaggaaaccactaagcaagcccaacgtttgattattttcaagttcctcaaccctctcagcaactgcctcagtttctaatgctaaggctgtaaacagatctattgtcacatctccttgtttctcatcatccattagatctttaccggtagcagcaaggtttattttaccgatctttttagcctgcacgagttaagata

SEQ ID NO: 17014 - DNA, 6568 bp, Cannabis sativa
gcaaggtttttaataaggcaacttgcaaatagttatgaatatgaaatactctttttaccttagctcaggttttgtcccactaagtttttctgataaggtttttaacgagacaaatttaaattatgttaacatactagcactttatgaagcaagtataaaatgtgtgggagtgagatcatggacataacatattcagaaaacatatggattgcactttgtaacgaagtattaacacaagcactatcctaaagataatattacttgcatcgcgcaactaaaaggaaggtccattgaaggggatcgaattaaaatccatttcaccaaattcttctttatacatttcaagagaatgtatattggtgttcaaaaaattcaatcaagtgtctatcttgcagacttattcacaaagtcattaccagcatcaacatttgagaagacgatatacaagattgaaatttgtcatttagaggatcttcacgaatgcctaaataattgagagttaatttatgctggactctttcttttgaccaaatttttttaccaagtttttgatgagacaatttttatggacatcatttaattttccattcttttagtcatggtataaatagagttcacctcattagaataaacaaaaaaattctcattcaatttttctttctcttttcatcttcctcttttattcttatatattttataacacttctttttttttttttttgattaaaatgtattctttcttaattacatctgtttacttttgtcaaaaaaataaagaaaaaaactgaaggctaaccacaatggcacattggtaattataaaccaaaacccaaaaagagaagaaagccaaaaatacttgaaagcagaagagttcgattagtatttagtaccgcgcatttccaaaaaaaaaaaaaaaaagttgcagagagaaagagagactgagtatggtcatcatcatcttcatttcaaacccataatctataacaaacaatgctgcacgagattctgcttgcactttgtggctacaccggtgatctcatcatcgaccagagagaacactgcaattctctcggcatctctctaccttccgatgctcccgtcgccgatgagcctacttttaagctcgcccccgatatttcattcctcgaacccagcgaaaggtacctaaccgaaaattcaaaataatatgttgtattcaattgttgaatgttgaagagataatcgttgaatacttagttgttgatagtttttgattgcgtagagtttttattctaaggcacacaattgtaattgttaatagtcaagtgctgaaattggaggtgcatttgtgtctttgtttgcttttgttgataaaatgtacgtcttttatattttggagtgttggttgatgtgaatgcagggatcagattgagagaatcgtcactttagggttttattatagggagctagaccgattttcggtcaagtctcgaaatttgagttggataagatcgggaaatgtgaatcctttggtaacttctgagttgtccaaagggaaaactgggaggcagagtgtgtatcgtagagccattgctaatggtatagttgagattttgtcagtgtataggtctgctgttctccacattgagcagaaattgctgtctgaaactgttcccattttggcaacagttacccagggactcaataaggtcggcctgtaatttttttataccatttttatctttagagaattttgatataaataatttatctgtattcttattgggagtgtagttttttgttcttttgccacctctccatgagcttgttctagagattgagcgagatgatattcggggtggccaacttcttaatctgttgcacaaacgatgccattgcggagttccagaattgcagacatgcattcaaaggtatgatcttatttcttgatatttcctgatcatttaatatgtaaacttttttgtcagccagcacctaattcttcattgccttgagatgattagtataaactaaaccagaatgtatgcatgcttggtgttcttaaattagtattgagctactgcattggttattgctcaacacttacttgtttatttattttagtatctggtttttatgtagacacaattatactctgtatatctttcttttcgcttactcatgattgtggtgtttgaattgtaggcttctttggcacggacatcaggttatgtataaccagctcgcagcttgggtggtttatgggactcttcaagatcactatggggaattttttatcaggaggtaatgtttgaaggaaacaacttcttaggggtgaaaataatttcattgtcaaacttttttgtttgaaggtagtttgcaaggctcttcttgtttaagggatttatttggtgctatttggaaattctataacaagattacatatttattatttgaaccaaagatctgattaatttgtactttttgtatgcttctacgagattattagtggatagctttgtgttgtgaatggtgtatttaaaatgtttcctttgaaaataatataagtactacaattgcattttgaaaagagaattaataggttttgcaattgcaagcattggataaatatttctatctattctcataagctcctagaagtcatgtattgtagaaattttgtgttcatggtattgttgtattttcattttcctgcttggttttgtttgatccattgcaaggaaaatgaaaagattttatgggcttataacctttcaggcaggaagacacagacgtagatcatagctcatctcattcagacatatcagaaaagttgtcacgattatcaactgaggatacatctctaacagattggcacctgggttttcatatttttttggtagcctgattggcctttcctgtgcatgtcttgtttcatactcataattttcacccttggtgtataaatttatatatatatatatatatatatatatagatgttgacttatttttgcaattttcactgaagtcagagtataggatgatactggtactgctgctaaattttctattgtcacttttttttttctttcattccattcaacaaaatttcacaccttttaaggatacttaccttgttagggttagtgccgtctttttgtaatattacagtcttgaaataaagatggaataggttagttaacaagtgtaatttcataagaaattgaatactctctaacaaggaaagggtgctgtaatttatgtgacattagagtatagtagtttctcatgaaagatttgaaggatctggagttcactctttaggccaaaatagttcattttagcttcttcaatgtggacttgaagtttctttattattccctaaagaaaaacttatgaatggaatctcacctaatatttcatgtatcatactggattttttctttcttttctgtaggatatgctaccagaatacattcacatgcgtgttgcagaatcaattttgtttgcgggtaaagctatcagggttcttcgcaacccaagtcatgcctttcggtttcaggatgttgtacatcatcagcaaatgccaaggggcactcagaaatttcaaggctttactggacggtatccttttcataaggagccttttgttgatcaagaaaagattggagaagaactgcttccacagtctgaagcggataagattgaagcgatgctttccgatttaaaggttttccagccaactttatacaatgagagttcaatttttatgccttgacttcttgaacatgtagatgtacaagatgacagcttgcaattgatcgttgatactgaaatgaatagttttatactgtctttacagttatttcagtaggcaggagattaatttatttctggattattgtgcaggaatcttcagagtttcacaaaagatcattcgaatatgccgttgattccatccgggctattgcagccagtcatctttggcaggtctggagtgtgacatatttgagtctgtaatgctagtggccagtgggcttgaaatctaatgtaaacttttcactgctgcagcttgtagttgtacgagctgacctgaatggccatctgaaggccttaaaggattatttccttttggcgaaaggagatttctttcaggtatatggtgcacatttcttgaaagtgatgttctttattttagcaattataaggtttgctaggcacatttttcctctccgatgaaggaagtgaatttaagtcttagtagctcttatagattttatattctgtgtgaaatactctatcttgcgccatattaatatttcttgaattgtgcagacattactgacactaataatatgtttatgatttaagaaaaatacttttaacttgaactaaattactatgccagttatttctcgaggagagtcgccagttgatgcgtttacctcctcgccagtcaactgctgaagctgatctcatgattccttttcagctggtaagataaatattacatgactcatcttgttttgtaattgaaattgaatattagtagttaggaaataaatccattgactctaatctatttgcaatataggcagcaataaaaactattggtgaggaagacaaatacttcacccgagtatctttgaggttagagcactttttcaattcctccaactcactttcttttgctttggttgtgtggaaaaattgactcatttgattaaagactgctgagggaattttcggtgcttccttttgatggtttcactcacaacaagcttagtgtatgataaactattctctaccttctaggatgcctttgtttggaatgactgttaaatcctcccaaggagctttaccgaaggatggaaacataggtggtacttcagaagcaacactagatggctgggatgggatcgctcttgagtacaaggttgattggccgctacagttgttcttcacccaagaagtgctatctaagtaagattacaacactacttgtggatgctttgctcttgatgtttagtatttaatgtcctatttaatttttaatcaatttttatttaggaagaggtaaaaaagctgtttttctcaaacatttgattgttggaaattgatgtttcttttttgcttcacacatttacatgtttacaatggttttgcttcagatacagcagggtctttcaatatttgctacgtcttaagcgcacacaaatggaattggagaaatcatgggcttctgcaatgcaccaagatcacacagattttgccaaacaccgcaatgaccgcataaattgctcagtatctcaacaacgacgacaacgatttagaccaatgtggcgtattagagaacatatggcattcttgattagaaatcttcaattttatatacaggtctttacaagtttcttattcccttctcaatatttttccttaatattagttctcttagaaaaaaaaactgtactgaattgtgtttatgctgatcttatttgtcaacagaaaaaaagtttttagactgcttctatgctaagatgattggcttctgcaatcactgcttactttggttcatgtgattgcatgaatgtattattacaatcactatttgtaatatgtataaaaccataaaagtgcacatctttacaatagtcgacaaatgttgaccatctgatattccatcctcattcaaaatgtttctgtatttgctataggtggatgtgatagaatctcaatggaatgttcttcaagctcacattcaagattctcatgattttactgaactagtgggatttcatcaagagtaagtcaatatatagctctcattccatcttattctattatttgctttgctgttttggaattgttagtgtcttactattagaataggctgctattttcacctaacttacaaattggatatgagtaacgatgtcactttgtatcaatttcgtagccacagtacattaaatataacaagggaacgtccctttcgtttcattgcaaattatcttctgggaatgggatatccttgttcaaacttcttgtgttggagactttctgcaaagcagtagtatctagtatgtctcaagggcgcattatatgcaaggacaataaatttatgtgataaattgctcaatatgagaataatatatatagcttgcttttacaaggcattgaaattagttttttaatacttgatattcaattacaagacttattgactcattttgctatcttagttctctacaaagcaagttaatgtccccagttttgctgagaacttttctggttttgcttgaataatttggtgaagtggctttatttattcagttgccatattattacttatcttctatatggtagctgccgctctttatattgatggtatttccaaaaaaaaaaaaaatctgtcaggtatttgtcagctttaatttcacaatctttcctggatatcggttctttatcaagaatactggacagtataatgaaactttgtcttcggttctgctggagcattgacaatcaagaaagcattgcaaatacatctgaactagaacatataacggaggtacatctggctaaca

SEQ ID NO: 17015 - DNA, 3185 bp, Cannabis sativa
tgatattagttctaacaaacctattgttatttataattgtaaggcattgttagtagaattgcccttaattttaattttttttgtaaaacgatccgagaataaagttgtgcatactttagcacgtaactctattcacatggtttgattgtacattcagtatggcttctttgcctgctgaaatttcattcttagttttggatgacttactaagtgttttctttttttcaaaaaaaaaaagaacatattattttttcacctacaaaaacatagattattttctcaatatatataaaatgctaaaaggatgattaagtaccaaataccaatcactatcgaagataactgatgacatatctattagagaattgttaaaaggtattattggtacctagtactttatttttgtgttatactactattagtgcaattaagtaacagatcttttgaaacttaggaaaaaaacttttaaagaataaccaatcgtatgatgttacctataaaaggtcctggacaccactggtgtttaatagcaatactctatttattattgatgctaattaagggtagtcatccgatccaatccaacctttttttcttcatccgatccaatctaattttaattagatttgaaaaatcatcatccaatccaatccaattagaactcaaaatccaatccaattgctaattagatggatggattttttagttgaatatttaattacataacgaaattttaatattaacttaaaaaaatatatataaaaaaaaaatacgtaaaaactaaggccggtaacactttgttttttaattttttattcccaaaataaaaataaaatatgaaaaactagctgatagaggaaaatattatcttctatcttgtggaagagaaaaaaaaatgaaaatattactggtgatataattaacctattagcaataacattttctcccgaaaaacgatatatatgcgagaaaattagcccaagtcgaaattgctgattcacgtatgagaaggatttcaatctcacatccagaaattcatggagccaaaaaaatataagccgttgttattattattattattttcttttatttcatttcagatgaatataataataataatatattgtaatagtatatacaataacggaaacacaaaaataaaagggttttggcaaaggatgttgaattaaatgcattaataaaggtctgacacaaaaaaaaatgcattaataaaggtacatgaacaatttggaaacttaattaattcaaaagacttatttgattttttttggtaataaaatctgtaaaaatcttaatataatgatactcatccgataaatgcgctattcttacccgaaatttaattttaggaattttttttttctttttttttttcaacccaacaaataatatattgtttaatatttgaatttattcagttatttttttttcccaacctttacgccttaaaccagctcaaaacttcattagtctctctatcgtctctctgtcttctctttccgcaagaaaaaatgcaaattgtactgagtatggagttcaactctggagaagagaaaaaccacatatgcagctactgtggcaaaagattcagctccggcaaggctttgggaggacacaagagatttcatatccaacaaaaacgtcaagctgccgccgaggccgtggccaaagcttgtaccgatcaagacagtggtggtaataacaacaacaacaatggaagtagtaggttctattgtccagtgtgtcccaagcactttccctcattgaaatctgtatctggtcatatgagaactcatggtgatagggtttggcgagggattaacccaccagcaccagctgataataatcttcataacaaacccactacaacaacaacaacaactgttgatttgctgcaaagtttaccatcgaattggtccaacattggcggtaagagaggtaggaaatttaatccagatactactagtcctagtattgctgcagccattcaactaatcaaactttctcaatcgaaagatagagtttttacgaaacaaattggtgatgggtatgaggtaataaaagcaaattcttcttctagtactgattattataattctgatcatcatcattatcatcaagaaaaataccctagggttagggttattaatgatgatgatgaagatgatgattttattagtttgaaaagaaaggttatgatgattaagaagaataatggaagcgttaatagtagtagtaacagtaccgaaactactaccgatcataaagatgatgagaaaaacgtttctaataagaagctgaagattagatttggtacttcttcgaattctactaaatgttacaaatgtaacagttgtgataaatcttttactacatttcaagccttgggaggacatagctcaactcataataaagataataatcacaagaagaattgtactacaaagaagatggattccaaattattaaggcccaataagtacttttatggtgatcaaggtagtggtcgtggtgatgtgcttcagattatgatggggtcttcaatatcttcatcttctcaattgatagcaatggatcatggtggaaattgtagtagtacagctgctgaacgacgtcgtacgcttgatatagatctcaatgaattgcctgttatgagcgtaactgatgtctaagaaaaatggttagatttgttctaatttctcttttatgttaatttagaatttttttttttctgttcagttagatattttgtttttttgggtgtaaaaaaaagtttatttttaagaacaatctagatcagttagctattattttgcaatttgtttctctaaaagttcttttatgacttttctatgttatagttagctattatcgtgtagctgatataggcttgcaattttgaaatgtgtttcgtgaattagcgtacaacccgaaacaaccttgtaattctgacccataaacaactgttattctttctacacacctctttgattgttcgaaaaaaaaactcagttcaagaaaaacataaaacattttatttgaaagaaattgaatgtccttctcttcaattatttctctctgtgaattttataaaattaatgtgattgtgggaagagttttagatgggattattacaagtgtatatgaaatgttaacatagagac

SEQ ID NO: 17016 - DNA, 5068 bp, Cannabis sativa
atcttttttaatgaatgttgagagatgggaaaatagaaattagaaacgaagcacaccatgtgtaagtgtctttttgcttggaaatgcaatcttttttaatgaatgttgagaggtgggaaaatagaaattagaaatgaagcacaccatgtgtatgtgtgtgggggatagcaccattctgggcagtttaaactgtaacttctgggtgtttacttggagggtatttggcaggcgtattgcacatttcccaattttagcttgaatcatcatagagttcagtgtatgagctgacctggaaagatattagcttctgcaaaaaagggtcaataagatattctctgaacatttcatttttttaatggctgtatacgtttcttcccgtataagagaaacaagtttctatgaaacacataccccaggactcaaaaatttctttgacgcaggatttcctggaatgtccatgctcttcttggatggatgtggttctccgcatttcttttttagatgtgaccaggcttcatcttgttgtatttttccagaagaattaatctgatctgccttagccctgccatccgacattccatcagacaccattgctttttcattcctcatgacttttgctcagtgttcaatttcagacatgtatcaccagttacatagtagcatcatgacattgcagccattgcaggttttctgttaatttctaacattgtcttttgagaagtctggatttctataatgtttaaaatgtctgaacttttttctttttttaatcattttcttttttgattgtttattagtattatagttgttgctattttgttattactatgatttttattgtggtttggaaaattaacttggtcatgaatgtggtttaactttggtgtttcctaattatttgattttacagggtttgcttttgtttatatggaagatgagaaagatgctgagtatgctattagaagacttgacagaacagaatttggtagaaagggacgtcgactgcgtgtggaatggactaaggtaagttaataatctttaatggtttggaatttttaaaaatttctgcattacatggctcccctttgcttaacaaacttatttggtttgaaaaattcaatacttgtaagttttaccactgtacctcaattgacagatttgtctatttgagtcattccaaattacacactagtgtgatagctcaattgttaggcacgtggtttgcctttatagcttgaggtttgaatccctcccgggcatcaacatagcaattgctatggtattttggttcccaaataatgtagggggtaggcaggggagcttagtttttttcctttttttcgccctaatgtttgcacagtacaatcatattggtttttccatcttaatcctcttgcctccatcgttttatgtccttgagctcaattacgtggaaattcttctaaatagtaatcttctatttagtttcattattaatttttagattgtgaaattattacatatgtgttaggtggattcttattttttctttatctcagtaattattatttttgctaatcccatgaaatttatggcttgcagcaggaacgtggggtcaagagatctggtgattcaaaaccttcagccaacactaagccatcaaaaaccctatttgtaattaattttgatccagttcatacaagaacaagagatttggaggaccactttgagcaatatggaaagatattgaacataaggataagaaggaacttcgcatttattcagtttgaatcacaagaagatgctaccagggcattggatgcaacaaacctgaggttatacttttgtgttggaaattcttcggtatagtttttcgagggggtgtcagtctaagacaagtggcccttttctcttttctaaaaaaattcttcagtatagttccctaatagatgaattttgcctcaatttttgtctttttgtttggacaaaaacaatatctaaatcattttaagacttgattcaaacagttttttcttggaagattgcattgtctctattatatatcccttgccttgccttgactttgatttttctttttgtgagtttcagcaagtttatggatagggtgatttctgttgagtatgccattcgtgatgatgatgataggagaaatggctacagtcctgatagaaaaggtcgtgatgcatctcctgaaagaagctatggtcgtgggaggtctcgtagtccatatcgtagagatagggaaagtcccgactatggccgtggatctcatggttccagacctgattcaagaagaagtcctggttatgatagaggaagaagtcctggttatgatagagggagaagtcctggttacgaaagggggagaagtccagttaatgacagatacaacaggtataacaaggttctgcatttgtgtagttttagaggtttactttttccatttgttgttatatccttctgtttggttctttcctgaaaatttcaacaaaataatacaactgagaactgtagacatattaatgaaaactgtaattatagaaaagattctgaactcagtcattttgttcatctgaaccgtagaaacattagtgaaaactgaaatagatgtttatactcgttatcttatgaatatactgaaattagatgctccagcctaatggtgttttttttttctcctgaaacgcagccgttcaccactgccaagggaaagatctaggtcttaagaagttccgtgatgatagtgtttggtaggtttttgtacccggttgacattctaactcttggaaattgacttgtctgctgctcttgtgatgtgtttgaactttaaaccttcatgtgcttttgaattcttaaattatagatattgttttaggctgttatgttttatggatttttaatcatttttatctgcaagtttatatccacgaatgcttggactgtctgcatatattggtcattggggaatggaaatcggtaccttggttcattctaggagaaacatgaattccctttgtggagttttgagatgtgagcatctactttttggtaatttccaggcacaaaaaaaaaaaaagactttgttggtcacataatttcttttgttgtctccattatgtcatgattttgaacttttcttggttcttattgattatttaaatctagatttgaaaaatttactcgattatccatattattttggctttcttgattacatatatgcggaatcactattgtatcagtaaatctaataaccaaaaaaaaataaaaaattatgggatcagtataatgaattgaaaagaattaattttcattttattcctttggttacatttgaaagtattctaatgaaatgaaatactatatcaatgcgagatgaaaatgattcaatacttttttgttttttgtcattttgaattttatttcattctgttatttttatttttatactcattcttatttcaatatttttatccctcccaaccaaatttaccttaaaatactataatctctgtgcttggcaagtggaaccacgagatgaatgagtaaaaggattgattttctcacctttctcgttaacaattataaataaatatagaagcaatgatccgtagttttatgtaacatgtccctcttagacagtcgtgtgcctaggtcattgttttcccatatttttatgcccaatagagatataacttgaaatttctccaaatttaagggaacaaaaaaatggttttaaggttgggtggggtggagtgcactgaaaagggccacaacttgaaaaaagcaaacaaaaagaggaaaagcagcaaagacaaggcataccggacaggtaacagtgtcacgtcctttgcacgcgtcttggttggctcccttgttctgattcactcattcaaaccgaggcagcctcttctctctctctcaactttacccaatcacgcagccatttccacatttaagtctcaaatatatgatggtttcttctgtttagattttactaaacaaaaagttaatacataatacaccaagctcccaaagtaaaatagggaatgagaaaaaagaaaagggggacttgtccttttctttttgtttttaatgtcacgttgtttgaggttggttgtagcagtattatagagaagcagttttgaaactttttttagatttaatattaccatcagttgagtcaattgtcttttaactaatgattaaaggtgcctttggctgactatattaaaaaaaaaaaaaattaacagatgtctttgtttggccattggatcctaaaaattatggtcatgcatcactcatcatgatataatctatttataatttgaaacctgtttgaagccttgatggaatcttgacatgttgtgtttgtgattatagtaatatcacgagaacgaaagaacctcatccccatgatcaagatatctaaggttatgacagggttgtgattacttgtccatgtcgttttgtttttagcactaagtcatctaaacaataacagtactttgaatctattcctatataataataatactactgtattttgtaaatttattatgacagaggtagaactgtagaggcatcagtgatcaaaattaaacgtaaggtatgttgtgtttgtcatttaacaacgcattttacgaaacaatacaaaaatgtctactttaaggtcatagtactgagcacgcactaactattgctaacataattcccacattcggtcttgtatatttgaaatgatattttctagcaaatattacaaataaataatagtaaataaaagtattatttatttactttttttaagatgaagataaataaaagaattcttttttttttccctaaaataaatgaaagcaatattcttagtatcattacttaactttgctttcgtctgaaaagaataataatacaaagaccattttaaattaaataatataccaacaccaaaattaatagctctattaaatataaaactttagtacaatcgcgggcataccataaatttaaaatgttagagatattattacaatggaacaaaatcaagatttattacaactctatt

SEQ ID NO: 17017 - DNA, 3194 bp, Cannabis sativa
aaattagggttttagttctggttcttatggggttgaatctacaagaaggtcgatgctggctcttaaatcagaccctctcaagcctcggcttgaccagatccgtaaacaagccgaagatcacaaatccctggcgctcacttatgcagtctttgcgcggaagctcaaacttgaaaactctaagcttgttaggatctttgctgaactctcacagagctacaatgatcttcttacaaaacccgcctatcaagctctggtggcttcagatgctctctccattgatgagtcggtgctgcgccaatttgaaaaggaggtgaaagaacgaataaaagtcaccagacaggtgatttccgaagccaaagaatcttttgataaccagctcaagattcagaagcttaaggatacgattttccaagtgaatgagatgttgtcaaaggctaagaagcaaggagcgttctctagtttaattgcggccaaatctatccccaaaagcttgcattgcgttgcaatgcgattgatggaggagcggattgctcatcctgaaaagtattcagatgaagggaagccaaaggctccagaacttgaggatccaaatctgtatcactatgctatattttccgataatgtggttgctgcctcggtggtggttaattcggcagtaaagaatgcaaaggagccatggaagcatgtgttccatgttgtcactgataagatgaaccttggagcaatgcaagttatgttcaaattaaaggattataaagggtcacatattgaggtgaaagctgttgaagattacgaattcttgaattcttcttatgtacctgtccttaggcaactagaatctgcgaatttacagaagttttatttcgagaataagctcgagaatgctactaaagacacaaccaatatgaagtttagaaacccgaaatatctctccatattaaaccatctgaggttttacttgccagagatgtacccaaaattgcatagaattctgtttttggatgatgatattgtagttcaaaaggacttgacagggttatggaaaatcgatatggatggtaaggtgaacggggcagtcgaaacttgttttgggtcgttccatcgatacgcacaatacatgaatttctcacaccctttgattaaggaaaagtttaatccaaaggcctgtgcttgggcttatggaatgaacttcttcgatttggatgcgtggagaagggaaaagtgcacagaagagtatcactactggcaaaatctggtaagaaaatcaatattgcatttattcttttccatttacaaaaagcttgtacttagattataatgaattgagggtactgatcttaatgcagaatgagaaccgtaccttgtggaagttgggcacattaccaccaggtcttatcacattctactctaccacaaagccattagacaaatcatggcatgttctgggactgggctacaatccaagcattagcatggaggagatcaccaacgcagcagtggttcacttcaatgggaatatgaaaccctggcttgacattgctatgaaccagtttaagccactttggacaaaatatgtggactacgaattggactttgtccaagcatgcaatttcggcatctaaacaagtagagagtccatacttgaatgaaaaagatctttgctagtactacaatccaatccagcagtccccacagctaatctaatattttcatggggttccatagctagtgcttagtcatattatattagtgaacctttgttatcccatataatagaggaaaatttgcatcaatccaagtgtagcatatttctttcatcatattaaatattattttagggtttttctttttttcctttcaaaatgtctataggagtataataaatttgcagttattaaattatttaatgggagtagtttgcctaaggcaattatgagtaattttgctgtttgttctgtctaaatttgtgaaagcatctcattatttaattcttcattaatattttacaagattgatgtcgatggaagtatatagacaattatgagtaatttgttctttcttctggactttcttttaagaaaataatataataatacgaaatctacaataattttaggtatgtacaaaaataacaaaattattataaaaaatcactttattctggctgaaattcaaagtccaaccttaataaattcaaataatggaatatttttaattaaaaaccgttgaaagtttattaatacactactgtacaaacacgtatgccatgctactgaatgatttggccattatgtaaataaattctaaacgtttaatgctacccttttccaaataaaaaaaaaaaaaacattttattgtgatctagtgtattttttttgacaatgttcaacttactattattgagaacccaacagtatttcaagattttagtgaaggggaatcattcgttctaactttttcaaagattagatttaattttcactgatattgattgatgttgctacttggggaccattcgttctggtcaatcgtaatttaaatgtaatgttaaacgctgactttttagtgaagaaggaaaaagggacaagttaaccaagtagaaaatccggagacaagttaactaaatgtaaaaaatccgggtaaaatggtaatttcattttaaaagagagaagaaaggactccaaaatgaacagattctcctgatttaatcgatcactattcactaaaatactaggcgaaatttcaatgaccatacaattcaaaaccactcatataagaagaataaggtaaaaagaaaaaggaaaaaaaaaaggttagcagaacatcatcctataaaaatatcatgtacccacgaaaaattggacacaaccctctaaattctatccaaagacttacaaatcagtgatcttcgaaacaaaatcaaccactctaagcttagttcccaacggtaagcgcaggtggtggcagtggcgcccgaactgttgcaggttttgcacttgctgcagtcatgcgtccaccgttctcagctctctgatagccatcccctccacggtttgccactcctcctcgtcccattcctgtttccaaagtccgacctaccattgaaatcaccacgaccaccatttcctcggccacctccataaccacgtcctcttgttcactgtcgagttgaatttagtagaagaaaacgtttg

SEQ ID NO: 17018 - DNA, 5012 bp, Cannabis sativa
tgtaattctttctgtgaagctgaagttacctgcagtgagagtatgaatgtattaagtttttttttgttagttaggtagcagagtgaagaacattaactacaaccccaacatcataccattgcttgtaatatagtcaaacgattcaagtgcctctgaagtatttcggtatatgttaggtgataacatatgcaccaagtgattgtcaacccacctacatatcaaaattcagcaactgatgtgtcagtcaggttgaattcaatatatactagagcctacataatattattagtaaaattgcatagcaactccaagtagaggtaaggtctttaactgtaagaaacacagaataatccaagttccaactagttttagatcctgaaacttgtcccgaaaaaatttcagttgcttttttaattaacaagatcatagaaatagctatttctaggggtcatttcggttaccctttttaacaagctaaaagctcaaattgaaccctgcacaattgaaaaacagaaactgctctgagcaaacttcagattttagctatggcttaattttttggcccacaaatggctctgtaagtactcctagcttgttatatacttaaacaaatttgccctacatacctccataacactaacttggaaaattccccaaatattatagccatctcaatagaaaaattcctgaagacctaatggattatattttaagagttccaatcaaagactctgaataatataatctaataagacactaaaataatcaacagtcagtggagttaagctgtgaacatataaatagtcccatttcatttcattttcagatttatgcaacaaacaagtaccaacataaactacgcaatagcaaggaagaggaaagaaacatactggcgccacttcgtctcttcatcatccccagaaggagctactttgtttggaagaattttgccacccaatttatcaataataactgaaaacaccagcatgtttgctttaacatgagatataaacaaattcaaagaagcctaaaacacatacttcgacagttttaatattatcggaaaaaaaaaaaacttcaaacaatatattgaacctgatgagtcgaccagggcttcaccatcaaccatcaaaataggaactttcttataatcagaccatttaatctctttcttgctaattgggttgacttctacaactttgtatggtatatcatagtagtccaagaatgctgagacaaaaataaacccgataaggtaacagaaatttgttaacaacccaagttgtaaaatagatgcaagaagaaatattgcatctatgaagttctccaataacttctatacttcaagttcaaacaataaaattccataaataatttattaaaaaagacatatgtaaatggtattgatgattgaaaggactctaatagatcagtgtcactgccatctccttgtacccaatcaaaatgctcacatttgttaaaataagacatcaatatatacacatctatatgcatatatatatataaaacacttctaatagataataataactagaaatattaattttaaaaatattttactattagattttgatccaacaatcaataatagaaaagaaatatgtgatttcatgattaatttagctacttaattaaaaaaaatacactctttttacactatatcgaaaatatatttttatcaaacatatttaactcttactcaattttttttacgcctcccaaccgatggaacaacctcagccatataatagcccctctaatgtaacaatgagatatatttttttgattagattgcaaaattaagaataaaaactcatacttttctaataacattaactaagaatgcaccatatatctattgaatttcttactatgatctaagacagttaagtataaacaaattccattctaattgaagaactatgattcatcaatgaattcagaaccaaaaaatcataaatttttctctaataattctacaaaaactacaagattatacctttaactttattgcagaaagggcaagcttcatactgataaagaacaacatctttagggaccaaatccttcgaaggaggttccttagcgtaaacctcctgagaaagagacaccgccgcagcaccagacaccataacaccggcgatgccagttgaaatcatggctctagacgagccagaggagaaagattcaacaatgggagagaaccaccgggtactagtacgagggcgagaactggtagtggtggcgaacaaagctacttggatgagacggtggttggagagggctccgccgccatctacggtggagagagatctggataggagagaagatgtggcgagagctgaagcccttctcatggtgatggttgttgattcgatcggagattttctggttgttgggagagagttcggagaagaaaggtttacgtaggcttattgtgaatcaagagattttaggggcttaaggggttttgatttggggtttttttgaaaagttaatataaaatttgggaaaaagtaaaattttttattaattgtggtatttttgaaaaaatagtttaccaaaatttggatttttacaaaaaaaaaacatattgaatttttggcaaaagtttacaattttattatcactaaaatattgtctttttataaaataactgtaaaacaatataataaaacaattaaaacaacaatggaacaactaaaaaacaaccatggaacaaccgtaaaaacttaacgcagtatacagtataaaacttatacaatatttttgaaaaaaaaatctgcttcacaataaaaaagtaaaaaaattaaaaattacagtatatggtgtaaagactccttttaattttaactaccaatctaactatgcttttaaaaataataataaaaaaaaacccacattgtgtggtgcagtagtaagaatgtcttttgataacatctttcttagcttagattaaggattcgaatcttgtcacgactcctcataagagcgtttatgcttggctttttaaaagaataacttgttatggaggataaggtataagacccctattgttgtgtcgcctaataatttgttagcgatactccttaaaaaatattgcattaaactatatgagactcgatacttagttgaaccaatatcgaaattgacgtgtaagaggctgctaggtaccactagtgccttttaacatttctcttccctaaaagctattttcttacagtagtactattgagcaccagaggtgcctagcacctctagatatatcaccttacgattgactaacgacactccctaaaaattattatattaaattatattagacccgattctttgttgaatcaacaacgatattgacacataagcgagtgctaagcattacttatgcctttgagcatttatcattttctttagctatacgagacccgatacttagttataccaataacgatattggcacgtaaaagattgttagataccactaatatcttttaacatttctcttaaattatataagactcgatattttttttgaaacaaagattgcaactttcattaaagcaaatcagctaacaaaatagtttacaaaccagaagggacagacctactggaaatacgatcaggtgaaccaaaagaacgaactaaccaattagccgcttgattcccaaatcgtttaacaaactgaactgaaatataaaaattagtaaaagaccgtataaaattaatacaatccaaaataataagaccaataacaccaaataatccttttaacaatatggtttttcaattccaacttgtcatcatttttggcgcgtgttatccacgctcctagacgatatctatctatctatctatccacaaaaccctttggtcccatttcttgtcctaaaacccttctctttcatatcgaagcaaaaccccatcaatggcttcttcttcttcttcaaaattcttacagttgggaactacaatcttccgagcccacaaacctctatctctattaccaaaaccttctattatctgttcctcctccttctccaaaattttcctttcttcccaatccctgcgtttccccgccacccgtagtagctactactgttcctccgccgccgttgatgctgtctccgccttagaaagcagcagcactgaagaatctcgtcacccttggcctgaatggacggccttcgttgaccgattgactaccaagggttattttggcgaaacccttgctgctgatgaagttgacagtctttacaagaatatgaaaattttgaaagatccttgtctcagcttcgctcgtgatcgttacgatgttctcaagtaaattctctctttctctgtttggttggcgagaaaattctagacaaaaacttaacttcatttgcattttgtcttaattttccatttttttatatgttatgatttagaaagtattcgttttgagcattttgtcaatgttcgtaacttatctatttcattgtttggttgccgagaaaataatacagacaaaaaactcgaactttatttacattttgtctcaattttccatttttttatgtatgtatgaattagaaagtagatgaatttgtattcattttgagcatttcgtcaatgtttgtaacttatgtggttgtttgaattgaacaccaacacaacaagaacactttcctttggattttacttgttatctaagcaccattgcagggtttaacattacaaatatatgaaaattttaacttttttactgatgggctaatgttacatttgtagatcattgtcgacgaaagatattgaggtgattgttggaggtggatgtcctaatctgttaaggaaagctgttaattcagctaaaagattgagagcctatgtcagactcgatgaaggggatgtatgtgatttttctcattgtgatgttatagcaagtttatgtgcaaaatatttggatctttatttttcgacaatgttaattatccagaatttctgcaatgtcc

SEQ ID NO: 17019 - DNA, 5670 bp, Cannabis sativa
attattctcaaagcaccaggaaaatacacacaggaaacaaacaaaactagaatttagaatcaaaccgattacaccatgtcaaaatgacaagactcctatatcgtaaacatatttatatttatttaattgagaaaaacatgaattagaaaatcaacttcaacaactctttgattacaaattgttaggaaatagtagactaaattatatacatctaagtaagttgatagcatatatcatattctaatctatatctttaataatgtttttattattattaattttacgtctcaatatatatatatttcattttcaaatttttcaaataaaattcatttgagattaaaaatatatatgtaaattactttctatatccaaaatagcataacaccaaattttgctacaagattagtaagataatagggtaaaattgtaatataacccaagcaacattatttctttctacctccagaaagaggggagaatttaattagtaattgtgggtagggagatagaatcaaataatcaaagcaaggagaatcttattaaattggcaataacaatagtgtgttttttaggtttgtgcaatgccatggaatcaccacaatacaaagtggtctacttagcaaaatcagagtttgagatcagactctatactcagttctcatggatgtatgttcctgttgtttcacttatctcttttaaaaaaatccacccgaaatggctagaagtactctcctcatcttcctcttacacgcccattatttctcctacttgacttttactttgtttttcacaaatatatgattttaatttttcaaccaagcaaatataattgaatagaaagaatttttgcccataaaaattttctttaactattaccactatcaaattgtgcagagaaattgagtggtaataattcaaaggaaacttcaaacagtaaaagaaattcatgaggcacaacttgacagtttggggacaaaaattttatttattcaaatattatttgaggaaaattcagagtataaccccaaccatccatcctcatgattccattggataatcagtagactttttgtataatttgaatctcaaaataaggtgtttttttttaaaaaaaaaaaaaaaaaaccatgcaagttgtttcagtatatccaaggagctaacttgaacttctctaaaatagcaatgacagttctagcattaacaagcatagtaccaggagctggacctcgttattcatcagcctattttttcagattctacttgcctgtgaaatttcaagctaacccaccttcacctctccctgaactgaacttgaaactccctgcttaggagagtcactatgtccctgtgagaaagttttttgggtttgcgagagattccaacattttgagaagctgagaagcttgccaccagcttgagcaagtctccatgggcaaatcacacttctttgcaaagtggctatgcatactctattgcctgttaaagtttgtcttccaagttcatcggtgtttatcattgtataaatgttagaatattgatatattgaattctttgtgcataataatcaagtgaatcaaacatatgccaatgcattcttctcttacctttcagtgagatcagtttactacttgtcatcagggatgatgagaaaaagtgtaaacaccatgttgatggtacaaatgaaaaggcattatgagggaaagagaaaattgtattaatgtaagagttctcataccaaaaaatctattcttgaaactaaatgtttttgtaaacaatctatagatatcaaaatgaaagaataaatgaaataatgttgcaaaaaatggtaaaagttagtttggcctgcgtctttgatgaaagtagaaatgtaaggatgctctaggagtagtacctctcttgcttagcataggcaacttgaattgactacggtaaacaatcaataaaagacatactagaacaacaaatacaaatattggagatgacatgaacttcacatgtaagtttaaagtaccatagattttctccttcgacgaaggcagctcttagtgtccaagaaacatctgcaggaccaaagaaaatctctttatcattgagacacaaagaatcttcgattaaagatgccatgtaaggcactcgaaaacaataatgtgcagtataattttgctttttagaaacactgctcttatcagcccaagattttgagcagacatgctgacctttctcctaaacccttgtaaggtttgcttttggactcaaattcaacttgtcataaatagcaaaaaaaccaaataaggcatgaaaatgggcagatgggtgggcaaaagttgtcaaattaagtaaaccaccacttgaagagcataagtaaaaaaaagtataaagtagaatgtattaaatgtgttctaaaataattgattatagaagtgatactctcaatgtttacttatttaaagagaaatgctttgatttctgaaagttattaaaaaataacagatacattggataacatgtagctatagccattcaagtgtgaagtaggccttaacacaattaaacataaggtgtttagtaactaatcgacaatcaatcaatcaaaataaacatgaatgaatctagtgaatgaaggtgttttaaaaattatgcaaacatcacttatccctatcaatacacaagcttgacctatagtcttctccagcaattgatggccagtccaaatgacttaaattgagagaagtagcccttgctagtgttttgcattgctcccagtttggaactcctaccagatataaagaaggatattcaactttgtgaagctcattattattttccctgtcactaatatttagcccaaaacaaccatagcaggtatagttctacatgaaaccagggctaaaacaagggtgcctcaactctagtatacccccagggctttccctgaggacttccgtatgactgagcaaaataactgatctatcaaacgcttcattcaagccaaatgcaggcagcgagtaagctgaaatatgatgtttaatagatccaaatcttgacctcattaagtgggtgtctttgtcttccttcataggagtttctacttccatcacaacttacaaagatgaacctcctaagtcgagaagttccaaggttggggacatggactgattcctagagatctccattttataattcagggcaacccaaccatagtaagcctcttccttcccactcaacactcttatccaactccttttatatgaaaagaatgttcctttacaatagtttcagcatcctccaagacctgcctactttcctcaattactaaccttctcagtccagcagtagctaaaacaaaaataggagtgtccttatgcctttggcaaggtacaatctttacttcccaagtaatcaatggcaccaaagattctctcacaccagatgaattgtcaacaaacttatctaaacctggttcagtttgcatttagtgatacttacaagaagtttttagaagtgaactactggttaaattatcaggataagaatgcaacaaattgggaaattgcatcttatttgcatcttttgctatctattcatacacattgactctcgttcatgtgctaccacaatcaaaaaccacagtataataagaccctttagacaccctatgaccttccctaagtttaaatgtgaccaataacaaacccatagctaaaacaacaccacttacctttattagccttttatattgatagaatctcatgattgataacttgagtttggaacaagatttgggctccatggctgaaacatcaacatgaatgtattccctatagaaaatgcttagctccaattctaacaatcttccatttggggcagataaatatgaagatcttaagggaaaatttcaccgaaataaatgtaaatgtcatagcccaccattaagagtagtatttaaaaagacatagaaggtgagtcaacatatacataaaatgagatcaaataaaacagggagcttacttgtttcaattatgaagacttggaaaccatctagggaatagagaaaatgcagaagtgacgttgtttgacgatccaatgtagaatacaagaatcaacccacaaattcttaggaaaaaaaatgagtctgtttgaacatttacttgtccaaaactcttaaattttccttttccttaccaaaacattttacatatctactctgatacaagcaaaaaataacaatttatttgtgataaaatagtacaactaaatgaattaattattattattattatgttaacttatttgattaatttttataaaataatccacttctgttaatttactctaagatacaaaacctttccctactcataaaattagggaactaagccctactagccaaattttgtaaattatatatattattcttaatagcacttctgtgaagtgtcatgtgtcatttaatgaggaaaactaaattaattattctttaataaggtcccttgacaccgctttgtcacggaaagacttcttggaaatgaggagtatccgggaaggaaggatatgcagaggcatattcatgcttgccttgacatcccagaggtgaaaagcaaaatacctctcctcaacccgaaagggtctagaaaggaagctcgtttagtttatatcctaagaggcattcaaaggacctaaagcggatgtggaccatcatgaagtgttgcggatgtcgaccttttacacacgtcaggtcaccaaagtgacaattatactttttctaacaaagatcagatcttgtctcctacatccgagcaagtagtgcgcgtaccaccaccacctttttaccagacagacattacagacttttgctcgtaaaggaatgatatttgagcaacatgtggcccctacttttaaaggttgaacctttgcgtgacacgtgtccaagtggcacaaaatagtctccattatccaactgttgcacgtacgggcataatgctacccaggggatcatccagttaactctaacattgcatgtaatttaccctaatagtaggatttgagtagaggccttaggcaggtcatgggtctgttcatacctgccacttagcctataaataccctttacttctcataggaagcgggcagatcagaacgtacatagctaaaactctatcaatattgctctaggtcttcttcttctccaagagaaacttagggtacagaattagagtttcctgcaaaataatgtaaacacatcaatactgcctttagagactaataaactgactcgtggactaaggttcgttaacacccaaatcacgtacaaaatattcatctctttacttctgtaagttattatttctttagctcctaatgatttagtttccaaaaatcttgataattatttcggtactttcattgagagctgaagaaagacgtaaaccactgcaactgccatggtgttcacataaaagatggttcctaagaaaactcttcaaggtggccttgggacagtcatggaggaggtaaaccccctttcgtcagagcacacccaactgagtaatgcaagaggcgagaatttaaatatatcaatattaaaataaatagattaaaataagtacctaatgaaactacagccctaaaaataatgagctttagttataaggatattcaatttccatt

SEQ ID NO: 17020 - DNA, 2008 bp, Cannabis sativa
tcatatgattgatcttcataaaatgctcataaaacagagtctagaacaaaataatataaacctaaatggcatatattactttattatgattccatcctgcatcttggttgaatcatccaaataaaattataataaaagtcctcttctaacaacattttttctttctttaatattattaagaaattaattaatctataatcaaacaaacacactacatacgtactaattgtctaattaaaccatttatttgcaagacttaaataaaatacaaagtatcatttcaaaatagaaataataatagacaaagtatgaaagaataaagaaagaaccatgcaaatatccaagcttaaaatcgaaaaagaaagaagttgcaagattcaaatcaagcccaaaacattaatcttgatctttatcttggtggtggaagaagtggaatgacaatatcttgaaatagatttggattttgagtggcacgaaagactgtgatgaagatgacacgtcgagcaagatcgacgaagagcacaatcatatctcccgcttggatgccacgcgcattcacaaaccttgaccaatttttattcaataacactcgaccattctcagcttcaaacctccgcagcctcgtctgtattcggatattcaaaaatgactggtccacaactagaacacgaaatggacgactattaaatcgtcgtaatgttgctacgcctattcctgactctatctctctaggcagctccagttgatcagtactcacatctgcctcaatcaaatttttcacacagataaatgggacttgaacttgattttggttacgataagtaggagtacttagttgttgtgggaacaatattgttggtcggattacggtgatatcgatgacgttgggaatgttattacgaggcagtttcaagagcagaatgtctccaactatgattccgcgatctctgatgaacaaatcccaccttttccctttaatgatgacacgaccgtcatttaagaatagagagctaaccatgaagaaatttggtccgaaaattctgtcacgaatcataatatcgcttctttcaggattgggaagtgcgttaatggaagctgctatttgatttgggagaaagaaggtgttgatgtccctcactacatttccaaacaatctacgattctgctccattcttggaatcgattaatgtgtaataaaaagacaacaaagatctgagaaagagacagaaaaatggagaaaggaaaaaaaaaagtggaatttctgagaaagaaaaagaaagagcaagatttttgacttaatgtctttggattctctagttcaagatatttgacttaggatcaaaaccgttatgtacgttgcttgttttcctttagtaaattatagttgagagttagttactcgctcttctttgagtatactctgcccaaagcactcttgtattatttctggatttatttaatttaaattaatatgtagtagatctgccttacctgatttcttataatttagttaatgataagagggttgcagtactggtctggcgagtccctttctaatacaactattagcaaattaattatatatattaatggggtttttacaaaaatattaaaatttaggttaaaatttacaattttaatgtgatacggaatttttttataaaaatattatttttttataaaataattgtaaataacaaaacagattacttaaaaacagctgtagaataagtaaaaaaaccatggaacaacagtgaaaatgtaacacagtatacagtataaaacttacacaatatttttctaaaaaaaaaattctgccccacagtgaaaaaaaaagttaaaaattttagtatgtgatgtaaaaacactttgattaatagtggtagtgatgggcttttcaacttattaatttagggaaatttacatggtatactaacttttgccattatcttacaaaattttttacttttgtacggtatttttctataagtttcatactgcagtatac

SEQ ID NO: 17021 - DNA, 9240 bp, Cannabis sativa
aacaaaatcaccctaagcaatcacctcctcacttctcaaatgatgacagtcttcctgcattacctacttagtgaagaatcagtatcccacctggttttcaatctgtgtctactcctcaacctgtgtctactgctcctcacaccaattctcaatcagatgtctctgtgtccagtgatcctgagctagttgttgttcctcaaaataaccccactcttcccattgttcctgagtcatctaatgttgttcctgtcacaccagttttatccaattctgcccctccaaccaacacacaccaaatgaccaccagggctaaatctggtatccacaaacccaaaacttttcttactgagaaaataccaaaaattcaaatctattatgcaatttgaaaaatggagaaaggccatgtcccaagaaattcttgctcttgcaagaaataagacatacactgttgttcccctaccagaaggaaaagaactgatatgttgcaagtggattcttagaataaaagaaaatcttgatggctcggttgacaggtgcaaagcaaggttggttgccaaagattttcaccaacaaactagatttgattatactgagacttttagtcctgttgtgaagccaatcacaataagaattgttctgacattggctatttcaaaaggatggattgttagacaattggatgtcaacaatgcatttctaaatggagagttacatgaggaggtctacatgacacaacctcctggttttgagatcaccactcaacctaatttggtttgcaagctacacaaggctctctctatggtttaaaacaagccccaagggcttggtttgagaggctacatcagtgtttgttgtctttggggttcactgcatcaaaatcagaccattcactgttcattcttcatactgcatcatccattacacttgttctagtgtatgttgatgacattcttgtcactggaagtgaccccaagtcagtagcatctcttatcatctctcttaataatacattttctcttaaagaccttggaaaactcaaatatttttttggcatcgaagttgccaaaacaaacagtggcctttttctctctcaagcaaaatatgccaaagatcttctagtcaaggctgatatgcaagatgctaaacctatctcgacaccaatggttaatggacaaaaactctctgcttatggcagtgaagtttttcccaatccacatatgtacaggtcaattgttggggcattacaatacctcacaatcactagacttgaactctcctacagtgtaaacaaagtttgtcagtacatgcaacaacctctccaaactcattggcttgttgtcaaaagaatacttcgatatgtggctggcactactcactatggtcttcatctcacgaagccctcacactttgaagttaaggcatttgtgatgctaattgggtctctgatacagatgacagaagatctacttctggttttgccatcttttttggccaaaatctcattgcttggaagagtcaaaaacaacacaccatctctcgatcaagcactgcggcagaatacaagagtttagccaatgttgttgctggcttgcttggttacaatctttgttttttgagctacacattcaactctctcagccatcaacagtctggtgtgacaatctaagtacggttttgctcactactaaccctgtacttcatgcacgcaccaaacacatagagttggatctatactttgtttgtgaaaaagttcagaaccaccagattgctgtcaagcatgttcctgctgttgatcagttggcaaatgattttaccaaggctatttccagtcagaacttctctgcttttcgatccaaactcaacattgttgattctaccaatgcttttgcgggggagtgttaagggaattcaatttattttgttattttctattaagttagtttctcaattgttttggtttcggttgttaggttagcttttcaattgcaacatattcttattttgatggttactcatctttgatgaagtagatgagtatatattgtactgaatcttcccagaaatgaataacattcaatctttctcttcatcttttctctctgttctttctttgttgcttatgttcatcgactgaacattgatggctaggagattcaactctcctaacaatcaacaatccacccatatggacaaatctaattgcaactatggttgtggccataggagacatcaacaaattatttttattttaaacaaacggaatgtactgcattttttcgatacttgctatacttccgaggattttttcgacactaaaactaggagtgtaaaactctaaacaaagctatagttcaaatgaaaaataaaatcttatttaccattggattcaaaactcaccatggagctgttagtgttttggaacttataagctgtttatgctatgtcatggattttacatttacacaataaaagttgttatttgaaacgtatatagtacatacacgacagaaaaatttagaaatcgaaaaataagagaagagtcactacgacaaggttgttttgctgttaaaagcttcacatgcaataatactacgtccaagtccaacaatgacaaaaatatattatatatcgatgtctcaaagctctaaaatttatttcatgtaatctaatctcgaaaccgttaaaacaagttttgttaatgtgatcaacaacaacagccagttcaaatgaattggtttaaactcagagttaactaaacatgtcagccttggaaagtgatcttgaaaaactgttgttgttggtagtgatggtggtggtggtgatgacactgctattattcaccacgaacagaaacattgatgtcaggagatggaccaaggtccggtctggactctgaggaaccattattccaaccatcaaaatgaatagtagccgtgccattattcggattcgctttggcagtaatggttgttgggttgtgttgtgtttctacatagctttgcacaggaaaggttggcggtttgtttaagaagggttcaaccatgtccggtttagcctgtgaaattggagttgccgcagtaactggtgagtctagagctgttggaggaggagaagccactgtgtgttctcgatggtggtacttccttttctgcactttgtagccatttggtatgaaacttccaactacaatctgccaaaacagatgaacccatatgatcattatcatcatccattatgaaactgattttgggtcaagtaaattctaatctattttttttacagaattaactaaacagttcaatctaagtgtacactttcaaaaagaaaatgtttctaaacaaaacccctgaaagtgtttccgggattgcactcacaaacgtcattagtgaattgaacattatgaatatgcagaaactaacaatgaatccatataaattctgactaaattatgcatacagaaaatacatacaataaagttcagcaacttttgcaggctgccaatcaattagaagacgcctcacaattgattggccccgacagtttgaactggagatcttacaatagccccaagtttttcgagtctatggatattcaaaccttgaaaccaatacctaccagcaccacacgccagtgttgctactacgctagaatatatagtccttactttctatcagaacaattctcatggtgccaaactcaaggccctccaaggagagtaaaatatcacatacatgtaaagaagtattattgatcaaagacataactagggaaaagccttgcctgaatgggactagcagccgttagtaaaccagcaaggccaccaccaattacacgaccatcaggaccggccaaagagacgctcaagccaccattccgatttcttgcacccgcagagtattcagttacagtgtacgatccggctaaggacaatatctcaaagcggccctgtcaaaaagttgaaaatagttcatattaaacaaatgtatttatatatatatagataatatcaacaccattataattagtaatagatacacaagcacctaaaataaaaatctgcacaatggttttctcaatataagaatcatttgtcaatgaaatgggcacatgtccttattagcaatttcgaggaagcaaagaatgaggacaaacttaagcactaaaataatactgtttcgaatatcttcttattttattttattttccctctcctggaatagactagtcatataattgttgggagttagaccaagcaagatatcagtactgagaggttagtaagagtgtgtgtgtgtgagagagagagagaaagaaaggaattcatagtcagcttatttggataattttgcagattgaggaagtagttgggtggaccaagctgttcttccaaatgggaagagagactcgatgttcagtatggtgggacagagaaaaaaacacaactttgtgaaccgggttttgctatatgctacttagaatcgaaaactagctcatacttgtctcctttcagtggagctaaaatggcataccatgtgcttaagaactcacgagccttttactttttcaaggacttgataatgaaagaaacaaaagaaaaaagtaacaataagatttgaagagaatttaaagtgtattgagaagaatagtatgattgaaatcgtgcctcgtatgtcagaatgccgccagaagaaccaggttgacgaattgtgacgttggaaacagctccattggcagagagaacacaaactcctctgggacccttttgaacaaatgagagaattttttctacaacatcctgcataagttcaaaaagttcagacctttgttactcaaactcagaaaacattctaagatctgagcaaaacatcttgtttgtacggccaagataactgtaagaaataaaaaaataataataagagtgagaaaagatacacatttacctctccagtattaacagtgaccacatgaggtgtgaagtccccaccggctgtgcttgcaaacaattcaccttcatggatcagagttcaaatgttaagggggggaaaacaaagacccagtttgaaatatatgatttggaactatttaaatataaaaagaatgaaacttgagatcacattttgtgacattgcatagataatggagcccaaattatagcatttgtaaatagtagaacaatgttaaatgattttcaaaattaatcccattaaaaagatttctcctatagtatttgaactctgatcttaaactcagcccaaacaaatgatcagcttttgttatatataaactttagtctctatttatggctggtcttcatggggtttctgctctggttttgaaagaagagaaagagaaagaaaaagcactctttttcatggtgggtaagttggcccccccttgtattaccaaaaaaggaatgttaacaaggacagaagacccacctctgtgccctaaattttctcatcattttcttggtaaacaagcaggaatgtttaacacaaacgcgccaccgagttcacctgaatttgatggagttgtagtagtagtagtagtagtagtagtagtagtagaagaagaagaactgtgcttgaactcacctaaagaagcaaggagttgccagttaccagacccagaagaaggtctaactttcccttttttagacgaacaagagaactctgaagaagaaaccggagacgacagagaaaacggtgtcgtttctgagggtggtggccttggctttggcttaagaccctgcaaatatgccaaactcaagttcccatcagcgtcgtatttcctcggcctacctcttttcttcttccctaacgagtcaacgcctccctgcgccgccgccgcatccaccgccgtcgttcctactacgccgccggtagtcgtctgaggtaacgtcgccgacggtgttgctattcccatcgaccccatatttccctctgttcccaccacgtttaccgccacatgatgaaccggtacagagttcggtgactcagtccctgagttttccggtgacccagaaatcgtgctctccttgtcatccatttgaagttcaaacaaaaccagatatatgaatatgtatatatatatatataaatatatagtagtgtaagttgaagtgaaatggcgccagtaatagaacaaggttgcttttttacaaacttccctccattaatggaggacaaaaagaaactcttattttcagaatttgttttggtcttactccataatctcactccttgttttaaaataaattaaaaaaaaaaataccaataatcttttacccaaattacccctgtaaataaatgaaaaaatcactttcggcttactcttttagggtacttatttcaattatttatttattttcacaatcttgtcataatgaattttgctcttttttcttgtgttattatgttacttgtgtgagctggtatcgttataatattgccttttctcaatttaagttagtaaaaaattgtatatttatcttatatgcaaactatttatttaaatgtattcatattattatttctttatttggtactagaattttctaaacctaaaattgttgttcgcctgaaagaaaaataatgacactaatgttgtttttagtatgttttgcatagcaatggaataaggaccaaatggaagttttagtaaaaggtaagggtattttggtaataccaaaacaaacacctttagggtagatggagttgcattgaaatttattattaattaaaagaaatagactcggaaaaaaaaaaaaaaaaatagaccagggagtaattgtaactttaaaataaaatttacttttatatttttgaaaaaaaaaatgttgataataattaaaaaataataccttgtttggatagaaatctagtcaaactggtgctctgctgttaaagttataatccttgcataaaataatgaattttatttgtatttattcaaagctaatctacaaataaagttcaaatcccaaacttacgtttcctttctctcaaattttatttatttatatttaagaaaaaagaaaatcttacgtttcctaacataattggagtccaaattctttgttctattttttatttattatggttatcttttctaaaaataaataaattattattgctatttccataaagctccatgattatactttcacaatttgaaatgagcgaccatacctaaaataatatatatatatatatatataattttaagaacctaaaataatatttaagagggctaaatattattttaaatttggtattgtgtaaaaattattaattcagcaatctatttttgttacataacaaaagtttctaaaattttaaaagataatactttaaattattgttattttttttaatataatctatttgaattcagtctctacgatataaaagatgtaaaagtctaattataatatttttaagtgttatttaagaaaattaaattcagaatattattttatattattttaaaataaaaataatttaaataatcattgaataaaataaaaagtagtggtaataaatatataatctaaaataacaataaaaaataaattcttctctgaatagtgaaagaaaaaaacttaaaacaactacaatctgaattaattaatttataaatataatatatgttaaatagaatttgtattttgcaaaagttattattggactctctattttgttaattgataagtaagacattgtattttcaaaaatagtataaaatagtgtcattaactgatttttatcaaaataaaaattaataataatttaatctagagttgttatgacacaattaggtatatttttgcgtaattatcttcaaagatattatattaaaaaaaaattaaattaagctcataatactattttgttttattttaaaaactataaagtataatttattattttacaaaacataaaattcaattaaaatttttacaaaatataagagacaaaataatattaaccatataatatatctactctattcgttttactttcttattaatgttaaaatataatgcaatcggtccgaggggagaatattgcaataatatcatgaaaaaaaggtaagaatatagagattatttcgtaatatcatatttatttatttattatttttgcttaacttcatatcatatttattttattaacattgataagatctatgcctgcaaatatgatatgtataaaattagaattttgcattaatttaaattattaatgtaattatgatttttttaaaaaaaaaatgtaattatgccatcattgtttatgcatcgatttgttttcttttctgaacttgaaaaatgaactaagatatattttattgattttatttttacttttttcctaaatgattttcttaattttttcctatgttttaattggtcttgcaaagtttcaaacttttgaaaacaaataatattgagacaacctaattacaatgaaataaaataaataaacaatattgagacaaatgtgaaagctaacaagttgactttactaacaaatttaactattcctttttttttttctttttattgggtaaactactcccttcgttcagcaaaaaaataaaaactaaagtaaactacttccttctttgaataaaatttaaaataaataaaaccaatttttcgatgtgtttttctttttttcaaattaaggccaattttatattacaattttttgtttctcgataatatcgatggctcttttcttgttgtttcaattaaaatattaattattaaatgaaataaaactgagagtgcccaaatcatgtgggtttaaaaaaatataacaaaaaataataattaaaaatggaagaaaattttaataataaaaaataaaaggcagaaaaatccaattctaacaccctgcaaaaagcgaaacagtgatttaaagcggtcggtaagaccgttgacggtcaggaccaaataacttatttgaaaaattaattaaattttaacaccaaaattaattttgttttacagttacacctttttttttttatctaataaatttgagcttaatatttaaacttacggggtattttagtaaaaaattattaacattttttaatagggaattttatttgtacccataaaataataaatacacattattattaaaaaaatatataaacttaaataatttttaaaaattactttaatatatttttttaaaaaaatttctcacattattttatattaat

SEQ ID NO: 17022 - DNA, 1918 bp, Cannabis sativa
gcaggtatggttggtttgtacttaaaaagctttgcgtattcgtttaacagatggaacatgtagtcatacacgtactccattttcatttcttcttctataaacttgcttgcttctttccccatcgcttctgcctaaacatatattatatataaatgcatattatatatggagaccattatatatactaattagaaaactaatgaattacctggtgagtgtgattgttaccccaatctacagcgaacttgagagaggtgcacttagtgttttctctaataggccagtagtgttgcaatggttgcatgcctcttatgtagaaatcatggtaacgtgacttaatgtacaaggccattgagtcgcaagctaatatgtatttttcactaacagaccatgcccatccttctgtatatattttgtatctacatatataatcgttcattaatttattttatttgaacaaaacaattacctagtagtagggaggtcattttgaaaactacctgtgggtacactggtcttctaaattggatttcttgtacccttgttttttctcttcttcccagctctaattagtcaaatttcaaaatttagatgtgaaatggatatatgatttgtaggagaaaaatgcgaatatatttgtataattgtaacctgaatatagatgcgggtattccaatcatttttttgggagacattgcatttaagaaggtcccttcttgtaggagccacatatgggtttcctctccaataagcatagggtaccctatctttccattttgttctattgttgccttcttttatgtccgccaacacatttttccatggttttatattgcactcagccctgtgccatatataagatgaaccagtaccttataaatttttactgtcaatttttaaataaattcataaataataaagttgttattttgaactaaacagaaaaattcttagtatttgtcttgcaaaatcattcattaaatttattacatcataatctttcgcaattttaaaaatgaaaaataatgtagattaaaaaattacataaataaaaattagagtagataatcttaaatgtgtaaatagctctttcgaatgaacaattatatccctactattatttttatttataattccaaaaataaggggcatataaaataaacaaacaatcaaaaaatatctaatatatattaatatgaatttttatatctaaaaaatgtaaaaaataaaaaataaaagataatgatttttatatttggtatagaatgaaaaattgtttagaaaaatactcaagccaacaaaaaattttcatatcactagaaaaaattggttttttttttcttcacactttttttttatatatttttttttctttttgtcttaatatttaaaatatattttattttatttaatatatattttttaaaaaaataattttttaatgaagaatttttcttagaaaaatagtataagttaaatatataatttttatataaaaaaataattattaaaatttggggtgcaatgcaaatacgttaacaatataaataaagcactttttctctagaacaaatcactatgttaatcaaatttggcgtgtaagatattattggtgcctagtatttttttttcggtgttatattattattggtgtaattaaatatataagtaaaaaaaaaataactttttaaaatatgatttaactaataataaggtgcaaaaacaacttaataccattagtatctaatattacttttattttatatagaaaaatgctaattaagtgcactttatatttatgatgccaattacgcaactcacaagggtaaataccattttgaaccctgtgttttacaaaagttacagattggaccctgtgttttattaaatgacaaaatggaccctgtattttttaaaa

SEQ ID NO: 17023 - DNA, 6387 bp, Cannabis sativa
  modified_base (1186)..(1186): a, c, t, g, unknown or other
accgcaaagaatttcaaaccacattttttttgcagtgtggtgcggtgcgggcggtttgagcggtttgggcggtttgatgaataccactactagaaatagtgaagacaaggggaggggacctaaaaagtgagagtaacactcatacttacgaacctgagagcactttgctgcaagatatctgtaaacactttgagagtcgtagctagaaatcaccttgtcttccttggtgatctgactgatattatctcaaaagttgtacaataaaaggggagtaggtcattacccacgtgcaagggggctgaacctctataaattctgcgtgtcatttaattatttattattctaaccccttaattagtgtttaatcaatattttttagactctaagtcagttggctgtttgcccagtcaacaatttctatgaaaaataattcttattaagggcaaaataataataataatttatataaaaaaaattattattttaaataattataacattatggattttataatttatagtatttactaacgtagttttatttgataaaattatattaactagttaaatataatattattcttaaataatattaaagagataaaatatattagtttaatgaaaataatatttaattttaatcattgtaaattaagaaattactaaaaattaatcaattattatttattgacttaataaataataaatttaatttgtgataaaattaaaaaaaattaattttgaaccttaaaatatgacccacatgtgtaggcctacccacacgtgtagggtgacatataaagatcaatgataatttagtttgattattttactattgaaataaatcaaattaaattaattaattatcttttaattattgaattaaatatattattagataatctatttgattaaaagataatattaaaataaaatgatataattgatttttgttaatcaattatatgatatttatatttgaatttgaattaaattaactattattttttattttaaaggattaaataaagggtttgtttataaccttatatatatatgatatatatcgaataacaaacaacataagaaaataaatggattgagcgatactttcagagaaaaaatagaattaaaaaataagattggttttttacactctctcttttcatctctctctctctctctntctctctctctctctctcacgccacacacacaataatatgtagtgagatttgtgttcttccttatctcatcacaatatatcatgagttaagaatatattgtcattacaaaactatactcatccaattgaatctagtagcccactctattcttgagtgtggaggctggcttggaagatcatgatgtttcatcttcaacaagttcttagattggatgtttgatagtaatacaaaaagatagcgaggatcccttgataggctacaagatgtattacttctcctttcaatagtatagatttaaactatatatatattatgttgtgatcctttaggattatggttcatgttggattactttattttttaataaaatttttctttatttttctaactctgatatggaccataaaaattaacaggtccgactttatcatgtttgtgggttggatttgtcttcgaattcagagccgtgatccgactccgtggtgagctgatccactaacttaattaggcgtgataatgggcccgtctttgttaatctcaggccttggaagtacacctgtcacttattcataaatacggataataaacatgtctaactcgtttaatgaatggattgtgttcgggttgactcgtctaaaccgtttaatgaacgagttgtgtttaggttgatacgtctaacacgaaattgacccgttaatgacctatttaaagttattttagtaatttaacaggtcataaatgggtcataaacatgttgagtatatcataaacgtgttaaacacgccattaatatattaatgggttgacatgtttaatcaaaatctatttataaacgagttatataggttgtgtcgtgtcaacctgtttatcgtgtttgagttttattttttgatacaattatttaacagatcgtgttcgggtaaaacacatacctgtaatacatgggtcttgacacgacacaaacacgatctgcgaacacgaattgcaactccttgtaccggtgcacccctatctgtttcagcatcttttagtccaatttatttcatggttgtgtatgttgtagtcatttaagaaccctccaaaactttgagaaactcagaaaaatttaacacactgaaaacaaggttcaaacagtctgttgcatgtgtgactcatttattttatacatgtgtgaaatagactatttaaacactgttttctatattataaattattctaaatttttcaaaattttgctagagtcataaataactgttacgcacatgactatgaaagaaattggattttttttttttttttctgaatgccaaaatagtagaggatacatcaatatactattttttgagggtgcattagagaagcaacctaagtgatatttacaataaataactttggggaattctatagtggaccgatgcatccctatttgtttcaatatccaagagaattttttagtctatttttttatagtcgtgtacattgtagttatttaagatattttacaaaattttgagaaattcataaaattttaacaaaccaaaaataaggtttcaacaatttattgtacatgtggctattttatttatatgcgtgaaaaaattactttttaaacactgttttctatattgtaaattattttaaatttctaaaaaatttaaaaaatatttttaataactataatgtacatcactataaaaaaaaattagactgaaaaaacagtatcaattagatcagtacatatttttttagatgcatggtaatagctaggggtggtaaaacgtgtcatcgtgtcgtgttcgtgtcatattttatgtgacctgcttctatatttcgtgccaggcgagtcgattcgttttttgactcgtagctaaatttttcaatcctaactcgactcttaaaaagtcgtgtcgtgttcgtattgaccctattaacctattttgctattattaaagctggaaatataaagaaaaataaaaattttaagttctattataaaacttatatgcatatacgtatatataatttgttatatatataataataattaaaatttttataatattttaatttaaatttaaaattatttaatttaatattaaatcactaaatatatatatttttttatataattatatcattattaataattttttattttattttatttaaaaaatcgtgtcaaacgtgttaaattcgtgttaagtgagtcgtgtcgtgtttgatctattttttttcatgttatgtcgtgtcgatccatttaggatccgtatctaattttgccgatcctaacttataaaatttgtgtcgtattcgtaatcgtgtacaatgttgaaactcgtttttttaataaattattattaaaaaaaaactttttatataaaatttgagatggccctgttttagtccaacaaaatcacttcataaaaataatttgaaaagacgaaagtacccttactgtgccagatcggtaatgtatgagtttcagaggctgtacctgtccttttcatcttttacttatttttcgctgtaaaaaacagcggggccacttgggctcctattttggaattattggtggttactacagctggcttcaccatatttataaaatataaaataggataaaatttgaatttcaaaaatagagacacaaccaccgttgatcctgctaaatctgaccgttgatgttctctctcatcagtttttgaaaatcacaactcacctccactatttttttcaacctttaattattttaaaattaaccacactctcaaatcccactctctctctcataaaattaaaattaaaaaataaataataaaattaaaataaaattgagccgtttgaatcactttttctatatataaaaaccaaaaccttcgtccccactctaaccctaaattttcatttcctctctttctctctctaaaacttcctccctctctctctctaaacttctctgctttcggttttatttttggtgtaatcgaaaatgagggaaattcttcacatccagggaggccaatgcggtaaccagatcggagctaagttctgggaagttgtttgtgccgagcacggcattgattccaccggaaagtaccagggagactcagatctccaacttgagaggatcaatgtctactataacgaagccagttgtggtagatttgttcccagagctgtactcatggatcttgaacctggaactatggatagcatcagatctggtccttacggccagatcttcagacctgacaactttgttttcggtcaatctggtgccggaaacaactgggccaaaggtcattacaccgagggtgctgagttgatcgattccgttcttgatgttgttcgtaaagaggccgaaaactgcgattgtctacaaggtgtttgaaatgattctgttagttttatgtgctttgtttgttgtttggtttggttttaatccagtttgtttgtgcggttttaggtttccaggtctgtcattccctcggaggagggactggatctggaatgggtacccttttgatctcaaagatcagagaggaatacccggaccggatgatgcttacgttctccgttttcccttcacctaaggtctccgacacagttgttgaaccatacaatgcaactttgtctgttcatcaactcgttgaaaacgcagacgagtgtatggttcttgacaacgaagctctttacgatatttgcttccgtaccctgaaattaaccactcctagctgtaagtttcttcactttctgttatgcattttcaacagatctagttatatagtcgaaatgggtttccatatagctattctgtcggttattgcatgtattttgaacggatctagttgaaacattggtgttttcagtaccttttctacagatctaagaacattgtttcgaaaaccgtattcattttctttgatcttttgatttagtgtgaatcttaattgagtttattattccatgatatttctttgtgggtatattgttttatgttatcacttgtacagatctagtcaaaacttttgaaattgggatactaatgcttgaatacggttaatttatgtttgagcagttggtgatttaaaccacttgatctccgcaacaatgtctggagtcacatgctgtttgagattccctggacagttgaactctgatcttagaaagcttgccgtcaacctcattcccttccctcgtctccactttttcatggtgggttttgctcctctaacttcccgtggttctcagcagtacagggccctaactgttccggagcttacccagcaaatgtgggatgcaaagaacatgatgtgcgctgcagatccccgccatggtcggtacctcacagcctcagccatgtttagaggcaagatgagcaccaaggaggttgatgagcagatgatcaatgtccagaacaagaattcatcctactttgttgaatggattcccaacaatgtcaagtccaccgtttgtgacatcccaccaactggcctgaaaatggcatccactttcattggaaactcaacatccatccaggagatgttccgtcgtgtgagtgagcaatttacagctatgttcaggagaaaggctttcttgcattggtacactggcgagggcatggatgaaatggaattcactgaagccgagagcaacatgaatgatcttgtgtccgagtaccagcagtaccaggatgctactgctgaggaggacgattactatgatgaggaagaggaggaagctcaagagatgtgaagaagttgtggggttttgaattaaacaaaacagcatatatgcgtgggttgattatgatttaggcaaatgagattattgatggctaagctaagattactatataataccacaaaaccacctggttgccggtctctggcaatggtgttttttggttgctttgtagtagggacaaatattaatctgtctgaaatttgtttctgttgatttagtgttgttttcatatggttttaagcagacatgaaatcttgagatatgtgcttgtgtttacgtttttatattttgttcatataatgtttttgtttcactaagactactttctactactacgactactcgtaccactgctactacgaagcatatgctagtgttttctatttttgtttgtgtgttttatttttgttgaaatccgttgtcatacaattgaatttgcattactatcttctca

SEQ ID NO: 17024 - DNA, 4300 bp, Cannabis sativa
ataggttcaacaaccctcaaaaatagggattttccaataagatattggtcctattctctaaggatttagttattcttttatgtaacttaattaataggtaaaatgatgttaatattcctatttataagggatatctttacctatttgatttaggattgtttgtaagccatacactctataaagggcattctttcactctcacaacgtgcaagctgctctctcttaatcctcacattctactaatgcctcctagacactaagttaagcatcttcataagtccttcacaagatcttatcagttcttggtctgtaacacattgttctcataattgtaatactgaagagagccatagctagaaatcacaaagttttcacctatgatctgcatggtgttatctcaagagtgaatataactaaaagggagtaggtcattactcgcttaacaagggggatgaacctctataaatctctttgtcaccataactatttactattcttatttacacatggtgaatgctaatcattaataaggccacgctataagtggaccaaattctgagtcaacattttggtactttcattgagagtcctttttaattccttcatctctttttgattaatcatcgtggttctaacacaaagaactctcccctcagatcctcctcaggatcccatgacggtagatcctaatattcttattgctctaccacaagaggtcctactaatcggcataacaccgtcaatccggcccatcttgtgaatcctattgatcccaccattcctctaaggctggtacaacccgtaggatctcatacagaagaacaaattaacatggaacaacctccacagaacacaaatggggttgttccatagtgctctacaaaagaaacagggataggaatcgacaaactagttattggtgaacctcacttggcactaagagatggtattgagttggccaggcttagagaagctataggccatgtcactaaggtggatggatgaccaggaggccatcctatgagttagtcaggtagaattaaatcgccataatagggaggctaatgacctgataaggtaatttaatgagaaaaatattagaagaggtcctgatctgataagagatcctttggagggaggcctatagacagatcagacaagatttacaaataggtagacaatggatagaatgtccaaccaggtccctggaacaagagaacatacccttccctacctgatgatggtaaaatcttgccagacaaactgtatgggacaaaaagccagttcctagcaccaggagccattagaggacaataaagcaaatctaaagagggggtattacatactggccaggccctggccgatcacaactatgactctctctcttagggtatctgagaacaagttgttctaaggcctagggaccctgtgcttgacaggctaggtcctaggataattgacaacacataggataacattaactcgaggagtgagaactaaaatgactttattccaccactagaacaataatttttggcaggtagatcaaccaaactcaagaaattagtatgatcaacctcccattaacccatagactagcttggctagacagaagaatcaggctagtttggttggccaagacagtccacccaagcaaaggctagccggccaaggaccaatgttctgccaaaggatggccagccaagtcccaatatttagctaaaggcttactagccaaggctccttgttatgcaaaaggctggcaagccaaggctagttgcctagccaagatttggcagaccaaggatacctctctagccagtaaaggctacccaggaaagagcccacctgattagatccatctgtgcaagcacaattggatcaactaaaagacatgatctaagacttgtgtggcttaaagaaatttgacctagatttggacaggtcaaggggattacccttcacagagtacattaatgcacttctccttccaaagttcaagatgccaacttgggagatgtacacatggaaagatgatcccctagcacacataaaatactttaacatccaaatagatcttaaaaagtaactagagatgtgtaataccgaatatttcggacaaccctgtccgaaacaacccaacaatggtattataggctagccctaagaaggtttaattcttgggaagaattctctcgagaattctacactcaattctctacctcaagataaataccaacacaactggaggaccttatcaaaataaagttgtttatcgagttttttggcaaccaaataatattagaacttaagaaagtattagaggcatagataataaaataataaacaagggatttttaagtggttcaggcattaattatccttagtccacgagtccattttattaggttctttggctagagatcgtacatacaaatacaaaagaaatggacttcactccaccctaccgtgttcctcttgaagaagaagaatcttagtaggaatattctagagttgataatggggttacagtaatgtgtttacagagaatgctccttcgatccttaggtgaagctgaaagagaaaaagtcaaggataggaaattgaatcccccttcctgtgtgcctttaggtgtatttataggcccatccctgggcatgggccatttcgggtggatctttgcaaggatgaaccgcaccgttgaattagtaggtggtaccatattttccatgtggagtttaccgatgtcaaattatactggttgtactagcagtgctttggatgcgtgtcgctctagggtcgttcttatttgaactacctttatcattagtcgttggatgttattacacagcagacaaggatacggatgctctgcatggcaacatggcatgggggacaacttctaacatcatagcaaagagggctcggccattgggtctgtagcctgtcacgcccccgaagagcccctacgggtttgaggtgtattccgggacaacgttccttggttgaagatccatattccttgttggagcatacggtcttggcttctagagttgagtgcgtctctagctcacgggcgtcttccatggggcttgcctttgggaagacttctcgtgcgggaatctgtttcgcaatattagggctctttccttcctggagcacagagcaaggcacttgggaaaccttaattatttcttgactttttcttgattaatttccacatgtcatgctggcaaaaatgcagataacatttacctcccaagcttccgagacatgccatggtttgggagcttgcagtatcttctttagggagatctttcgcgcatgtggattttcagaaagaccttttaatgttgtacgtcagtagccgttaaactgaagtgtcattatgtaggaggcatgatttctcccgttttcttgtcagagttttaaatgctgacttctagactccttcgtgcatgctgggcgcgtatttttagggaactcgaaatggcagcaattggacatggacagtttcttctttgagcgttttctacgatacatgtaatgatgggagtcgtctgttgggaagtgatgtatcctttcaaattctcatatccaatcatcagacatctcttggggcgaaccgaagcgctcgcttcgtgtgaaatgtgccccttccagtcatcccataaatacttacaacaatcaatccatttttcactcttcttgcctgtcaagtcacaacctttcaagttctcttcttttcaatcacattcgaacgttgctgtcattggacacttgttttatgccaaggatagcacaccgaaattgcctacctcatcaattggtaagttcttcgtttacttgatagtctttgagggagccacaatattgtatttgcttctgggacgccaattcctagtggcgtcattcttgggaatgatgtggtcacgtagtgacccttctcattctgttgtgccgatctgtggatatgtacaccatgtcatctcttgaataggtcggtgcctgcaatgcaacgaaaagcagttcttcttccaagaagagatagaaacttgtggtgacggattttggcatgggggcatcgggggatcaccccgaccccttatgcccagctgaggctgggccagcctggggccctcccccatgctctatcaagaacgcctaccgtgggggtcatcttcccgaggagggtggttcccttcaaccctcttgaaatgcatgatatatttattttttgaggattaatttaatatttttataattgttgggttttgttccctaaataaaacccatttca

SEQ ID NO: 17025 - DNA, 6383 bp, Cannabis sativa
aattgcttgaattacgctttgagaagaacttcccttcccgcttgggaaaataagctagctttccaaccttgaagtttatcccgaatcttcgaccgaatgaactcaaaaacttctttcttccttctcccaactgttgctggcagaccgagatatttggtgtggcagtccaccaatttaaccccaaggtcagccgcgagcataattccatcggtttgattgatcttccttccaacgcatagctccgatttcagaagattgatttgttgtccagataggaaggagtattcttctaatatagctttcatacatctacattcggttggggttgcttcaaggaacacaaaactgtcatcggcgaagaagaggtgagatagttttagaccttctcttccaaacttaataccgaggattttatccgctctttcggcctcttgtatgaggcaagagaatccttccgagcagaggagaaacatatatggagagaggggatcgccttgacaaaggccacggtgaggttgaatgagtccactaatttctccattcacaaggaccgagaaagaaaccgtagtgatacagttcatgactttatccacccatcgcttgtcataacccaaacatagcatcatcgcttctaagaatctccacctgactctatcataagctttggacatgtctagtttaagcgccatcttttttccatttccaaaacaacctttttttcatacaatgtagactttcaaaccccataatcgcattatcttgtatgagccgaccactaatgaaagcgctttgattctccgaaattacttccttcaaactatctttcattctattggctagacattttgcaacaattttatagctgacattgcagagacttatggggcggtagtcagccacttggtggggatttttggttttcggaatgaggcataggagggtcttgtttatcgctcagtaatctgcatgattattgagtatatccaagcaaattctggttatgtccgactctatgacaggtcaatgattaataaattgtatattttaaggactgaattattattttggagataaaattgctaattatgttaaataaaatgtttttgctaaaatcagacaaggaaacgcactacagcttagggaaacgcgtggagataggtctaacctgctcaaagaattgaattggtttttgaaagttttaatgacgcgtttccttctctttctgtgatcacttaactaactatactgagctgtcatcctatcatatccctttccctgcctaccaaaagaagggtatattcgtcattatatagtacaattatacgacacaatgaccaaatatggaggacttaatcgtcattttcactttggtaacagcctaacaccatagctgatcaaataaaagaagtaaaaatgcttcttccactttcttcaactacaaagtctacccatttgtttatttcttccacaacctcaactctttctctctgactctgtacaatatttatttcggtattcgttttctaccgattccgactcagtgagttcgaccttcctccgtttcggtacggtggttcaaagaaagagaagaggtaagacctactttcttcctacacaaatatcacagtttctccgcatatggtttccctttagcttacttcttgaaatgtactcatattcataggtttactttctctaaccactgcattccattaatgggtggtgcttgattttcaagttcgattattattttctgaaaactgaggtacccgtggactgcaatttctcagttttcaagtgtctagaaaaactcagatctcgatcttggattcttagaaactagtattctttttatttttctatatcgtaatcgtcaaataaatttgtgagttcatgaagaacctggtgaattgtggagctctatggctcctgcttttgttgtgtctaagcttgtcagttgatgtgattttggctgctgattacgttccggccgatcaaatcttccttaactgtggaggaccgtccgacaccgatatagatgggaagaaatggacctcagataaagggtctttgtttctatccaaaggtgcgaaatcaaccacatccgaagcctcctttcaagatccttcagtttccactgtcccttacatgaccgccagagtcttccaatcagagttcacttacagcatctctgtcgccccaggccggaaattcgttcgcctctacttctacccggcatcttactcgggcctaaacgcctccgatggcgtctttgacatcacggctcagtcatatactcttgtcaagaacttcagtgctgcccaaacagcgcaagctttgaactttgtttcgattgtgaaagagtactcggtccatgtggaaggtgatactttgagtcttacctttaaaccctcttctagtattccaaatgggtatgccttcgtgaatgggattgaggttttgtctatgcctgacatgtatgctagtcctgctgaaggtacaatggttgtcggtcagaataacatgtacaccatggataacagcactgcgcttgagaatatttaccggttgaatgctggtggaaatgatatttcgccttcgggggatacaggtctgtataggtcctggtatgatgacactccatatctatatggggcatcttttggtgttccggaaactgctgattctaacatgacgattacttacattgatagtacacgtacttatgttgctcccataagtgtgtatagcactgccagatcaatgggaccgactgccagcgtcaacttgaactacaacttaacttggattctgtctatagactcgggattctcttacctggttaggctccatttctgtgaggttgcttcaaatataaccaagcaaaatcaaagagtgtttacaatcttcatcggtaatcaaacagctgtagaagaagctgatgttgctgcttgggctgaccagagaaatggtgttggtttgtataaggactatgtagttttggctcctaaggggagcccacagcaggatttgtggattgcgctgcatcctaacactgctacaaagtcacaattctatgacgcaatccttaatggcttggagttattcaagattaatgatacgactgggagtcttgcaggcctcaatccagttcctcttcctaagcaagatcaaattgacccatcacgggttggagcatcatctggccatggtaaaaagagtcaaacagctattatagctggctgtgtatctggtggaattgttctagctcttctccttggttttcttgctatgtttgtattgcgccgcagtaggcagggcaaggatgcaagttcaagtgatgggccttctggatggcttccactttccctgtatggaaattcacattctgcaggttctgccaagacaaacacaacaggaagttatacgtcttctctgccttcgaatctttgccgtcatttctcatttgctgagatcaagtcagcgaccaaaaattttgatgaagctctactccttggcgtgggaggttttggcaaggtttacaaaggtgaaattgatgggggaacaactcaggttgctatcaagcgaggtaaccctctctctgatcaaggtgttcacgaattccaaactgagattgaaatgctctcaaagcttcgccatcgccatcttgtttcattgattggctattgtgaagaaaactgtgaaatgattcttgtttatgactacatggctcatggaacactgcgtgagcatctatacaagacccaaaaacccccactgccctggaagcaaaggcttgagatatgcattggtgcagcccgtggattgcactatcttcacactggagccaagcacactattatccaccgagatgtcaagacaaccaacatcctattggacgagaaatgggtggctaaggtctctgattttggattgtccaaaacaggtcctacattggatcacacgcatgtcagcactgttgtaaaaggtagctttggatacttggatcctgagtacttcaggcggcaacaacttactgaaaaatctgatgtttactcatttggggttgttctctttgaaatcttgtgtgctcggccggccttaaaccccacacttgccaaagagcaagtgagcttagcagagtgggctgcacattgccacaagaaaggcattcttgatcagatactagacccctatctcaagggaagaattacaccagaatgcttcaagaagtttgctgagacagccatgaaatgtgtttctgaccaaagcattgagaggccatccatgggagatgttttgtggaaccttgagtttgctttgcagctgcaagagagtgctgaggaaagtggtgagggttttggcaaaatggacgctgaggaggagccatttatggacttgaaaggaaagaaggaccccaatgcctttgatggtaatgtaacagattctagaagcagtggaatgagcatgagcattggtgggcggagcttagcaagtgaagactcggatgggttaacaccaagtgctgtgttttcgcagatcatgaaccccaaagggcgttgagtcaaagtaaaaaaaggtacaaaactaattgttcctatacctgctcatgtgatctgttttcagcgtttagtctatcaaaatcatccaatttgtttctttttgttcagttaccgttatgatttcttttcgccttcttcctttatattcatatgtttcccttttttttcgtaaatttagctgtaatttgtatctaatattacttggagggtgtaaaattaaatatggtgtacctaccactactgaatctggtagagaaaagttggagttatttcatatattctcattcaatagctgatttggcttgtattattgaatttatttttccaatcacagattagatgattgaattcatcaaccaaagttgttttccctttttaatcttattttaaattgttaagctattttttgtcaaaaaaaaaaataataaataaataaaaaattgttgagctgttttaatgctacataaatcaaaacaaagagctttataacatgtggtagggtccatccttagttgtcacaaaatcgcttgttagtgggaactaagactttattaaattgtttgggtaatgaatcagaatgaccgaaatttggttgtatttaattttatttgatttttttataggaagttgtttgtacaggggcataacatgtggagttttattttcatctaaacacttacaaaaaatttagggtgcttttggtttatattgaattagttttttgttttttaaattagaaatggaaaaatattttctaaagtcatgatttataaaactgtttttgtttttcaattttttaattgagaattaaaattttggaaaaaaaaaatgacttacaaatttttaaaattttttttttcttaattaaaattttgaactccgattctaacttagattttggaattcagacttagatccaaacacaaactctgacctggatctcgactttgaattcaaacccaaaagtgttactgaacactaccttaattacttactttttattttttttttctttctttcttacattctataagaaatacaataagatttgtctccctaattgtaatctttagagttactgcaaatatttcctgtcacttatatttgttcattttttaaaatagtttactccttgtgaagcaaagttggtgcagttcaagaaacccgagaaaaaagttgtctataaataattgtattacaaattttaggaattgtaatcttgaaacagtatagttggctaacttaaagtagttgaatattttgtacaacaactttactgtttttttttaatgaaagaactatactgtttgaaaaaaaaaaaaaaaatataagtagaatataagtaaagggaaatattttcagtaatttttatagtgcacgtaatattttttgaaaagaaaaatcagatgtaaaactatgcaagaatagtttggaaaacaaattctacttattttaaatattaaaatagaaaaatacatgtaattttattagaatgaaaaaaatatatgtacattacttgttaaagaaaattttaaaatacatttattaagagtaaatttaaaaattaagcaaaaaaaaaaaaagagcaaatttaagtttgattttttttttttatatatatattagtgtattaataattgtgttgtttgactttttttttttaatgtgttattaaaaaagagttagaagttctctattgtaatagaaaaaagttaggagcatgtttggtattattttctattttttgtttttaaaaaattatttttagaaatgagaagaaaaaataatttttgaagtttttaaaaacagaaaacaacattt

SEQ ID NO: 17026 - DNA, 3993 bp, Cannabis sativa
  modified_base (308)..(310): a, c, t, g, unknown or other
tcccccctcaagatggtagttattctttttgctcaccatcttggacaactcgatcatattcggctctttttttagctcactatccctgatcacaagtggctcttttgctctacttttgggattgataattttttggtggttctttttattttttagctcactattcccgaattagaagtgactttttttgactttggctcttggatcagttatttttggatttttggtggctttttttttggctctactatgatcaattttttttaggtgagaaagtcgctagagtttttttttgtttgttttgctcnnntaccatgttagaatttgggataaggtgaatgaggttccatctcaaaaccaattagcaatgggaggagtagcccattcctgtagcccattcctcttatatattcctcttatatattccacttatatattccattatctttccacacattagcaatgtgagactctctctaacagatcccactaagttatagaactctatcatcttcttcaccagctccaaaatcttaattttttcctctttgaaaaccttgatctcctcctcgaattcctctaagaactctttcatttctctagcgaaccaccacttgtcctcatcgttcgtgcagaacgagaatcgttttcgaatattcgagactcgaccttcaagggagctgtaaacattgatgaagcttcgcattcgactgtggctgctttcttcacatttgagagttaactacttaaaagattccaacaatgacaaactaacaaatggtacccattttccctttgttctgctgtaagattatgaaaatttgtaacaatggttagttggggtttttggttcggttcttttattaattatgatttggtgtaacaattaaaatatataagagtttggctgtaaatttctctataaaatattaataaaaagataattaatgtattcaacggagtgtcatcctcgtccttgtcatgtttaaggacaagaaatgattctcgtctccgctctgtttcccgcctcattaagggcaggtccgcgcggggccataaggataatgtgcattcctattggaaatttacttggaaatttaccctttaaaagaaaaaagaaactaagatataatacaaattcttaatgtaataaagaaaagaaaatcttaattacattacaggacaggataattcaatttttatgtaaatctgcctgaattttggtgagagttgaaatgacatctcccatggttggcctagtctccggttctggattcaagcatgcgacactcaatttagcaaccctaatggcaaactctacatatctatgatcttccttaaggccatgatcaataaacatatcaagcttattagcttcatcatctccttccataatctccacaatggttttcgacagcaacacttgtcttccattctctttcccaatcacagcatttttcccactcaaaagctctaaaaccacaactccaaaagcatacacgtcgatctttggtgttgaaatcccatttgccaaatactctggagccacgtaacctctagttcccaccacgtgagcagtagtagtccttgggaaatcggaatgagaactacttctacgacttgggatgttcacctgatccgtagctggcccagcaagcccgaaattggcaatcttggctctcttgtctctgttgagcagaatattactgctcttaatgttcttatgcacgtaagccggcttagtgaaactatgaagatagttaaggccatgggcaatatccaaagcaatctgaatccttgtattccagctccaatccttttcttggtcgtttttgctaagccactctcttaatgaaccattttccatgtactcgaatactagataagaaaactctctgttcttgcaaatcccttcaagcttgatcaaattgaaatggtttaactttttcaaaatgttaacttctcttgagacatctcttttggttttcttaaccgctaatgtaatatgacccttcccaaacacaccatggtagatagaacccacgatttgattctcggaactgaaattttcagtagcttttctaatctcctcgattccaaacctttgaagacctctttcgaagctagcaatctccactcggagatcttccggcgacatcgtcgtcgttctagttggtaacaataataaaccctttggcgatgatgatgacgatctctttgatttgtaaacccaaacagcagccactataacgacacagaggactagcaaagaacaaccagccgtaatcccaaaaatagcgtaaaatttcttcttcgatttagtctctttcgaaggaaaagaactaaagggtgtcttatgatcatcataactcttattatgaactgtggtttgagaacttagaggctgagtagagagaggaataagaattgtagttttaaagaaaattgtcggattgtgctccgaaatcccatttgcaaagagtaagtttttcaaagtaacgttaaatctctcaccaattttctcaatatcgtcgcctgagctaatcgggtatgttaagagatatttggtgccgtttcgggtttggttcctagtcggacaagcacacctaagaggaactttcagttccatgccaccctgtaaagcatgttcttcatgtgaattggcacgaacaagagaagtacaagcacttaatccttgaaatacatcgttagcgatggttgaatacgtatcattctcgtttaagattactgttgcattggcctggtagtagtactgatctgctccacaagaacaattaacaggaactattacctctttgtttaaaggaaaagatttggttttttcaacgttgttgagtctagccaactcttctgggctcgctaacgtgagcttggaaatggttcgaatcgaatcgaaaaatggttgagttttgaaaatgaggtaagattggcagaaccgtttttggccgttgcaagtgtaaagtatggctggggaaggccctgtcactgattcatggttgtcaatgtcacagcgttgtgattgtgatcctgaataattttgctgacagttcgcccctaaattcaaaagatttagtactagaaataagttgaagagaatgatctgaatcatgattagttgtttattttcaacaaaaaaaaaaaaaaagaaaatagttaagagaattgtacaagaacagagagcggaagaaaacagtttggtgtgacgaatataaagcgcgtttaggagtttttaagttatgttgactaaattgtgagccccattttaattaataattttattttcctttgtcttttctcgtaaaactattgtacatcatctacgaatttcgtccaacctagtttatttattcatgattgactcgatcaaaacaaacgttttaattaataattattggtgttgtgttgatacaagaaattaaccaagagagatttgtttagggtttgatcaaaattgtgtggcttgccttgtgagatctatttctaaactgtttatcataaaagaagaaagacttgggtcttggaatccagggatcctccctaattcgcaccccttcacttgaacctatacgccttcaattcaactttctaaaatattttgaatcatccaattttgagttatcgagagagttatgactataatttcaaataaaagaaggtgacccatctaatttcccagtaagaatactcccattctcaacggttatgatgaaacttgtttttttttagagcaaaagatagtttattcaatcaaaaaaatttagcttcaacgacaaatataagatcaggaggagcatcgcttactgaaaatacaatctgaagataaacaagacgctcatgcaacacaatgagcagcctatttgcagactgtttaataaaatttaaagaaatatgattaagacatgaaagtaaaaaacgataatcttgaaccaaccatccaaattgaattaactagcttattaattagattattat

SEQ ID NO: 17027 - DNA, 6343 bp, Cannabis sativa
ttctgaactacaagtggcttgatccttgacaaagaaggtatgtaggcagctcggttaattaaattgactaggttcagctgcaattccaaatttaccccaaatttccctaatttgttttaattatttaatatcatcgtaattggaatcaaagagtatctcctttaaacgaaaggattgtaattaagagattattcttataatcttggatgggtcgaactcaaattaataaactcttatgctataattttagcataagtgaaattgtgttttgtatttatttttaatattctaaatgtaaaatttttgcttaacaaatatacttaaaaaaaaaatacaaacctacattattataaaatattactaaaaatataaaataaaatatttctgttccccacttaaacgaagaatccccgctccattaaaagggtgtgctgtgggaccctaacccgtaggagaaatgtacatagcattattattaggcaccagtagtgcctagcacctgtggtgcctagcaccttctcgacatgtcgcgttctgattggctagcgatgctccctaaaagctattatatcaaattatataggacccgatattattacaatagcgatattaacacgtaagagagggtggtagaaacgacgggtgaatcttcttaattaatcatcagtaatgagtaaccgctcaaaacgtactagtttgtttatccaaactcatataaaaggtaactacttgacacctgatgtgatgacaatacttggtacgagatatgggagagttaaaatggtaactctcatgtttaccaaaaaaacaggttgaaaatacagaagcagaataagcagttgagttgagtatcaaagcaagggcattgccggcaaaacattcttacccaacccaacccaacccaaccgcctactccaccggttccttccttctatttatacacacacgcacgcatttctttatttaaatatatatatatacatataacttttgtgtttacttcctttccttcactttcttttcccggaaaattctcttctaggattacccgtaaagctacagtttggatgcatagaaagactgatccaaacaaaagaaccaacgaaaatgcgaggtcatgattggatcaacacttgtctaccggacgaattgatcgttgagatcttccgcctacttgattctaaacccagccgggacgcttgttccctcgtctgcaagcggtggctagccctagagcgccttagccgcaccacgctccgagtcggcgccaccggcagtcccgacctcttcatcaagctcctcgcccgccgattcttcaatgttcgtaacgttcacattgatgagcgcttgagtattacgctccccgttcagctcgtaagtttttgtttcatttaatgccgaaccaattgaccatcagtttctgccccattctagattgtgattctcttgattttgcctcaattactcttttcttttcaaattctgggtcgtatgattggcttaacagggaaaattagaatatattttttttttcatatgagcttggaattgacttttgaatctcaatgttctcgatgtgtaatatacatttgaattgtcgcattagattggattgaattggggtggatgttgtaccaatcgggctaagcttgttcgtgttcatggtatttgacccggtttattagttttcttgctctttcaacaatttgattatttgattgtgggtacagggaagaaggcgcgggaataattataatgtggtttcgtctcttcaactatatgcaactgaaaaagatgggcctgaagatgttggatttgagtcatgtagtctatctgatgctgggttgattgcccttggcgatggttttccgaaacttgagaagctgagcttaatctggtgctcgaacatctcaagttctggcttaattgcactcgccaataagtgctcatttttaacagctttagatttgcaggtgaattttttgtttattacacgtaaaaattgtaaggtgttttatgggggcttatcttttttgttcaaaaatgaaaatatagtttattgtttacctcattttccccaagttttttgacatatcattttggtatatgaatttcttcaaagggttgctatgttggagatcatggtctagctgctgttggacagtcttgtaagcagcttgaggatttgaatttgcgattttgtgaggctttgactgatacgggtttagttgaattagcccttggttgtgggaattcattgaaagctcttggtattgctgcttgtgctaagataaccgatgtctcactggaagcagtgggcagacattgcaagtcccttgagaccctttctttagattctgagttcatgcacaacaaaggggtgcttgctgtagcccatggttgcccatctttgaaagtattgaagctacaatgcatcaatgttactgatgaggccttgaaagctgtaggcacttcttgtgcgtcactggagtttttagctctatatagcttccagagatttacagataagttagtgccgttttcttagtatttgtcgtctctcagttcttacaattttttatttgatatgcgcttttggtcatttattgtcaagtaatgtgctatctgattacaggtttgaagaatctgtaaccgtagaactcattagagcaaaataaatattacgtacttttttttgtcttttacatttcctcttagttttattttccaatttttctattgtttatctaaatgttattgggtgccttagtttataagatagaagagaggtggtaacggcttggattattctcttttcccttatatctttctttaaatttctagtgtgttctggtactcattcttttatttcatcctgattctaaaactcaggggtttgcgctccattgggaatggatgtaagaagctaaaggatctcactgtaagtgactgctatttcctaagtgacaagggtttggaagcaattgccactggctgcaaggagcttacacatcttactgttaacgggtgccacaatattggtactctgggactggaattcattgggaaatcttgctcgtatgtatctctcccagcttgaattaaaattggtatataataggaggtaatactatgaatgaataggatggagttgacgtttaagttacatgagcagactattcttgaattatgttaagttctgtaattttactagcgtgttaaaaatatgccatttcttcctttccatgaagcgtgaacttttctttttccagcttgattggagaaataataatcatttttgttttgtgccaattagctgttcttatttatcctttttttttaaagtagactagtttgtgttaggacgagctcggttatttggttgttccactacattaattatgcttgttcagataaatttctaaatccgctttttcttcatgtcaagtctctcggttgcacttgcactaatattgacatctgttcacgcaatagtttatatcttttagtttgattgctatttcatatatcctggataattgcaggcttcttactgaattaacgctgctatactgccaaaggattggcaaccgtgcactcctcgagattggactgggttgcaagctcctacaagctcttgatttagtcgattgctcaagtattggagatgaggcaatttgttttatagccaaaggctgtaggaacttgaagaagcttcacattcgtcggtgttacgaggcatgttttctgcctcacatattagttacatcgtttatgagtgttccttctcccataagatccatttatatatgccttttagactaaagtaaatatgatactttcggacaaggttactactctagaaccatatcattattactgagaaatgccttataagatgcatttgagtgtcgttttcttgtagtggttggtcaggtagttaccatgtgaattatttttgaaagcatatatatccttgttgttggtggttataggttggaaacagaggaattaaagctgttggagagaattgcaagtccctgacagatcttagcctccgattttgtgataggtgaatttttctatttcattgtttttgtaaaatacaaatatttgagtttgaattacaccttgatttctgtcttaactcatatatcaattattagggtcggggacgaggcacttgttgccattggtaagtgtaactcgctacagcgtctaaacgttagtggctgccatcaaattggcgatgctggaataatagccattgcaagaggttgtcctcaacttacctacctcgacgtgagtgttctccaggtatgttgcttccttgtcttccctctcctcctctttctcaaaggcgggcagaaaaagccttatgtttattttgatgggacagaatttgggagatatggcaatggccgagctaggagaaggctgttcaaatctgaaagaaatagtgttgtctcattgccgtcaaataacagatgttgggctatcccatcttgttaaaaactgcactctgcttgaatgttgccacatggtgtattgcccaggcatctcatcttctggtgttgccactgtggtttcaagttgtcccaatataaagaaattgcttgttgagaagacgaaagtcagccagaggaccaaaaggagggctggctctattatatcttatctctgcgttgaccttatttaaactctctatattattgctgctcttccaaccctgaaatgaaatccacacacaatatacaaaccccaaaccaccaactaatgatcaaattttatgtttctttgtggttatattagtctgattgcttgtttgtaacggttttttttttccccactataataattaacgtatgcaaaaatatgctttaatgtaaaggagattgtgaaatttaaagaagcaattctttcttgactaataaattttgaagctgccgagtccttttttctttgggcatctttacacatctataagatcttttgaaattacaatgaaagaccgttttattattacagtaaaaccttcttcaaagctgtatgagaaaaaaaaaatcatttactcgttaaaaaaggaaaaaggctctaacttgggattggggttataaataagaataattttcattgtgtaataaggcataattcttccaagtccaatagtaatcattagctgatagttatatataaaaaaatacaagttatataaatttaaaattaaaataaaatatttatttccatgttaaaattaatgatatctagctcagttagagagggtgagaaaaattgaagtgaataagttcaaacacgagaaaaatgatatgtaacccagagacggacttaggatttagggtgggtgtaatttttttttatgtataaaagtactcaaaatatgggtgcaaatatgtttgtttcgtgctagcttgaatcatattttttagtctttttaaagtttgaattgtgccgagccgagctataaaaaatatgggtcgtatcatgtcgtgctataaaaaaatatgggttgtgttatggcgtgcaataattttatagggtaggcccgacatggtctgcaagctcggtagttttgtgccgtgctcggattcgtgtcgtgcttaatttgggtcaacctaaatttcttaaatagatcaattcattttcttatatgagctcaaattcgtgctctatatttttgtatttttattatcattgatgagttaattactaaaatatgtgtattttatagttttaattatatttacatcttttttcaacaataattacgcacaatcataacacgtgctggagagagtcacgttctaaggtttcttccttcgcttcagcccagccgcttagacgatctgacaatgacgacacctccccattcgcagacgacggcggggtaagctcttccccatttgcaaacgccggcagtgcacgacctcccaatcgcagacgacggcggcgagttccttccctctcgcaaatgtcaacgacggcggttccgtgttcttccgtgtcgttgatcaaagacagtagaagattggttcaacctgtttccgtgagttatagtcaacgattggttggttttagttttctgtttctatgagttattagttggctttagttcgtttgttcttttgttgaacaattggctttagtttattgttttcgtgagttacagtcaacaattggttgctttacagtgaacgtttggttttcgttcttttgttttaatttactcttttttttagtttttttgatctttttattttatactgttattaggttaattcctattagtgtttttatggggttagaatttttagtttcatgtgtt

SEQ ID NO: 17028 - DNA, 3509 bp, Cannabis sativa
tgagttcatataataaaatgaagttttgatatatctggacaagtttaagaactttctaagctctagccaatatcgacatcattagtttaatgaaattataatggttctattgaaattattgtgtctcaacaaatactacaccatgaaaaggggttctctgttagcactcacactgatcaagcaaataaactttttaaacttctttagtcttcacaataaaacgcatgaaaggaagtaatgtcacttcaaacaccaggataaaactaatttcataaaatgataaaattggtccagattacataatatttcttttaattaataaaaaaatcaaatttaatattttttttaaaaaaaaaagattttaaataaaaaaataaataaataaaactcctaaaatctactactctatccctcactctcctacctttaccctctgccatcggcctagagagagatttactgttgttttggaacttttgtttggtcctagtctttggcctttgtttcagtttaatgcaaaacatgttctaccccaaatttaatttacaacccataattgaaaacccacgaagaagaatgatttcatataattacaatgaagttttttgattttaagaagacccaaatgctttaatttagcatcagatgctttaatttaacatcagatctgaaaccaaaatctgaacacaaaaaatgtaagtactaatgaagaaatttaaagccaaaacacaaaatgcaaatccaaacccatatctaaacttaaatttgtagcgtagatttgaacttgaatatgaagtttgcatctatctctagttcattcctcaactctacaacccatcctgaatatgcatccaaaaagtgttatcagaaaattagagaaagcatctcaaaaagtgtttcctctagctacttgtagaataatcaataatatcatatcaatagacaaaaaaaaaaaaaattactagcagaacttttaggtgtagtatgtgcagaacgtcctgattttacattcttgtccacaccctgcttttgtcaagctcttgttgcttcagcacattctcttcaataagtttcatcaatcaatcagcccctactcattagtctcaactgttggcaagatgtccaagccatagtaatgatttatgtatcccctttttgaaagggtataattatcaaaatgaaagtaaatagttccattaaacttttacgagtctaggtaccccctgctctctaatatcaagttggtagctctagctttctatgacaaggtcggtaataagataaagataattattttccagctataaatatatgatggatgaatcaactgcctgagtttaatcacattcacaatctccattttcatctattagagttagtcccacattgctaatgtgtggaaataaattgtgatatataaaatgaatgggctactcccccattgccaattggttgtgtgccaatttccagtgttgggatctttgtttaacaaatttcccgacgtgtacactttcgcgaccctctgattttttaaaggtattaaaatcccattaacttattgtagagattgagaaaatataactaatctatccaatgtgtgtccatccatatcaatcaactatgaatctaaattctgaactttaaaaactaaaacatttgataataaagatgacaaacttaccttttattccaaccctgcaaaatatcaaaccacacacaccattaatatcaaaataaaaacccctttagaaaaattcattttcttacaaaaaaaaaaaaaaaaagaaaaggctttagaagatagtgaacgaagaatttccattttttttcatgagctcaaccattttaacctataacagagttacacaacctaatcattgcttaaaacataattatatcaaaattatggtatcctgaaacaatttaatctcaaaatagaaactatagtttgtaaaatagaaacgactaatatttaacagtatatatatgtatatgaaatggaaataaatatcataaaaatagaaataatttaacttcaaattagaaactatagtttggaaaatggaaaccattcaccatccaaatagacaccttttaacctccaatggaaaccattgtttaggaaatagaaacaactaaaatcgaaatgaaaactaatatatgttaaattgaaacaaatatcataaaagtagagattattaaccaataaaatggaaacaaggatttgaataaaaatgaaaacttggttattatgaatgaatattgaattagtacagtatcatcaatattcatttttcacatcacatgttctaatttatctcctattttttagagtaatttatgtattcattcttccctataaatagtgaagccaattcactatttgtggacttcttttttacgcattagtaagaaagaaaagtctctgaaatatttgtaacatttttgagagatattagaaaactcacctagtcagatcttatgatcttcatatactttcataaaagtaatacaacagaaaggggagtaggctattactgcaaaaaggggtcaaacctctataaatttcgtttatcgtttacagttttcataatctttgttattatcattttattgactatgttgcattgactaaaaacgaggtcaacaaatatcattcgattaaatgtgtaaatttggattgcagtaaggtgcataagggatataaatacttaagtcctcatggttgtatttatatttagattaacttgcctttttcattagctccagctcagttaaatgcatacccaccatctccaggacattctccacaagatcaggtatcctctagccatgaaatcagctctcctattcttattgcctcttttgtcaaactttgatatggcctttgacaactcacctattccattgctattagtcccatacatgagtcaattacatataatcatgttgttcttagccctgactctactcctcaagtatcagtttcctagccctgaatcagttccagctctagcccttactgttgtgcctactcgttcaatgatcactcaaggtaaaacagtgatttttaagcctaaagttgtgcttggcatgggtcttgcttcccatgactaccaagaaccattttctcttcaagaggagcttcaccatgaggggtaaaataatgccatgaatactgagattgtagccttgaagaataacaagacttggtacttggaacctttctcacctgattacaatgtgggtggaaataagtggctctacaaaatgaaatttaatgcaaatggtacattttaaaggtacaaggctcgtcttgtagctaagggcttcgccaaatacttggggttcatttttgagaaaatttaagctctattatcaaggcatctacagttcgggtagtacttgccatagttgttgcgaataattgggagattaggcagcttgatattataatacctttgccaatagaaaattggatgaagatgtatacatggttcaaccccagg

SEQ ID NO: 17029 - DNA, 8985 bp, Cannabis sativa
  modified_base (225)..(229): a, c, t, g, unknown or other
  modified_base (611)..(612): a, c, t, g, unknown or other
  modified_base (2242)..(2253): a, c, t, g, unknown or other
tgaattcttagatagtctctctagggtaaaatctctcgtcctttgcccagtgaatatgcatcactatttatagggctatgaacttggagaggaagtattctccttctcattacaatggatataatcaaaaagattgcatgataaatacagaatacactgatcgtgggattcagacagctggccatatctctatgatctaatccccaagttatagggatttctttnnnnnctcacgatgcgaaagctaaattcactaagtgttgatcgctctgcgcggattgctgatcgctttgctccagacatgcctatgaggcatcttgttcggactataccctccgagaagatactcaaagttgattccatgtgtcaccatcatgtgatgccacgtcagagtgaaaaaattaggataacaattattaaaaaaaattgtaaatatcatattaacaaaattatatacagtcataaaataattataccatacttctaaaattatatatcacttttataaataataaaattaaaattaaaatctaaaataaaatgatatactatactatataataaaaaatatataccttacaatcagaatatatataataacaacaaataannataaaaatatataggatgctaataaaattatacataatattaaaaaaagtacaatagaaaataaaacttaaatataattcaaaaaatgatataccgtatagcaaaaaatacatataccattcactatatatactaacaataataataagaaaaatatatattactaatatatatatatactatactaactaaattatataccacaatttaattatatataccatgacaataaaattatataccaccattatatataaaaaagtagaaactaattaaatattatttaaaaaaataaatatcatacaattaaaatgtataaaaataaagagtttttttttatttttatacatctaaacagttttttttttgaatttttacgaaattctacatagaaacccctattgcatatggggtaattctcctaaaagtaataatttaatatctgtaacattctaataaaattatatacatacattaaaatatttgtattatactaacaaaattatatactaccattatacatagcaaaataaaaaataaatatcatctaagattaataatatactatacaataaaatagaaatatgctgtaaaaaaaatctatatactaataacctacaacaactcataaaaaagtaaaaaaagtcgacataactttcaaataattttttttaaaaaactaatatatatataccataatctttaagtaatttgcttctaattctaaaaaaaatataagaaaaaaatatttaattttttttatgtggcaaaagacagtataaataataaataagctaaaagggtcattttgctacaagttttgaaatgagaacatttattaacatagtcttatgatttgaggctatttactataattttctaaaagaaagactagtaaatgattgctcaaccaaaggccgttaaattaaatagatactgggagtaatggggcaaaataaaaagaaataaaaatataatagtgaaattatgattgaagaaatttaaggtgcgtttgttttgtaacacttttttaatcaaatattttgtttttcaaattagataagtgaaaatattttccaaaatcatgttttataaaattatttttactttttaatttttttttttaattgagaatcaaaattttgaaaattttaatcttttttaatttgaaattttagactccgatcccaacctagaccttagaacccaattctggaccctaacccagacctcaacctcgactcgaaccctgacatggacctagacccgaaccagacctggacctcagaccacggatctcagacctgacatggactcagacccaacctcacccaaatcgaaccccgaacccggaccccgcccccggccccgaactcaaacctcaccccagacttggacctgcacccggacctagaccccagccccaacatcaaacctcaccctagacaccgaccttgcccaagccctggacccgacctcgactccggacccgactgaaataaaatcaataaatgaaaataaaatttatagaacaaacttttgtttttgtttttaaaattgaaaaacaaaagtagtagttatagaacacatatttgtttttcaaaaaataaaattttaaaaacaaaaattnnnnnnnnnnnnttgtgattaaaaaatttaaaaacaaaagaattacaaaacttcacctaatgtttgtaatgattaaaatgaaaaaagaaaagtttgaaacctctttatataaattttttacttgggtgctccatcattagttatggtaaggtaacacttgttatcatatttaaaatgagtaaatatcattttagacgctgtgtttgtaaaagttaccaattgaatcctctattttgataaatgataaaatagatcttatatttttcaaaatgataaaaataagaccctgagctcaatttttgacatctttttttaaatataaccaacttgaagataatttttaacatgaataggtacaaaaatataactaattttaccataatagcgcaatgcacagacgtgatatcccaataccacctctaagatgtgttaccaagtaagaagatgaatagatattgaaaggagttcatagaggctctacgaaaatcatgctaggggcaaagccaattaggtgtagatgggatcaaaccgcaacattacctggcctccaaaaggctggctgaccatggccttaacaggctggctggccatggaatcaacaacctggttcgccactacctccatagcctggccgaccatagcctcgtccaactactcaggcaatgctccctcaatgtgactggctacctggcctataccctagctagcctgatccgccaacagtcaactctcatactttttggtctactatgaccaagaagtaaaccacatcttgctagcaggatcccttgacaaaagggaaaaaagaagagaccaaaccaacttaaagcggcatgtctgccagcaaaaagttgccaggtactccaacaaacaagtcagagagagtaaattctttgtaagagacttagtctctgaagaatattccttcacaaaaaagatcttacaacaagcatgtttggaccaaattgaaaaggcctgcacaaagttataagataacaagaaaaggtgcttacaagccttgatgagaacttggaggtggctcttctaccaaaatactagaatggagaacatctcagtaagtactctcactagccaacttgtaaagcgattcctctaattttttagcgtacaaaaattcataaaagagcaactacccattacttttcagcatggcctctcatcactcttcagcgatggcctctgcctggcatctcaagcaagggtagtgaaaatgtgatttcaaaagcgatcattaagttgtaagcttttgttatacctaagatcaattttttttttagttccacatgcgtacaccctgtagcaccccaaagaaaattcctagacaaggtctatgaaacttagtgaatgacatactaaacttggtgaactagcacagagaacttatgtagagaaattttaatgcttagtataagctactaaactttcctctatgtcaagtgcaggtatacttcagcttggcataaagaaaagtaaatctggatacttacatgtcaaggaaataagaagatagccaagataatcatatgtcaaaaataaaaggctttaaggttaaaaaatagtagtgtttgaaaatagagtgcctatacgtaaaaacaaagaacatgaaagcatcaaggttgaatatgaataaaaaattggttcaaatgcataaggccaaggccccgcaaaaatcgtacaaccagagaatacgaccacgccttctggaagttctgaaggcaaagaggtaataagagtggaggcattgtgcttgcaaggtctaaggacccgaccaagggtactctgcagccactacccctgcaacctaggaccgcctgatactagacaagagtacaaggtgtaatgccatctcttgtgcctataacttgcagggtgaaagcaacattttatccccttgggaccaccctgtacttcaggctattgtagcttataaatacccctccttcaaatgtagaaggggagttggaaaatcatacttgtagcaccatattgagagcaatagaaatttctccattgttctctctgttttgagataataatttgaatatatatttccatctttctcttcatctcatttctacacttgaagcatacgttgattttccaggcacaagttagttgacaagttctcaccatccatagtaagtttgctgcaaacagagctagatatgaacctaccttgggctgaagcctctcagcaaccacctgacggtcaaaaataggacgaagtggcttgtttaattttgcagcatcagcaaatttggcactcagcctagctgaaaacaaggatgcttttttcctcatatcgtcatattcagagtttaattgcttgagataaaactaatctgttgtatccaactaagcacgtacttcttccaacagtgaggaagggtagattggtaagacaatcttggaaggaggaagtgatggaagacttatcttatctttggaaaacttggcagaaagagcttggcttggttgggatggcagaggctgagagcttgtaatgtctttgatgaatgagtgctctgcctatgtgccctgtcacctccctgagcatcagttcctcttcgtctggaagactctaaaatttgcttcctagtagcagtaagttgttgaagcttttctttagcttcgatcctcgatcttttattgtctcttccaagttcagagtaagatctctttcttaacacaagtccatccccatcatctccttgtcatcatccaagataattggtccctattggagagggaatatttccaaagtagtgttatttaccccttattggggagaagaatccaccactgctaaaaaagtttaaggatgggcaataacttttaaggccaaagccatggaaacaacttcctggcctttggcaagaactgttagctttatagctccagcactagaagattgcccaacttttcctttgccttggccacccttggaaactaatttgacttcatccgacctctaggtgatggtgcctaagaatttgtctaccaaacccatctttaatgtgaatggttgctcttcaaaagataacataaattcaaatgttaagcatgcgatcatcagattaatgtcatgaaaaacagtatacaggtgagattctaaccatttactttagcatacttgggttccatttagcaaactaaataatatcttctctacctaagagacttccatgcaggaggacccttgatacaacatcttgctaaaaatatctaccctaacatcatgtgttggtaaaataaaatggttttgactcctaatgatgttgtctagtctatccatataatcactgacgggatatctatgatgattaaagtgcaaaaaataagggtgaaacccgccttggtctaaacaatctaagtttgccaaagacggggccctaactagatagaataatgtcttaccacttccaaaggtactcactctacgagtacccacgttctggacactatcattaaaaaaaataacaagctcttttgcctcacttaactttttttgaaatttttggtaccacttcgccaaccagttctgatcacttttaacaacctttaaggcctcttcagttataataactaaaatggtttccttcacttcatggtgaaatccctggctggatccttcacgggcagagcataaatgctctaatgagaagccaataaattagcttcatgaaggattttggtggctacaagcactccaacttaaaactcttttgttgttaaagactcataaaaggtctgcctcgcctccaactctagagttaaaggaaatcaaggtatagaatctagagaacacaaaaaggcaggagaagatcaatactaaaagttagatgagagcgaagagaaatcagaaaaagtcaagcaaacaactacacttgtgatattaaaatcaagactgaaggttgaaactctctttagtggaaaatcggagatgtaaattcagtagtcccggatgttgtatgtttacttctcgacactagtggggaataccaagtacttagaatgcctctccaacctataataaccaaccttctcattgtggttcctcatattatgggctttgattttaaagaagaacaaaatcttctatggagtaggaactagtttctttttgtagaagcacaagacgtaccctctagaaagcagacagtacacttgtggaaggaactggtatggagccactctagctactacacataactttgcaaagtaacacctcaaatgtagatgggcgcccatctccacgtgtccccaactccatataccgaagcctccttctgcacaatggctaggcgtctccataaaatagaaagtctattcttgaatagacctagaactctttccggccctctctgtgtctcatacttctctaggtttccataagtccagaacttattagtatattgatccattttccatggagatgcattcaatacaagattagactggtatcctgttccatcacaacatcttatccttcaacttttacttccttttgctgaactcacttaggcatgagggatactaaaaaaaataccaaccagttagcatgccaaacaaatgatgatagtaagggcatagttgaatcctccttcataacttctttgacaggtccccaccaaatacatcatccaaaaaaatattcttaatagaacacttgttccagatagttgaatcaagaatagcaagaaatgaaagataagaaagctcatacactatctagaaccataatggcttaggataaaggagtaaaactttgtcagcatttttgcaaaaaaaataaactcttcccagaacaataaaacaaaaagacctgattcctactgattcctaaagctattgaaaatagcatctgaaatgttctacttctatcaataataatatttcggtcacaggtgcaaagtcataattttcaaacagcgagtaaatcacatgtaatttctatatgttgaacatgcaacatggttcaaaaaataaaaaaagaagaaaatttacctagtgataaattatgcgataattttggacttgagtagaaatatggtctgggtgagcacgcgctaacatcaaatgatggacgtatagaaattcccttgatatgaagatcttcaagatgattgagcctttttgtaatggcattagagtggtaaataaaggaatcgatcttggaattgatatctagatttgcagtttcttctggtgacgaagttgtaatcactttgggtggagcatctggatattcttgagccctaatttgaagaagaaggtggatgcaataataaatatcttactccagagttttaattcacgatttttactctcaaaggttcttgttgaccaagatttttggaaaccaattattaagagcttaagaaaaatgcaaaacaataaatattacacaaatggttttttatgtgatttgggcattaataatccctagtccacgagttattgtattagccttgtcggcgagtatctgagtattacaagtgtttacaatggtaactctgtattcctctattttctctcaaaggagaatgctttttgggaattttagcagaggttttgtaagtaagtagaaatatccacctgctgtacatgacaaataagggtatttataagcacacatctgggtaaggacatacctttacccacctagtgattcttactcaacacgccacaagggaaaatacttcaacaggacaatctgaccgctggtttggtaggtagctttcccaatgtgtggtgctcaatcgatgcaagatactttgtaagagtattgatgtgtgttgcccagaggtttccctttaaaagtgatttcttaaacaagccattggacaataagcactacagatgcacatatgcacactactatggtctgacataggggacaagtcttgacacaatgtcaaagatatgaaaccgttgggttcagctccgaaataggcattgtggatttctagagaggtctaactaaggtcttcttggaccagctaattttataccatcctggagaatccgtgacttttgttcacttccagtagcaatattatagacgagcatcccaaaatgattcccaccttcgctagaaaagagggcttctgggtaccacaacaccttttgtaaccctagtaaggggaagatataagatagcaacaattaatctaatgtgacacccctctgtgactgtcacgtaccattcatccaagaacagggataatatttaccccttaagctcttgggactggggagtgttgggagcctacagctctttcttggaggccttttttatgtttctgcctcactaacccaatcgtcaggatgtgaaggatccttctgtggcacgttgggaacctgaaaggttatcgtgttatgcgataccactagcaactttttgaagcatggtgttcagtcagtggagtcgtgaaactcatgctcttcattttgggcgcgtttcttagaggaaacgaatgacgactagtttttaaaaagtcatcaggcttcaagtacgttgggaaagtgctacaaaatgatgaataataaacactttattctttgtctttagacgcattaaatgtcgatccttcatatccctaactgttggatgaagggtaaatatcactgttgtcgagcaaatttcgcaacaccaaaaagtatgatttaatcgataagacagggaattatttgagagatgacaagtgcgagtattcaacc

SEQ ID NO: 17030 - DNA, 1687 bp, Cannabis sativa
tctgaatacctgcctgtagtccccctcgaatggccagcagttccgccacaattggagtcagctcctgctgcatcacagtcgctgcagcaaaagccaggcttaatctaacataattctaatagtaaatatttaatatgggtttaggattttttttgaaagattataaagttcaagggctttttatgaaataggaaaggagtgtaaagatataaaagaataaaattttatttaaaaaggagtgtgtatatataaatttttgggatataaatataacaccccattgtctataggtctatatccaaaaccaaaagaaaatatttttaaattgcatgaaattgatataacccgtgttaatatatataattaaatttagaaaattttacagcacacacatgtgtgtaattttatattttgataaatttacaaaaatttagaacaccgaaaataaggtttagaaaacatgttacatgtgttgaacattacttttagtattgtaaattattttaaatttcttaaaataattaaactaaaaaattacgcacaaataaaggacctacagttttttagggtttatattaaaattagctaaatagtttttattttgtttaaacaaaaattagcttatagcgctgaacttaaagatttaaattagatgtataaaaaaattaattagagcatttaaaagatcagacttctaaaaagaaaaatgttaatggacactaacaccatataataagtatataaattaagataaatttatttcacatatttcatagacaacacttccaaacctaatcacttttttagtggggatggtcttttaagatctccaaactatttgcagcataacagtatctatgatcaccatcctattaattaactagggttagggaattaattagggcgatataattaataagtttctatggctgtgattgattttgtatacttacttgagtgaattttgtagatttgacatgaacctatacctagtaatgtcaatcggaacccggcctggcccgatattactttggtccggcccacgaaaatagcccagattgacatccctacctatacctgtagctaataatgcatatgcacgtagctgccatttttctcaagaaaggcaaaatgatgctcctgagttgagtcctgaccattcttcatgaatttttattatccggccagctgggcatttccctaatagtctttttgaatgagtagtgagtgagaaaagtgagttaatttctcacacgtttagattagatgtatatgttcaatttcacatcagatcaactgggcttactgatgccacaattaactacatatggaaacactatactgcacctttgtaagctatctctaccaacaacatttatgtttcatggtgtactacactaaatatgtcaaagtaatttttattttcttcaaaacacaacatccattaataatttattttttcttaacaatttcttacattagttttaatatatttaagtgtcgtacattttaaattaaatattataaaatattgctaaataataaaatggtgtcactgctacaatctgaatggctcgttacttaaagggaaaaagtaggggtgttcaataaaatttacaaaccgcccaaaccaaaccgaataaaccgataaaaaatacaacccgaaataatacaataaaaattcaaa

SEQ ID NO: 17031 - DNA, 17333 bp, Cannabis sativa
  modified_base (1528)..(1534): a, c, t, g, unknown or other
  modified_base (16376)..(16376): a, c, t, g, unknown or other
ctaaagagcgacttcgaacaattcagcgtcgttggaaaagattgatgtgtggtagttctgaaggtgaacttactcttgtgcaaaactctaaaattaacaatattggaggtcgattttcttcgttcggtacaaggacccttttggatgcaagaggtggacttaatccaatttgaagcagtattgaggtccaaccccttctaatgggggtcctaggtaagtccttctcaccttgagtattatgtcacattggggacaataagaatctttagtttagggggagggatttaatttttttttttttacgttttcattgtctctatttttagtaggttagtttgttaattagtttagtgtctcgttttagtttttctgtgttgataattgagccgatgaaaattgattgattaagttgcttttgtaatctatgaaattgattgaaatctctaaccgtgtgcttgatctgttaactctttggattaacttggatgcttattgaaaaaaattgtatcgatgtaaattgttaatttttggattatatcatattttgttctattttggcttgtggtatgtatgtgtgaatggaatagaaattgaatgacttattttcttgagacgaaatccttgatgactattgctttggaaaatgatttaggcaattttctttagaccggttacgcctttcaagcctacccttatacttttatctctagtttgcccaatttgagccttagcttgtttaaaaattttaaccacttatttgagcttagttgttcccattctcaacttttatttccaattgctccttattatgccataagcttagaagtaagtttgggggagtgaagtattatgagtggaattatggtgaagtgggagattgagaagagttttgtaatgtgaaagtgtatccatcatcactaaaagaaaaaaaaaagttgcttagtttttcttcttcaaaaaaaaaaaaggaagaatattaattcttagagaaaaaaaatgatgttggattcgaaattagaaattcttagtattttaaaattttctttgggtaaattttgaaaaaaaaaatggataattgcgggtatttgtttggtatattttgcttatggtataatagagcctaaataactttttatccaccttttacctaagtcatatcattacaacttagaatgaccttttgattccgagcattggttattgacattagtggagacaggtaggttatgcaagcatattgaatattggactgtgaaaagttagtaagagtagaatgtttgtgatattttccaaatattgacatgttattagcatctatacattgtttttcaaagaaggcattcgagttaattattagagtttttggattgaaattctagttaaacatattggttgaagtttcacaggtggcagcagtagtttaattatgtggaggctttattatctgtttgtttctttgtttgtctgtttgctttttttttagtttttagtcttactcgaggttgagtaagaatctagtttgggggannnnnnnaggctatttttagcctacgttttgagttactttttatagttgttttccatctttgttgttctttttgaaatagaattacgcttgttttattttgtttcaggtttcacacttggaatatgtcaattgatcaaatttggaaagcaacaatctatagaatagagaaaattttgcaagaaaataaagctgaaactttaagccttaatttgactatgttcttgtcatattttggaaaaagtcaaaacatagaagttttatatttatttttgttctttccaacgcatcttgaatcaactcatttggagttggtatgtgaaagttatgcatattttattgaaagatgctgaagctgtcattttgcttcagtagtcgcgaccacaatttttcatggtcccgaccctttttcatggttgcgactatagttgcgactatggagtaggcagagagcttgatttttgtgttttgcctatggtcgcgactaggctttatgtagtcgcgactatgaacaaaacacgagaatttttggtggtttttgactttcaccattcaaaggtagcaaccctaatttctatttaaggggctcgtgttttagaacgaaaggaggcagaaattggacccaaaagtgaaagaaggagacagaggaagtaattgtggcgatctggagcacaatcaccaactagttctttcttaaactcttgatttctatgttaatttctgttttagatttgattatggatgttattatggattttatgaactaaaatcctatttgggaagatgatgatgttgattgattttatggcatgagttaatgttaattgttatttcttctttcttgattgtgtatttattcatgtttgtgcttaattctatttttgagattgatcacgttaggcatgctttatgatcttaatacaaaatctaaaaagttagcattgagaatgctaaaattgaataaactaggttttgttgtgaaacgaaagtatttgcatagcctatgtgcattgagattattgcttaatgcggattgtatgttagtctatcttagagatgcaatagataacatatgatttaggacctaaaagatctgaaaagagttaggttaattttataatttgtcattcacatgaagaaagaggaataataattaacaataacaattgggtaattgaagatgctttctttaattttcttgttttttttttctttattttaaactccatcaaaattatttatctaccaaatagaatcataagtctaatttagtggtattcagttcagttccctgtggttcgacctcactcgtgtgagtttattacttgaacaacgatacgtgcacttgcgtattaaaattgacaacactatcaatgagtaataatcaagggcaacaaccataatatccacgacatccacctctttaccctccacaacaaataacttttaggcttaatccaaggcaatattatgaccctgaaagaccacaaataccacaacaaccatcacctcctcctcaattgacaaaattggaaccatcatccgacacgatcaaccaattcatgactaaaataagatcatccattcgcaacctagaattcaaatggatcaaattacaaaattgttgtcaaggaaaaattaagggactttaccttgttcaacagtggtaaaccctaaagaataatgtcaagcagttacattgaggagtggaaccaactatgaagggccaacgatgatagacaaaaaaaaagaaaagtaaggatcaacaagtcactagtccaacgaaagaaaaggttactaaagaacttcccaagaaaaagaaacctaagtatgaaaagtcgatacaaaagagtccttacccttcaaggcttcaaaaaaaaaaatacacttgatagttgataagcagtttgccaagttcatagaagtattcaagaagttgcatattaattttccttttgttgtgacacttgagcaaatgtcaacttatctaaattttttttaaggagattctatcaatgaaaagaaatttggaggaatatgagactgtagcatttactttggaggaatatgaaaagaaaatacctccaaagctcaaagatctgggtagtttcaatgttccatgttctattggtggcttattgaaactatggtcttaggtgatttgggggctagtgcgaatctaatgcctctctctatcttctaaaaactaaaattgggagatgcttgccctactactgttcccttacagatggcagatcgttcagttaagcatccccgtggagtcattaaggatgttctagtaaaggttggtaaatttattttccccgctaattttcttattcttgatatagaggaagatgcaatattccaatcatactaggaagaccatttttagctactagcagagcactaattgatgtacaaaagggaaattaaagttgcgtgtgcaaaatgaagagataatatttaatgtctttgaagcaatagatattcataattgtcatagagttgaggtggtgaatgagtgtcaaagaatacttggtaaaaaaagaaaaaggctgaagaacgatttcgtgtggcttgacgttgaatgaaaatgttgttttgtgggaagtttgaaacattttgatgacattgaggacaattacaatattcctaagaataaaagaatattttcctcgtatgatactttagcactcaagggtgcacaaggtgaacttgacccaaattgagtttgaagaaaagtgagcttcaagctgaagaccttaattaaagtgatcttgaagcaatcttgggaggcaacccaatttcacttttatattttttttttaaaattcaattttagttttgttatgttttagaaggtttagttttatatttttttatactattttattaattatgtaagatgaatcgtgcatgttatctgtgtttccagcaaggcacacgtagctttcaggtgagcactaaaaccccaccagtgggtccaaagaagataatttgggccaagcccgagtcatacaagatctttcaggaaagaaccttagctttgtgaccagatgagcctctgccaacgacagtccgtatccagaagcaattccagtatcgtgacgctagaaggttagatagagtattcctggaagacaagttcggtttccttttttattcaagcatacagaataaggaatcatatgctcctcaaatcttgacagaagatcctattaatctaaaaagggaaactacctaaaatggagatcaagcaattaattcataattaattatccataattaaaggacataatattgacaactaaatcgtatccaacgtgcctattcagtaaatagatcccttaatgggctagaccttgttaacctaaaaaagtaatcaatcgaaagcggggtcgtatggatctaatgcttgccacatgttacacaaatagaatagaaaagtaataaatacacagatttttaatagaggtttgacccccttagttagcgggtaatgacctatctccttttagttgtattgatacctagagataatactattcagatcactataggcgggatctgatatagctctctataaggatacaaaacatgaatcagtaggcaggtctataatgaaagagtgatattgccttagatgcctgtgaaagagatgaagagaagagagggcccttgggggcgtgtagcagagagagaggaagagagactagggtttttgacttagagtgatttggaggcatagtgactttagtttctaggctagggttaaggcctttatatagggggcctaaaccctagattatattttaaatccctagatatttgtataggttattagataattacaaaagactaaagtgcccttgaatctagatattactcaaccattctattgggcttttagggcctgattcgtggcccatgacttgttgtccacgttttgggctgtacatagagtcctactaggttaatcctggccgcccaaggcctgcaggatctggcaggttaaggcctccaggatatggcaggtcaaggcttgtaggacctagttggtcattatagctccaccaagaggaggctagcctttgggtgtggaggctagccttttgcaagttaaggataactttgtacatttccttgtagagaccaggttcccttggttgaacgcaagccttcttagtctggaagtcacttcttggtcggccagcttatgcacagatcctggctggcctataggctcaccctagccagcatgtaggctcacccttggctggccagggatgtttgtacaactcattgagggcttgcttcactctatgcgattattgcttaacagttttactatatcttgcatggaggccctgttcttctactagtagggctgtactccacctgtactctatctttggcttacggggacatgccacgtcaggtggacaaaatttgggataacatttgtcccccaagtccctgttcaaatatctggtcgatagggactttctagctctcatattatttgtagtagtctctgttgagtaaccttgtctagctaagtgttgctggcatgcttttggatctttgacttctctctctatatacgtctcatcttctctccttgggtatctcttctttgtacatgccattaacaagtttcaagctttttaagcttttggaaactttttgattctcatgttagtttgtaatctctttggtatattgatcctcctgagagttttagaacgtgtaatgtgtgcttttttttttttatagaaaagattcgatttgggcctttgctatgattcttgactctttgagtcataaagaatacgaggctcatattcgagttttgaaagaaaaacacatattaggattcaaaacttaccttgaccggcctaggaggtcttgtgtgagacctggtcggccctaaagcttaatcatgggagttggctagctttagggttttaccctatgaagcaagcctgttcatgcttgggtttagtgaccctggccagtccttggctgagtcatgggaccctagccgaccctttcaagactttagaaccctagcaggaatgggccttggttccaagtgggtagccagttttctgtcctcttgtgacttcagaaagaatttggctctgtaggcatatacaaccttagcctcatacatggtttccctagaaactttgtatgaagcttaacggtgagtctgttatagtcgaatgttcaacttacgactcaacatggtttggatcctgtaaggaatttcgccatagctgtagcccggtacatggcccttattggagctctatctagttcttttctggctatatggttcttgcagggccttggcctcatgcatgtgaacagatctcatatctggcctcaaggctttcatgttcttgctttggcctatatgccctctattttcgaacactactattactcagccttaaagccatctataatagacatattattgtcctggctatcatcttatggccttgataggtaagggtccggatttacattgtcaagccaaagtatgcctgcacgacttaaaggtaggtttagtagcttattttaagccttaaaatctctctatataagttatttgtgctagtttgatgcattgtacggtatgggtgcctcccaagcgaccatgcaggcaagtctcttggtcacttgctattcaccaagtttcacagactttgcatgagttcttcattggggtgctatccatagtacgcatgtggaactaaaagagtaactttaagaagttaatcttgtgagcaagtaatttagacacaattagtctaacgagtaataaaagcatatagcttagtgtccatttttgaaatcacgtagtggctacccttacatgacttagcaaagcagaggccaccattgaagaacgatgggagatcacgccaagaaggtcgtaggtactagcgcttttatcggttcctgcacgatgaaatgttaaaggtacttaattgacaagttggctagtgagagtacttaccaagatattccctatttcagtgtttgggtagaagttccaactctaggttctcattgtactcgccagacctgtatgcacctttactgttatcttataacattgtgcggaccttctcagttcggtctgaacatgcttgctacaagatctttgctgtcaaggaatattcttcaaggagtaattctcttgtgaagtatttctttcattgatttgacgggcttggtaactctttataggcaaccatgctgctctaagttggcttggtctcttcttttttcccttttgtcaagggatcctgctagcaagatggtgtgtacgtcttggtcgttgtagactagaagtatgagagcaagctgttggtggattgggttggccaaggcaagaccatgtggccatccacattagagcatttcttggccatttgaaggaggctatggttggccaacttatggaagcagcggccagacagattgatgattttatggccaccctacctgctaaagtcatggttgcgtagccttctagaggcctggtcgatgctgctgttttatatcttttgcccttagttggccttgcccctagcgtaattgccttagagcctttgtgcacttctgtcaatagctatttagctccattcttggtaacacttcttagaggtggtgttgggataccgtgtttgtgtgttatgctgtgcacgattggacaccctacaaccatcccctaatccttgctttttggtaaggtttttgtttagaggtgtgctgctgtaggtgtatccatgttgattgtctagcatgcctattccttttgaaacaaagtacatagttctctaaagaactaggcaggtaccaagtttaccttggctgttaaggcataggtggctagttgagtgagtgtgtcggctgttgtgctttatttggggccttgccttctagtatagcctttgagctatcttaacttctctagcaggccatcatcttcttatattgagctgtatattcacctaaaacataacctacgagtagctgagagtcctggtgcatgtctaggtggttagcccatgcctcgtgtgctagcttggggccagcattcagagttcatgtttagcctcattgttagaagctttgtaactgaccttgttgcctcgtgcctcagttgcccccaggtgccttgggggccatgcttgcattggacaggtggtcaatgtgtacctcttgggttttttccctcgcttcttctttgactcttttttttttttttccgaactctgagggatttagggagatatgcttctatgattagccatgaagctagtgagagcttggcctttggtggccatgcttgattgtgaggaacttttatgttggccgagatgttccagtttttgtagaacatcctgccactgttgatcggtgtacaccttcatagggtgtatccggaagtatggccttagctttttggaagccaagagcaagctatgggtcaacttcttcatgagcgggaaccaacattaagtgtcgatcaatatcttgctggtgtcgtatacaaggtgttgtacgccatcttctcttgtgcgagcagcactcacaacatgttttgtgactgttaggtgcatgcctagctcttctttgtctagggattcgggcaacacacgtggtcaagcccaatctatttcttcaactcctggaatgtgatttcacattcctttttccactcaaatttgttgcttttgagaatgttaaagaaggggtatgcatttgtctgtagacttggacacaaatctgcttagtgcagtagtgcatcttgtttggctttgtacttccttgattgttgtgggcgacttcatgttcaaaagggcttggatcttgtttgggtttgagcttcttcatgttgtagttgcggaggacattaaaattttctatctaggctattgaaatctcatcagcccaaagaggagaacttgaaggtatctaaccaaaaatgaacctccaagtacatccctaaaagtcaacgagtggggaaaaagctttgacactgattgaagattcaatgacaacccttatgacaaacttcactttatcgctaaggaaaattgaccagtcactacccaagggtaaaatgcaaattctaattactttaggtgaaaataacaagaaaaaataaaaggattgttactcttaataaagaaatcttcaacttctataactccaaaaaccttcaaaatggaaaagaaaaagttcaatggcaagaagcaaaaaggagtcacaatccatcaaaataatgattgtttaaaagcttcttttgaaccagatgagttaacagaggaggaacaaaaaatgtttttcaatgacgatgtacctacatttcccctacaagtgttggtgtttgacagacttgaagcaagcacatccaccccacgagtgtcaacattcgaaaggcttattttcccaagtgctctacagccaacgagaactagtaatcaaaagcagtgggtgccaaaatagaaaaaatcccttaagaattactatgcttccagggtgtgaaacacaagaagatgaagaaattttttctcaggtcaactacctctcttttgagaaagtttgaccgtagaagatgaaggctcaagctcaaacccttcaaaagatttcatagacattgtccaactggcacatcaagaattcaaagatggaggacaagaaacaatggattattcaatagagatcaaccttaggaccaaggatgatccaaagcctatgtttgttagtgctttatgaactgaagaagtcctttataaaaatgaagatgtattttcttgggggtattgagacatgccagggtttgatccaaaggtttctgtgcacagattggtagtatcaaaagatgctgcccctattaaataatctcaaagaagaatttgaccagagttacttcccaaagtcaaggcagaaattgacaagttaagaaatttcttgtttgtttgggaagtcaagtatcctatttggctcacaaacctcatcattgtgatgaagaaaattggcaactttgtatatttgtggattaccacgaccttaatcaggcttgtccaaaagatgaattcccattccccatcaccgaattattgatagatgctaccactggttttgatgccttatcattcatggatgagttttctatgtacaactaaatcaagatggcacctgaagacaaagagctcactatttttcaaacaccaaaaggcgtttttgttatatagttatgccatttggcctcaagaatgtagggacaatctacaaaagagcaatggccacaatttctaaagacatgatgcacaatactattgaatgttatgtcgacatgttggtggtcaaaacaaaagaaaggacaaatcatcttgatgatttaaaacgagtctttgataggctcaggcaacacaatctcaagatgaatcctttaaaatgtgcatttggggtaacatcaggaaagctccttgggtttatcatcaaacatcaaggaattgaaatcgaccctacaaaaatcaaagtaattttggaaatacctcacccatgtaacttaagtcaactacgtggactacaaggaagacttgcatatatccgaaggttcatctcagatctgtccagtaagtagatgtcaacctttttcgagattgatgcaaaaaaatgtcccattcatttaggatgaggcatgccaaaatgcttttgaaagtattaagaagtacttattacacccaccagtgttgagagctccaatcttaggaaggccattgatattatatatcaattcacttgatcgctccttgggagcgaggttggcgcaaaacaatgagaagggaaaagaagttgatctttactacctaagtagaactttagtaggggcagaataaaactaacctccaaccgagaaagtgtgtttggctttaatttttgctgccaaaaaattacggcattatttgctctcacatcctgtgactttagtgtcaaaagttgatcccttaagatatactctatcaaagcctatgttatctagaagacttaccaaaaatggtccatgattttgtttgaattttagatcaactttcaatcgcaaaaagcaataaaggacaagtattggccaaatttttaggaatacacccaattccaaatgacatggagttacgagaagatcttccaaacaaagaagttttcatggtgcacacttcatcatggcaatcatgttttgatggggcagcaagaaatagttgggcagttgtctttgtgacacagtcaggaggcctaataccttactctttctatattcaaactatatgcaccaataatgtagcaaaatacaaagtgttagttatcagcctcaaagttgcactcgaatagaaaatacaatcattggaagtgtttggcgattctctcttattcattaaacaaatgagtggtgaatttgttatcaagcatgagaatttagtccttaccatgaaaaggctaaatatttgcttggtcaaccggattgggatcaagcctcacgtagtaagggactatatatttattcctcctaactagtttgcctacatacccagactgggtttgataattatgttaacaaaggatttgacagtgaggcattgcctgtagagccaatcatttcaccagaatcaattgtctcagcaaagctcggtgttccatcattagttgctccctcagattttcttattcctctaccatagctagtattgagaatgtcatcttcagtaatcaccagctttgacttgaatgagtatacaaaaaggtttgtgattggtagcatgatagacgttcttcatttattatcttctcctttgatggcaaaatatatttcgaaacaccgtgctaacgcgaacatgaaacttggcatattgagtgccatttgtaagaattataaatgtggctcaacagaggttgcatggtttactagctctgtcaataatttgttactataaaagaaaagtttgtcgcttctacaaaaatggttgagagtgcccttaatcttaatgaatcccgtctcatgaacattcttcgtcgtgacaaggataatttgacaactatgaattgtttgtctatatctgtcatcaacaagacaaaggattttgaagattttaagacagatgaagcagacagcagaactggccatacaacaacgacgagctaagttctaagatgataaagcatcatttgaagtagatctttctagtcttaatgattctttgaaggaccatcaacatcttgctaaggagataggtcaatcaaaggaccaagggtggtgtagaaaactccataaacctgagagagtgaaaacaatcctcaagattcaagaagaagaatttagaaaaggctcagtgctttgactttatttccccagatggactgaagatctcatcattttgtttctaaaactttttatttatttattggccttgaggaataatagtattttgtcatttagacaatttagaacattgactcctttgttaggcgaaataaatatagtcccttcttctgacgctttccatcaacaatttcattaacaaactgatgagttgagaagatattagtgagcttatcaccatacccatttcttccaccagtagttttattttccttatcattatagttactacacaaaaaatgcccaaatatcaattcatgaagataaacatgttcctcctgatgaatctccacagcaacaccatcaccattattatacacactaatacacttcatctcaacgtcgatcacaacctcttggtgaatttcctgatctgaccgatcccgaccaagatccaaccgaactcatcctagatctgtccaacacctacccagatctgaccgacctctttttctagattcgaccactgcctaaaaaaggaaagaagatgttgaagaagaaaaagcaaaagaagaagaaatgtaaaataatttaggagagagatttttttgataatctagtgcacatattattttttacattattttggggagatttatatttgataatctagtgaagaagaagatcaagaagttaccaaaataatttaggggagagatttaaaaaaatatatatttttaataattttaattattttagttattttttttatttttttttatttttggattttctttggattttattttttttaatgatatttaaatatgcataattatatggaccaatatgaacgctacacatgtatatttgtttacatgtgggataatctatgctagcacataatcactctcatagacgacacatttgatttgccaaaaaaagtagaggttgacaggttttcccataaaaatttaagattggagggttaattgtaagtgaattgagagttcgtgggtttagccacaaattattcttttaaaataatcctaaggaagtttatatcaataaaattatgtgatatatattggcattattggtagaggcttccaaattaaatagagcatgcaaaatggattttaatatcagatttatttctcttatcatgaagtgtctaactacaaaaaccttttcctttctcattaatggtattatttctagacaagttactccgcagaggggtcttcgtcaaggaaatctacttttctcatatttgttccttatctattctgaggatctctttagacttttgcaatatgaggaaagaattggaaggcttaaagacttgctatctctcgcagagccccttctatttcccatcttttcttcgcatgtgataaccttcttttttgtcaagtagatgatcgttcatatggggccatcaagcgtgctttagatatctaccatcgagcttctcgccaagagcttaactcggataattcggtcatgtcattttaaccaaatacctcaaatgctgccaaaaattctttccaacagatccttgggatcccaattagtaagtgtcatgagaaatatttgagattacctgtttactctgagagaaataaaaagcaactttttggagatataaaagaaaaaatatgaaagttaatggatgcttggaatgataaactttttctataggaggaaaagaagttgtaatgccctaatctatagggacgctacgtgtgtgattttataaactagtttaatactagtagaataattaattattaaaaatcgtgataatattgaaaaattgactaaaataaaatactaaaaacagacgttataatggcataaaaagtgtattccgggaatctttgttataaaaagttttgctaaaggaattataaaacaaccatttaaatacaaaatcaaaaaacacagcagatacaaccagcccaaaataggtcggtgaggtcaatatttacattgttggagaagactatcacctcatagttgacctagcttttctttgcctttacctgcaccacatagcacctgtgagtcacaaggactcagcaagaatagtataataataatcatatagtttattattcgaataatgtcatttatacacaatcagaatcaaaccattacgactagttcataaaatgaaatccagatcactactggcatccaccatgaataagcatcagtatacagatatctgataatacaaaattattataccaataataggaatcatattcatttaaaaatataaatcatatatatgttcctcataaagtaaccatcttcattacatcacattacctaataaggcaagcccgtgccatagcctgaaaccgtatatcgcataacagcatcacctaatcaggtgagcccgtgccaaaaacttgcactcatatatcatataattgcatcatctaattaggtgatcccgtgccacaacttggcaccaatatatcgcatcgcctaatacgacgagcccgtacctacgcctggtacttatcatatgtcactaatgcccgtatctacacgccgccaagatgaaacccttcaatggtttcattctatgccataacataacaattttcatatcactgatgccgtatctacacgtcgccaagagtaatcgccaaattagatgagcccgtacctatgcccgatacttattatatgtcactgacgcccatatctacacattcctaggagaaaaccctacaacggtttcattctatgccataacttggcaattttcatatcactgacgccgtatctacatgtcgccatgagtaatcgcctaatcacacgagcccgtacctacgtccggtgcttatcatatgtcactaatgcccgtatctacacgttgctataaggaaaccctacaacggttccattttatgccataacctggcaattttgatatcactgacgctgagttcttaacaaattacacttatttatccacctatcgggttttgacggtcgccgaacttgaaaatatttttatttcacatatagctcatattacattcacacatgctatataaatctctataatttataaattacacttatttactcatttatagagaatttaaattttatactgaaatagattagtaagatcataatcccacttattacctgattaactcataatataaatataagccctaattatttaccattaggcttatcgagatattacaaccatcccctccttatagaaattttgtcctcaaaatttatttaaacagttcgagatattacccccgtatttatgattctaactctcaaattgttgtttctatctttctatgtatttttttatagcactttcttaactagtggatctgtctcattcatagtacctcctctttttagtccaaaacttggacaagatatttttcccatatnataaatttgtctgaagtttaacatcgtcacagatcagaatatgggtcgagttggatacatattttctcagcatggagacatgaaacatattatatactctgaacaacgtaggaattaaggctagataataggctacctagcctatttaatccagtgaacatgtatctaatatttctctcgtaccacagttattaaggtacctaaccagtggtacatttaattatcacttttaaataaacaactcataagggaagagattattctaagataatctacctttatcaaatatgctcacatcatgtttctaatattctattgatcttcttaggttacccacctttcaagaataaaacatcatacaattcttgctttaatctccatggttctcaatagtcttctttaattcttagcattatagccaacgatatcaaccttggaatttaacaagattagactattccttcgtatgaattccatatccttatttattgtataaattgtctatattgatagacaacatattaactcggtatgtccaatcgttactattcagccgaaatcataagatcccacaatacatagttcataattatgtgttttcattccttatatgggacctcctaagctgacctactgacttagcttaataataagttaagtattcatttttgatagatattcaattagagcatttcttatttccacctgtttgaatattagttgtaaggaaattagggtaacttgtattttagtagtttcctattttatgattagtagtttcccgtttagtctcctatctttgtatataaataggtactattctatggaatacatacacaattcgattcactactttctacatagtatcagagccattgtgatcgcaatttgggttcataaaaaaagattagggttcttttttgaaaatcttaattggagtgcgaattgattctcact

SEQ ID NO: 17032 - DNA, 3467 bp, Cannabis sativa
  modified_base (1911)..(1921): a, c, t, g, unknown or other
gagtcttcttcctagtgccacaagcaaaggtggcagccaccatggtactcatcaacgaggagcagcaactccgattcgttaaagtttctcaatatgtcaaacccaaggaagtaagagcttccaacatcgtttggatattcagtgtctaggatccgagttcagcttatcatacagagctctcaacattttgtttcactatcttcttagcttgttaggttccaaacaagagttatctagttgtgagtgaactattatgggagaattacatggccaatttggtctttgattgaggaaggtggaattttttgcaagttttttgagtcgtcaacctataattgccatatctcaacagtggacgttgctaaactggttttttgatagaggtcgattggtgtttgatcttaacagtagccatggacttcactcatttggccttgttctttcactcggtacctttcaatggagactattccaccaatcaatcaccttgaggataaggtgaatttcgggcagccggtaatgttaggccttaggattagtatggtgagctagaatatactaaataaaagggtatttgagtcattgttttaagggtggatttgcaagtgagaaagtttatatgcaagtgagaaagttttatatataaggggacaattggtggtatgcaatgtactgagtgttcactctttgcatcaacaggcctaagggctctaatagcttgtaattgatttttctcctactatatcaatataatttcttcttgtttggctactattttattgtgttcttgagtttgaaattatcgagtcatatcatgagcataaaaagtgttagccttattacccaatcaacaatgagcaccttcctagcccctgctttttgagctgctactgccgcaactgctgcattattatgaagacaaaatcccatggcctgcctaacaccagcatgatgaccaggaggtcgaacctgacatccattaacgattagtaatctaaaggcccaatatcgaatgaaatgattaattaaattactccaataaaaaaatagggaagtaagctctcgtaccagggcaaacccatttttgacgcggccagtaacgatgcctgaagctagatcagcacataaaccagctgcaagtctagcagcacatgctgaatgctcattagcatatgtatcagaagtaaaataactggagaaaaaaaaaacccaattaataaaagcctcacctatcttaacaatcattaagtataattaaatgaaatattaagagaattctgattgaataccaaacttattgggaaactgatggcatgtaaatcaagagggatggaaaggaacaaccaccacctatgacatgcttaacggtgtgtttggaaagccaccatgtaattaaaactgagcgtaatttagaataattagaagttttagcatgttcgtccaactagctaattacatagtaagcatgtaattggaggtaactgagggctctcaattacactctaattctcatgtcccccatgagaattggatgtaattataaaatattactattttgagataatttatattattaaattgtgtaattactaactcatttgtcaaatatggaaagaagaatccatatgtaattactattagacattcaaacacgcattatactttaaaatagagtgggattactatgtgtaattacaaccttagtaattacactacctaataattaaacagtcgcttccaaacacacactaagatgacgtttggttcaaaggaataaaaacataggaataagagtaaaaatgagaataggaataggaatgtaatcaaatttaaaatgtataaaaaaaaattgataaaaaaattattaaattttttctcatcttatattagaatggtctttccttccatttnnnnnnnnnnnagtcattccaccaaaatgatgaaaaggtcatttggaatgacattccaatgctttaaaatacaaccaaaaaaagaatgaaataataattgcttcctttccatttcattacttccaaccaaatgccacctaagagtaatagaaggttaaaatacaaagataccaactcacaaactgatggagagaaaatcaccaattatcatccatacctagcaaaaagtttgcttgtgtgatcaacatctttgatatgctccaaggaatggacctttaatttcaacagtaaatgcagaattaccatgagaaggctgcaaagagatgtccaagctaaaacccaactgggttcagaaactttataatatagcaacataagaaggtgtctcattatcaaccaaaagatcataatgaaaaggatcattgcattatatatacatatatatcagcaagctatacaaacactatcaaacatagtggcacactttctccctaagacagattccacacaaaatatttcatgataatctgacaacattcattgccaagtaacaattattactctcaccatctgaagttcttctttggtaatttctctagcagtaattgggtagcatcttccaggaaatatacctgcaaagcattataattttcttgatttaataatgtcattgaaaagttgaaaggtatgaaaatatttctaagatgaagatatttgaaatgcactaaccagctatagcaaggctggcggcaatagctcgaaggcgatcgggtctttctgggtgcggatgtgatttcatttcaacctattctagcataaattatatgtgcataacaattatcagaaacaagtattacataagaaatcagcagattcaatggcttgctccgccatgatcagaaaagagacatattctagcataaattataagtgcataacaattattttttttgaaaaaagagaatgaggccattgtcatagacaagccccaaacccgatatggataaaaccctcacttgtggcggaggaaaaccgtggttacataaaaaagaatcaattacatgtaaccatacagaaactaaatctctcggaagagagatgcccatgaggcaatcgcatacaaatttacaccacagcttaaaacagagctctccattctctaattaagtctaaaaatgaaacattttcaaaaagctttgtcttgtacacccaagaggcagtccaaaatttagttttttcccatagagcttctactgagctttccgatccttcaaagatcacttgcaatattaactagaatttcagctcaattgccttgaagttcaaattttaaagttcacttgggcaaataaataatatatctcgaaaatggaaaccattacaaaccactccaccattttcatgtcactcatactcatagatagcctcaatatcattttcaactagagcttcaacattcccatcattaatgtaccattcataagctcaatcgattaaatctttttccatatccaagtttctttgacaacaaacaatttccaagcagtaccacaccag

SEQ ID NO: 17033 - DNA, 3715 bp, Cannabis sativa
tttctctattttcgtcagtacaggctccgttttaaatttattgaaaaaaatttggaagtaactgatactacatatttttcgtcgagactaaataatctaaaattttggtcttatatgtgttctgtttaagataataatagagtctcttatgataaaactggaaaagaattacagttttataaattggatacttatgtcttaaaaaaaaaatcatttaatttatgccgcttacattaggtagttatgacactatttatcctttacaaaattctcctattcgtaaaaaaaaattacaaaataaagaagttacccacaacctcatgcatgttactgtgttacccacaaattcacaataacacaagcaaatgagccccacaaccagttcactctcttactaaaaaagccttaatccatcgaagcaaagtaagaaaatgccttaaaccaacataacagacaaaagtgcattactttactttcatcagttcccatttgactatttggatttctcactttgctttctctcttttctcatctccatttttttgaatccaccatggaaatcaaatgccctttccgcttcctctctctcatctttctcttcgccggttacttctccactctcggcgattccgcatattccatcggcatcaactatggaaccgtcgcaaacaaccttccgccgccttcccaagtcgctaagttcatcaagactcaaacaaccatcgaccgggtcaagatcttcgatgccaacccggatatactccgagcttttgcaaataccggcatcgccatcactgtaactgtcggaaacggcgacgttccggccctcgctaagctttccgatgctcagtcatgggttgcaaacaacattttaccgttccaccctaagacggtaattaatcgaatcgccgtcggtaatgaaatccttgccacatcggataaggacctcatcgcccatctattaccggccatgaaatctcttcactctgctctaaaactagctaacgttaccagtgttcaagtctcgactcctcactcgctgggcatactcgccgtaaactcggacccaccgagttcggctcaatttcgaagcggttacgacaaggtagtttttgctccgatgcttgagtaccacagagaaaccaaatccccgtttatgataaatccgtacccgttttttgggtacgcagactcggttagtaattacgctctctttaagccaaacggcggcgttttcgacaaggtgacgggaattaactacaccaacatgttcgatgcccagatggacgcagttttcacggccatgaagaagttgggattcgaagacgtggatatcgtcgttgccgaaacgggttggccctcagcgggtgacccgaaccagccaggtgtgagcctagaaaacgccttgtcgtataacggaaaccttgtgaagcacgtgagttctggtaagggaacgcccttaatgccaaacaggactttcgagacctacattttctctctattcaatgagaatctcaaacccactatctcggagcagaattatgggttgttcaagccggatctaacccctgtctacgatgtgggcattttacgaaatgatcaggtatttttttctattttaactacatttgttcaccgattataaattgacacgtgctcgtgtttatatatgctttcatgttcattaccttagacaatcataacctttctaaagagctctgacacttgccagcataactctagtggaagacagagagaacaccatgcaagttgttgaattacgaaaatgtcctgtactaattgttttgtcactctaccttttagggttattttagtcctggaaagtttacttttgagactccttaggcaacattttaaacgaagattcctttaacttgcggcgggggcaacggtcatatatataattcactaccaattaaatttttcaaaaaagataattaaaaaactattctttttctcatcataatattcttatttgttccaggcattgggtccatcttcttctgtggcgcaagccccatcttccgtcggtgaagccccatccgccgttggcgaagccccgtcggccccacccgccttcggccaatctccaacggccccatcagtcgttggtcaaggcccatcatctaacgttgatcaagaaaagaggtggtgcgtgcctaaatcgaacgtgtctgatgaggaattacagaagaacatagactacgtgtgtagcgtcaaagtggactgcaagcccatacaatctggtgggccgtgcttcgagcccaacacaatcagatcacatgcgtcatatgcaatgaacgcttactatctgaaatttggacctcaggattccaattgtgacttcaaccacactggagtagttacctcaaccgaccctagtaagttccagcgttattttccttgttacttttactgttttacatttattattttgtttttttctcttttaagaaaaagagtaggttaaaaaaataataataattaagtttgagttcacacacctattcttttgtttattaaagaaataaacatgtgacgttactttgtttttttttacttgtggtaggttataagacttgcacgtatccatttcatagtgtggattcaaagttggaaaagtcggccgcagaaggtggccctgccaaattgtggaccctcgttcagatatttattggagctgcttgttatacaatatctagattctagacacctcacttaataatttgtaattttattgtttatttattatctatttattttgttgggctatttttcttgtaaagtatgatggggacacgtggcaaatttttgagtgttagagctggggctgctcgattgcattggctcgtattttataggtatctaataatattacagacatattatgaactcttttgctttgtaggattaattgaatttgacggtataatcagtgttatggttaggcataatggaagtccggatacattggtcaaaaattatttatctcaaccaataggtgggataaataatttcatagaggtggtatttttttttttttttttaattttgtaaatatattctaagtttaaaaagattttatcaatttactaatagattttttttatcaaaaatttatttattaaaactaggcaatatagtcactcttcgcgcggctaatttaattttttttagtattataataattagttacttaaaaatataattctaatatatagtaaaattgtaaatatattatcttatttcatattatttattaataattgtattctaatttattatatgtagtatttattaataatttattagaaattatttagaattatttttagttattattgtatctcacttgttgtctcattgtactgacttatttttatcaccttatctcacctgttgtcatcactgtatctcatcccttgtcattaccgtagttcacttgtagtcgtcactattgtatttcccaaatttatatcgtaatcttagatttcatctcgatttttaaatatttttttaatatttttaagacaatagagaaaattcattaatttcttctgttattattagttaatacgttttaaaaaagtaattattttttttaaatatcttaattaaaaaaaaatatatataaaaaatgtgatattttagttatgagaaatgctaaaaggaaatccttcttggtatcactatt

SEQ ID NO: 17034 - DNA, 8173 bp, Cannabis sativa
  modified_base (38)..(50): a, c, t, g, unknown or other
aattcatattaggatgttaattaaacatacttgttagnnnnnnnnnnnnntggtaaaatatttccaacaccaccccagggtgagtcctgattatcttctgaggtctagtgcacagagaagcagaaccttcaaattttctctttttgaacggcgtagttctctcatttgttttcgaagtgggtaaaacgccaatatcactccccaacttcttaatctcatacaaatccaattttccaaaatgttttaaatcataaagcaacttttcttgggcattaaaaaattgagacaaagctttttcttctccaatagaagtctcagtttcaggctcacccactggacccatatgtatctcttcattatccatcagccctccctgtccgttagaggagtgggttttcgctagttcaccactaacgggtagcaaataattagtctaagcgttggcctacttcatcaataagactctcaataccattatttaacttattctcatgtcccaccccacttaaagaacgggccacaggcccacacgaagcctcgacaaccttcggcccttcagagatcacaacccgaggagatgggttagcttggcccaccaacagaggcccaccataattgccattattcgatttcctagaaagcttttttcccattcgtttatacagcccatgcccctgtacaaaagacaaattctcctttacactaaaaggtggcacgatactcaagggaacagcctccttactagtaaatgaaatacccaacgggtttctcacattttttcccagagtcaaaggctctatcctaggagaagaatcaggagatctttctcctaatttcaaatttattttagtcttatttccaaaaccagaaaaacctcgtacactctccactagcactgtcttggggacccattttttttgcaacacaggacctctcccagagaaacctcgaccggtcgtagtcaccccgcatctcgagcctaacaatgaactggacatctcttgaactcttgctccaccagaacggggttttgacgacggcccagcacagtcgatagccaccatcggagacaccgaaccaacacccgccgaagtcttcatcaccgcacttgagaaaacatcatggtacctcgacgcggtagacaaccacggaccatacatggagaaagggatgccatcaaggttagccacggtgaccggagatgacagagcacatcccctcctttggtggcccaggcgaccacagtaatagtagaaataccaatcttctcaaatttaaattgaagccaccttttgaccccagaggccaaatcgaaaaaacaacctaaaaccagagggttattaatattgaactcgacttgaaccctgagaaataggttccaagaaaccggtttaacctcttctaactccaccatgcaaacttttccaatgatagcgccaagaagatttccattagccacagagaaatatttgtgaggtagattatgaatctgcacccagagtcttaaacaatccaccagaactggtccttcaacactaggaatccacttcgaagagcgaaagtgtaacctttaaatgaccaaggcccctggtccaaagcccaatctctgtccacttcactctcaaaaccaagcttaaaacagttgaacatagttgaatcatcagcaagagataaaacagacaccttctgccaactcttggtcacaaactcaattatggcatcagcatcaacaaccatgggtgccaccagttttccatacacacaaagagaagaaagtgccttgtgagaagatgcacaaggggagagggaaacagaagcttcaacacaagtgaaacttttgcctttattagggggacaaagagtattaactaactccattaatgagagaccacaaaggacaagggaaagaaaacacccagaataaactctaccaacccaccaccaactaaaatcccacgaccccacaaacacgacacaccagggaggataaaacaaaaaaagaaaaaacaccccacccacactaaacaaaacaacaaacagtaaagtcaataaacagccaggaaagccaaaagagggaaggaccaaaacaagactaggagaaggaaaagagagaaaaaaaaacgagaaaagtctaaccacaccaaagaaaataaatgacataacctactagaacaaacaggaaactcaaaaggaggttagaaggaatcgccaggaaagaggatggtataagaccaatctcttagtagagaggatagtttaagaccattctctaagaagagaggatagtttaagaccattttcactttatccaacgggttttctcgcataaagtatttcttttcatatcttatatttaaagtcacaagattgtattctttaaaaatatatatatattttttataaaataatttgatagaattttaaaatatattgtatgaaattagatggtactttatggttacattaaaaaaggaaaagaaaaatacaacaactgtactaattttgctactaaacttgataataattttttaagtttattataacttttttttgtttcttaattatgtttaaaattaaaataatatttttctttaaatgaaataagtaattaaatatattaaaaataaaatattattaatttttttttcatttgaaaaaataattaattaatatcttattttcatcaaaagcaactaaaagattacttttctaaaactcagaaaaacgaatttttctgaacaaaatgcaaaattcattaagaaaaaactgtttgttacagaagaagttaaaaatcaaagacaagcacctgtctaaacacaatctcctaaactagtaacagaggttgccagtgcatgggcaacaccattcgtagatcgcggaatggcattacaagaaccaccaccaacaacaactaataaagaatagatatctaataaaatagactgaaaactaaaattaaaattaatgtaaagtttagtttattttattaatccaaccaattgccacattggaatcactattaataataaagatattgaaaccaaattgatgcgcaagaaccaaacccagacgaatggcaagcaactacgccacattaacagagaaatcacctaacacacctgatgaccacgccaaccaaaccacaccctctgcatcccatatcactcccctcaatccaacaaagcatctccccaaaatcactgaagcatctgtcgctagagcaaaggattcaggagcaggcatccatcacgtagctcggtttacaactgggttcgcaaggcctaagcccgaatgaaggcctcgccaatcatactcctaaaactctgccagatggttattggctatgtctggaataatatccgatcttgactgcttgttgccaaataatactaattttctatcttaccacaaccaccaaagggttgtcatcatcaattcaaaagcctcacaggatagtctgtcaaagagtgataggagaatttcctgcattagcccatatgcacaacaacggagcaccaaccacaccctcaaccgatgccacactggaatcaaaccagaacaaaaaaataaagcatgctcagcaatttcagcttcttctccacacttagaacaacaaagaggtacttgaactttccaggagataagttatgtggctactagtaaagccaaatggaacatacgccaaacaaatattttcacctttggtggcaggttgagattccatactccattccaccgagttaacttagatgaatctgcaactccctcctcaacctggagcgaccaagccaatgagtagccactcttgacattataaaccccatctctatcagtgtcaacaccaaccatcttctgtctcacaccttgctaatgaaatagacagaattatgttcacatctattgacaaaaaaacctgttgaagcttccccaaatcccaagttccaaatggaaaaataaattcactcacccgacagtcatcattaatctacaaattggctgaaaagacctcgaacgcgagagccatgggtccttgaaagtcctaacttgtgttccatctccaataaatctctgaagcccgcacttaagcaatttcagtcccgagatcaaactcgaccaaagatgaaatgaaccaaccttttccatagcctcaaggatagagcaatttgagaaataattatatttcaaaattcaagcaaacaatgaatctggatataaaaataacctccaaacttgcttggccaaaagagcttgattaaaaaattgaaaatcttgaaaatcaagcccacccatcgtctaaggctgacatattgcttcccatttcacccaaagaatcttcctttgatctccagacgaaccccaccaaaattgtcttacaatagactccaattttttacaagttttcgccgtagacttaaagacactcatcaatcatataaattaaaatagcttaaagaatagatttaataagtacttccctcccacaagttagttttattagaattactttgaatttagtatttttgctgatgtggaaatcggtatatttgtaaataaaattagcaaaggtaattttgtaaattaaattaattttacggatagaattaaaaaaaaaaaaacccaatgaaattccaaataaaaattttaaaaaatacaatgcagagcatccattacggaattgctgtttattttgaaattctaaatagcacaaatactatgcaggaacaatgtaagcaagcaatagtcggcaaagaggttcggaaaactgccctttattcatgtcaaagtcaacacaataccctcctctgtaaactggccaccaagcaaacattaaggcttatcatactcgttgatgaagcaagaaatagaaattatgtcgatatgcttattcactgtcgatcaaaagcctgtaaaaagcaaaaacataatgagaatataacaatccttgctgcattagagaactacatattaaaaatacacaccttttatatttatatatatatatatatatacacacaatatttatatatttgtgcgaatacccaataaagcgagtacggtgttttataaacaatatcagacttaaagataaaaaaaggaagaacagtttgagcctctccaataaataaatggtgtagggtcattgtatcaacatagccacagcacaaaaacagccaaaaagcttcagatgaatgaatatatacaaggggatgtaagcgtcaccatataagctcttctcagaacatagaacctcttttagtctgcattctataagtcagataagagcagcttaacatagacttgttgattaatatcccaaaagttagcctacttgtcatccaaatgataagccccatcctaaactacgattttccggaaccataaaactcatagttttcattcggtacacaaactatgagagagcaaaccacaggtcactcctgaaatgtaccagaagaaataactgttcatactatatgcttctcccacattaccagcttctaaatatatttttttttttgaaaaagagaagagatcaacttatccaggatcctccccgttatttattagaaagcctcgcttatggcaaaggaaaaccatggttacaccagcttctaaatatatttggtcctaacatctcctaccctaaacaaatgatctgcctcctttcaacagccttgcaaacgatccagggaatcaaaaagaggaaaacacaaaactcatattggcatacttgtacctaaacagcaacaatttttttttttttttttgaaaaggaggaggagaccacttaacaggtctcctctgcaaagattaaagcctcacttgtggcggaagaaaaccgtggtatacaggatgtaaaacagaaacagtgtaatacaactatgagtgacccatcaaaacagaaggatcccagaattttacaacataacactccattctctgcttaggtctagaaaagcaaaaacctcaaaatgtttagttttaaagacccaagtggctgtccaaaatttaattctctcccaaacaaggtctgctgatttctccaccccttcgaaagttctgctatttctctcgttccacacagcccatagtaatgctaaagttgccgtccgccaaagcttaactctccttttgcttcccattggtttacttagtatgacttgtgacaccaaacgaggtagtacccagtgcagactaagttctttgaatagtaatgaccaaattttttatatcaatctatccatccgggatggtatttcctcacacatcatatgttcattccagcatgtattcatacaagaagaaaaagcaaggttcatggaccaaaagggcaactataacaatgatatgcgacctacaattacacataaactttaaccagcaacataaacagtccaaccttttttttttcattttcataaaatagggattagaacccattccacacgcccaatcacttgagacagcctcacacttaaatccagtacatgtaaatcttaaaattagtttgaaagaagtcagtccaattctaatgcaaaggaaacacaaacatgcttggtggtcacaaaaggagatgattttaagctcgtatatttaaagacaaatcttgcaatttttgagaactatttataaagatcaactcatttattttatttgtgagcataccaggttagataaaaccgaaagctatagagccattaagtacaaattgaacaaggtatttttaaagagcttgtagtgttcaagtacaaatgaaattgtcaaagctcccaaagttttgagaaggtgtcataagatgtatcaaaaaatactaagtcactaagtttactgacccaaatgataaccacttgacatgtaactcaaaaagcgtttagtatgaggtttagactttatgggaatgtcaaacttaaataattttttttgaaagcaaactttgtgtttctatgtgggtctcactttttaaattaaaatggtcataatgttaatcccctccaacacttggtttcatattctctctaagtctactccttccaactttattctatacaactcaaactcacataacaaacaccctattaggtggcataacaaacaccctattaggtggcatttggttggaagaaatgaaaacatagctagaatagtaatgacatttcaatacttcaaaatgaagccaaatagaggaatagaataaaagttgtttccattctattccatttgattacctccaaccaaacgtcacctaagtttattaagattagctaaagtggtcatatagagggtattggggtattggagtgtgtgtgtgtgttgtgggtccgacctatgtaactcaaaatgtaatttaaagactgtttctaccacaaaaagaaaatactgaccgaaatgattagtttttcaaaaaatctactattttgtccttgaaaaaattgctcctcttccacatcacaaacatataagaagaatacaattggattgccctattaacagatttctcaaatctcgatttggaataattcccaacatatatacgaaattatatattaacccgtattcactagaaccaaaccaaattaatttatagcagatggtatgaaacagaagttcttcttcttgtcaaattaatagtccacatggtataacggatggtgtgaaagaggaatagtactatactgttattccagaaagtattccagcagggaaatcactcaaattcataaagataaattttaagttttctatgtagatttacatgcaaactagggcaaagaaaatccagtaaaccagaccagcatagcaacaaacattcacatcaattacttttcaatattgaaaacttaaatctagccatcccaatcagaagtattttatatgaatttaatgttgaggagtttaccaacccaaaattaaggctcatttctggtagcctccaccgcgagcattttcatcttcctgaacatgagcggtcaaataaaccctagggaagtcggaatcatcgaagctcttctccttcgttaacttctcgacatccgccttcttgaggacagtgcgtctgatcgggggacggtttcggcgctggtctctggaatagtacttaatgtcaaagacggtctcaggatcggaggtgggcacacaggcctggagcttagtcgtcgccggacactccagccgg

SEQ ID NO: 17035 - DNA, 3304 bp, Cannabis sativa
aggcgttccaaagccttcttatcttcctggagggctgcaatctaatagtattaacatgaaaacaatactgattagtaagttgtttcattctgagccataattgtcaaaataaaacttattttccctttcgtgcagtacctcactcttgtacattttgatttcagcctcaagtggagcaataacagaagccagaggaagagagtcatcgtccttttgatttgtatggacccttctaagagctgcttcagcagcaaactgtgcggccagcgcatcttttttgtcatttgttagtctcttgatttcaagattctgggaaatattgttttttacatgacaaactcctctattagatcatatttgaatttgaagtatacacgcatgtttgaatatatctcatggaaagaccataactcaccttgtgatcgagaagattttcagtgactgaaactttctcatccattttctgaacctcgtttttgagctggaaaagaaatgacaacacagaaaaagaaagaaaaaacataacttcagacacaatttaagtgttaaaatactgaatttattgtttgtgaaactcaagttaatattgaaaaaagttactttggtacctcttctactgccttatccttaagagcttcagttgctctcagcgacttgatttcaccttgagcaacccccaactctctttccttttctgcaaaatgagatggaagcaaaatatagtatcactataaatgtctctcgttttacttacaactctgtatgaacacatatagagatgaaactaaatactcataattaacttattaaaacagtcaaatacatgtatagatagtattctcattataaactactgatatagaaagataattatgtacatatattatcagagcataacaaagtattcataatcaacttaatttactcaagcagagtacttgaaaaaagtttttcattagaaaaggaatatacttaagtgagtacggagtcattctctttcggtgtttgaggtcataagtacagtgaaatacatgtttgcaactgcatagtgttctcacaataaattatatagatataaatatatatatatatatataaatatatttcaaatgttaagtagtgagagaactaaaactaaggagattattcgaaactacccaatcacaacaggaaaaaacatgttatcaccagtaatatgaaaggaaattttgtttactaaaccaaaccaaaaaaaaaaaagacatcaaataatactaaagcttttaaaaaatattcatgatattaaccaaaaaaatgtaaacatcataatcctaaaatatagatacaagtaaggagacagagagtcagagtcagaacctttgagaagatttttcaaacgattgagttctaagacaacagggtccgagtgaaaggactcctctgaactgtagtgttcttcatgacccaccatggttatggtcttttggttttttttggtaatgaaatgaaacgcttagaccaattaatagaggaaggactgggaaaatggctgagtattagtgggtaatgaatggtttaatgattctgaatgaatggaatatggtgggttttaatgggtaattgtgtgtgaggtttaaggaaatgattataggaatttccttgctgtgaagcaaattttaagaattgccggcattatcgcaacttgattgtaacggtttctttattttctctatattaacatttatattctttatttaattcagaacttaattattagaaatctcttccgttatttctttccttaagttctaaatccacgtatgtaattgcatatctagataactataccaaataaatatgttctctcacctaattaattaatattcatatatttttttactctcaaattatcaaggttggacaggtacattgtcaagagtgttaaaaaagtgtattagttggtgccatttgttgcaaccttattatgtgatagataagagccacgaaaagtttgccaaaacaaaaattaagaaaattaattaattggggagttttgtcgtgacttgatgacaaaatgctgatctgtgcccttttttatattatatggtttatttaaaattttattttactgagattagcttagatagatagagataagagatataagtccgtaacaaatgattaaaacgacagactatattgtcaaaatctggctacgttgatggaaagctcctaaatatatattttagagtaaaccttgttgcttaagcgctaaattctccctaatacttgcattttttgtgctcttattagtggaagtcactcaaatgaattcttgaatttaaacttaaagataatgaggtattggtgattctgaccatgaaaatgaccaactaaagtggcttgaaagaatcaaattaaattaacaataatacattttaaagaaagagagagatagagagtttctcaactttgatgatctttgcttataagaataatttttttaaataaaaaaaaaaggagaaaattatttgaaactccagctatgttttattcacacttttccatatgtctaaagacaaagggtttaaagatcatacttagaattttgtttaagcgacaaagggaaagactccactaccacttaggcctaccaacaacacccaatattcccttttaatattagagaaaaggccgtgaccaaaatccttgtgtcactactggccaaaacagtcaaataaggatttgattagaaatctacaaggtttatttagagtttccattctaataatttcttaattgaattatttacaacttttcttcctttcgaaagtgatttcaaagtggaatcaagctaagcccttctccttgtacatgtaataaatatgtttatatattattatattgtatatattacattatataattgcgtgtcccagctagttttgagtaggtgaatatatactgtatcaataatattcgtaatagtaccatacttatattttaagctgataaatttagtgtttttgttcatttttctatgaagatgatgatgtcaaaggtttaagatagtgtagagacttctaatggctttgttgacataataaactcaatggaatggttgagatgtagaaccatggatcaattagatagtttcaagtaagtatgggttaaataatatataattaaataaaggataaataattattgatttggaccttattagcctggctattattagctaatgctttttcaattggtggagtccaaacaattgaatcattcatcgatgttctatttccagactcataaccttagtttggat

SEQ ID NO: 17036 - DNA, 8671 bp, Cannabis sativa
  modified_base (142)..(143): a, c, t, g, unknown or other
atcagggcttatttgtatagtcgctaggcgacaaacttttgtatatgcatagtgaaatttttgtaaatacttctgtaaacgggatcccggatttatatatgtatgttattttatatttttaattaattaagtaaaattttanntaatcacgattttcaataaactcgctgattagcaacgagctgcacagtcggttaaaaatcacgttaacatgcctaaaatagttagggtgttacacaatgtgtcaaccattgacagatcaaaggtggaggaagccaagtttggtgaaattgaattgtatgttgggcttgttattggtgtgaaaaaaataggtgcaagggcagttagtcatgactctaaaatactttattggaatccattgttgctgaagttatggcaatcttttctagtgctgtgttgtgatctcatctttagtactctacgatggaaattgaatcaaattgtgttaatgtagtttgtgccatctcaaatcatcacttggatcattcttactttggatggatcaaattgtctggtacagaagatagatcaaccatatcggtaacgttgttggcaaaagatcacttggctacattatggaccgcaaaattacataatctaagaataaaggaaaaattacaacataacaatttagtagagaggtttttacaatgtcgcacaaagttgtcaatcccccaactgaagcaagttcccttcagagtcttgatcattatctcagaatcgctctctaccagaacaaacagatgcttcagagagactgccgtcttcatagctagtagacaagccgcggtttcttcaatgaaaggatcaaagaaattgagcttggttttcaattggataatgacaatctgtctatgcaatccggttattcataatcaattaaattgtaattatatataatttttttaaagtattgctatgaactattcactatttaaagatcttttaccatctttattaagcattttctcattatttttactatgaacttgtgaagattgttggaacgtgatatcacgcgcgagtaagaaaacaaattaaaaagaatagaaaaaaaattaataacaaaaaaggtaaaacataacgcagagttattctggttcttggcgaagagaccgttctggattttggttcaaagatgaggaaggaagacacagtgaagctgatcagcgccgagggtttcgaatttattattcacaaagaagccgccatggtttctcagaccattcgaaatatgctcacctctcctggtaattttgcctttactttttgttatagtaacgaattgttttccggaattacctgagcagaagacgaatatgggggcatagggtttcatagtgggtttggtttcagtcttacttggctttaattttgtaggtagtttcgccgaaacgcaacatggggaggtaacattccctgagatcagcaccaccattcttgagaagatctgcaaatatttctattggaatcttcaattcgccaggtttttattctatatcatcatcgattgtttttcttaattactgttaacttttatgacattatttctgaagatttatatttctatttggttctttaatatgaaccgtcaaggttcagctgagtaaagttcgtacaatggggattcatatacttgttttctataatgaatcacctatataggttattggttatgctaaattttagatgcgtttccctgcaaattcatttctgtatatatactctgatttttttcagttgggcacttttactttacacatagatttttgctttgagctcaacctcatccttaagtatgttagttgtttgaaatatcgcttgcgaaggttctatgcttagatttgaagtatgatgtaatgatagtgattagttgtttagcaatgatcaaaaaaaaaataaaatgatcagacaggacatatatcaatattacttttaaatgctcgatataaataggaaagcatttcagtgtttggttttttatgttccaaatgctgtttttgctaacttttgttggtaggaaccgacttttatgtgggtttttcattgtatacaatcctcccctcaagaatagggttgaaagattatagctttctttatctgtggaaatatagaaccatggtcatcaccatttggttttaaaaaatttaaaatgaaaccccattattattaacaccaagttactcgtacatttttgatcaaaaataaaagtttctcatacatcaacttgtagagaggccactcactggtcttttagaaactttaggataatagaaacattaacgtttttttttttcttcccttgtccccctctttatgttagggggtagatattatagttgaggactttattagtttatttcattatctgatcttcttttctccaatctaacttgatggatatgtttctcttctgtcagcgggaaagagaccgagttccacattgaacctgaattgactctagagttgatgatggcagctaattatctccacacttagtatattgtctcattcttgcctcttgaagcacttgcctttctgtcattgtaagttaacttcaatattccttgccaactaattcttatctcgtgttaacatgtttcttaattttcactatccaccgctaccaggtttattcgaggagaagattgtggctggagaaggctggatttcataggaattgtatattgttaataagtactggaatttactcctagatttcaatttagtatagtacaaggatacatttgattggaactcttggaacagtgtatgactgcaaactgatgtggtcatgtcctttacaattaataagaccatgtataattgttgcataatcaaatatttgcagaaatgttttgtactggatgcagaaatttactaatgtaattgtgtaaaatgattaagttacaggatatttggaataccaaactgaagctcacatatgcaaactgattaaacggaaaacctgaagcattggtagaaatcgagaatagtgtatagagtaaatagtgtggtgatatagaattgagtttgcacctaaattgaaacccaaacctggcaagccacagtgaactttttttctttttttgataagtaaccacagcgaacttgtaactcaattctatatcttttactaaattgaaaccgggttttagattttacataaaaccccaaggtgtaactcagtcagttctcagactaaaatgttgttatttgccaggttttcattctaatatccaacacattgtattagctgtattaatactgtattgatatatcaatgaggttttccatttattaagaagtatatattaattttatttaaatttttgtaaaacacacacgcacagcaaattctgtgatttaatggttatagatggaagagttttttttccccttagtgttcattgccatacttatcttataccatatatagattgtttccaaattatgtatgattatgaaccataataatagaattgattcatagtccaagataatatagcattagttttcaaattatattatttaagtttgtatttgtttctttctaaaatgaggcctataaggaagagtattagatttggtctaaaaacctttggttgacaattacaaacagtagcttaggaaatcgaaaacagagacattagaaaggaaaatttgagaacgataatttttttttttggttgacacattaattaacttcaaaaaaaaaaataataataataataataaataataacaccatatgggaaaaccaaaagcattattatttttattatttttttccttttttcaacatgaaaaagataacagaagggaagggattaaacaactaaaaacacaaatgagaaagcaaatgggaagaaaataaatgtagtaaatagaaagggaagtcaatattgtgtagaaatagcaagatagtgattttgtttcagagttatgccattgtatttgccacattaactaccctggtatttgtgcataatagcaaattaagctaccatatttgttgtcattgacaaatttccacttaatttataaaattaagcgagttaatgctaatctatacttgattatatgctatatacattaataggtaagaattttctaatagtttgtcaagctaaaatctgccatatcctagaagtttatatcttatatatatgatgaccatatagtgttcttactatataaatacatatgtatgtttcagtgtttgtataacacataccattcttctctttcacaacacaagtttattatttctaaaacatggggaataagtatggagattctctgtacttttacaatttcttcacaatttttattctcactctaagcttttcgtgcaaagccagtgatgaagacagaaaggctagtgaatttttctctgtttgtaaaacttctagtactgttaaaatttagtgggacatactatttccattttctatagaactcttttaaaaatgaagttaatattattttacaggtatatattgtgtacatgggggcacttcaagataagttatcctcacaaacatctcttcattatagtatactgcaaagtgttcttgagggaaggtatgtaaacacacacacacatataatctttgttacacttctcttattgatcagttaattggtctgtgtttgtatccatgtgttgcagttctgtttcggattctttagtgcgaagttacaacagaagtttcagtggattcgcagcaaaacttactgagaaagaaaggcttaagcttgctggtaactacttttgaaccttactgaaaaaagaaattattaagtactcacactatgatttgcaggtatggatggcattgtgtctatcttccccaataagttatacaaaactcaaacaacaagatcatgggattttatgagacttagtgagacaataaagagaaatcccactgtggagagtgacactataattggtgttattgacactggaatttggcctgaatccgagagctttagtgatgaaggttttggccctcctcctaagaaatggaagggtgcttgcaatggaggaaaaaatttcacctgcaataagtacatatacttcttcctttattttaaaaatttcgattttgtagatcaagatctacagggaatatttccaatattgagtgacactagtattttatagtaaaggattcaaagcaccataggttcatcctcaaattaattcatgatgagtagataaattatatttttataagtagattaatattttcagacactatattttgtacagcctaatatccccttagatggtagctagcctttttgattagttttcatgtcttattatttttagcttgactttactatgctaaaatttatagaattttatttcaaaaccatttgaactatgctaataactatatttcaaatctttggatgggataatcttatatgacactgtatcttatgtcttaacgttttggtggtaaagcttttttttctttttctataatcttctctaatgactgatcattttgcagaaaagttattggagctcggttctacgaaacaacaataattgaatcatcaagggacgaagaaggtcatggaagccacacagcctcaacagctgctggcaacattgtgaaggaagctagcttttatgacattgcaaaaggcactgcaagaggaggagttccttcagccagaattgcttcttataaagtctgtgatgctagcgggtgctttggagcctctatcttgtctgctttcgatgatgctattgctgatggtgtcgacattattaccatctccattggacaagatgctccttcatacttctacaatgatgtaacagccattggagctttccatgccatggagaaagggatattaactgtgcattctgctggaaatggtggccctgctcttggaaccgtggcaagtgtagcaccatggctgatgacagtggctgctagtaccacagatagaagaatcatagacaagattgtgcttgacaaaggcaatggaaccaccataattgtatgtattctctctatgtactactaatgataatacatttttataacactatttttacttgaaagtgttatggttttttcttgtcatttcttattacaggggaaagctgtaaattcttttacattgaatggaacaacatttcctctagtggatgcatccaatgtttcagattttaagaaatgcccagatttggatccggggtatagtttctacaaaccatttatttgtattaatcttataaaagtttcaatagtgaatattaatttaagaaacaatataatttttcaggacttgtgacataaactgcatgcacagtggtttagtgaagggaaagattatgctgtgtgaaatatcggatgcctttgcagccggtgcactcggttcaatttccatcggtgaattggatgatacttcttttgttgtcccattccctgcatcaaatgtgaatgagaaagactataacactatactgtcctatctaaattcatcaaagtatgtatgaattaatcttgatcaagtttcctcactagccaaaacaacaatcttgatttggttcatcatatgttttatgtataaatagataaaatatatttcgtaactttgcagaaatcctcaagcaacaatactaaaaagtgaagctttgaaagattctacagctcctttggttgcctcattttcttcacgtgggccaaacttggttgtacctgatattatgaaggttatatataactacttttctcagtaactttctgaagctttctgttaatttaaagcatttttctcaaattatattatgctccaatacattagtgcagccggatataagtgctcctggtgtagatatattggcagcatattcatatgaggcctcaccctcagagaatgctgatgacaagaggcgcgtaaagtacaatatcgtttctggaacttccatgtcttgtccccatgttgctggagcagctgcctatgttaaaacatttcatcctgactggtctccttctgccattaaatcttctcttatgactacaggtattaccattcaaaacctctatgttacacatcacaattttctgtctttctaaagttaaatttcgttattttttctttttggttgtagcttggttgatgaacaaaactaaaaattcaaataaagaatatgactatggttccgggcatatcaaccccacacaagctatacaccctgggcttgtgtatgaaactttagaaggagactacataaagtttctgtgcagccttattggctatgatgagaaaaaagttaggcttatatcaggagataatagcactacttgccccaaaataccagagaggaaatcaggaaaggatctcaattacccttcaatgactgctacagttgcaataaacaaaccaattcaagtctcttttcatagaagagttaagaatgttggcattgcaaactcaacttataaggcccagattttctcaagatctctaactaatatcaaagtagtgcctgaagtgctttctttcaagtcactgaatgaagagctttcttttgatgtgattgttaacggtggtagtttgacaaagaaaattcctatggtttctgcatcactggtttggtctgatggtactcattctgtcagaagtccaattgtcttgcataattccaattcaattgaaagttttgaggccaaattggactaaagtcaaaattgtctttttagctggcttgttttcattttcctcatcagcttgtcaccaattcaactgttcttctgttatttgtgtacaacattgttatacataacaatggagttagttaatgagtagttttgttcatggtggctctgaaaatgtatcagcttggtaaaaataatacggaaaggccaaaatggaaataagtaaggctaatccgtcacatcttgtttttgtttttctttccctttctgttaatgatggaatggagtctataatacccaactattttgtttgtaatcttaggttttctttttgttatatgcaacttcaatccagattacatctaaggcattatctatagacatgtaattccaccacaaatcttgaaactgatgcataactttagagaaatgtaagcaaaatttgatgtggcattttctttttttgttattatttattcatttatttcgaaaagtgaagttttgattaactggcttgttattaataatgcttacatatttgtttgtccttgtaactatgatgttttatataaagagaacaattcatccattaagcaagagaaaatatacacatattcacaaatgatacagtctcctattctatttcatttatttaacttgtcgttatgaaattaacaacagagaaacaaatgaagaatgcttgttatttccaattatatctcattgattaaaaaaaaaagtacagaataaagatgagcaaaagctcaactgaccacacctaattttatttctttttcacgttggatcaaaagttcagatcacacctggtatatctacagaaatgacaaacagtaatctaaaacagagcaattacaataacaaaggacccataacgataccaaaatcacagtcgcaccaacaaacgctctaaagatcaaccagatatttcaatg

SEQ ID NO: 17037 - DNA, 3115 bp, Cannabis sativa
  modified_base (795)..(825): a, c, t, g, unknown or other
ttagtcacaacacaataataataatttataattagccacaatttttttatctttagtcataaattttattgtgactaaaagtaagaatttttgtagtgttttgccgcaattatctcgaattattttcaaagttcaagaagaatttctaaaaaaaaaataataattcaagaagcaaaccctacatataataaatcaaatagtaaaaattatatttatatattctaatttttatacccaaaacaaagtctcttttctctcacaaatacaaatatttataaattaattaattaatacaaaaagcatttgcttatatcataggacaagttttgtagaacaaacataagaaaaaacaagaaaagaaacgacacataatgttcagtactaataatattactaatgtttctttttggctttggtattataaccaattcatcaatattttcagaccatgcttcttcttcttcttcagcaattgtctccaattttgttggacttgataataatgaagatgatgatctggaataatatttcagtttatgccatgtcatcacatgacttattggtgcaacctcaacccatttctgcacccgcccgcatctaattattcccttatccatttaataaaagaagaagaagaagaagaaatagcttttataatggtgtgttttggtttaatatgagaggaatatttttttataagtatatttgttttctcttttgatatgtaatgaacaatatgaaatcctaatgtatttatagagaatccatggtactaaataataataataataatannnnnnnnnnnnnnnnnnnnnnnnnnnnnnntaataataataatgtattttttttgggttatttttttgttctaaatagtgaaaaatttagtggatgtaattagaccgacccaagcatatgacaacttggtcattgtacaaggttctttatattaaaatgcttcattttttttatcatcactttatatatataataaatatttttttgataatatattgtatacataataaatatttatataagaacaattatacacttaaaaaaatatgatgaaaccttgtggtcctaataatgcatatggttctaaaatttttacctattttagaatttatgatttttttttttaaaaaaaaaacagctgaatatatgaagtaattattgataatttttttttcttataaaaaagtcaaaatttaattttttaactaaaggggtcggtatgtaaattacacgtaattgggaaaggagaatttgctaaaagacacttatagtatctagtatatttttcagtgttatattactattgatgatgtaattaaatatttagtctcatataaattaagaaaataatttctaaagaatattgctaactaattatgtattactatttataaaaagtgttagacactaatacttaatagcaatgattgtggagaaaatataggatttgatatttcacagctaataagccaaaacctaaaaacgtggttaaaaagaaataataatgtgagtcttttaaaaacgtgggtgaatatagtaaaaaacatgcaagtcacgtaacgtgaagaaaaagctaattagctaaccactaagaaggtgacaagtggatggcatagaacaatagtgaaccgcgtccgtacattttgctcacacgtgaattgataattaattttgtaataggccgagatctgagatgtcacaattaattataatttgacaattaattattaatataatctttttgtttcacgtggctaatattatataaataattttaaaattatttattgtcttattattttctggaattttgtatgttttagttcttacgtttaatgtgtgttttattttgagtggtgttaactagttagctacggcttatatacatatatatatatatattttattatatagttttacttaataattatacatatatattttgatagattttattattatatgtagcgtgccattaattttctcctatctagtttgcaaatgtgcagttcatattcgatgtagcctttagattggtttggttatttattgttattattataattataattattattatttgatcaagaatattattattattattatttgtaatatcctcactttaagtttttattaagactttacacaacagaatgataactcttatatacgagtacgtcacttttgggtatttcttggactaatgactagccatatagaccaaaacgagtatttcgagcgtgttttgtcttcactctcgcacacttcttgggaaaacttcccaagagatcatccatcttaaaattattcctacacaatctcagaatctaggaggcccattctaaaattaccccaagtcaagcacgcttaactagggctgagcatcggtcagtttttttctacataaaaatctagaatttggttttcggtttggattggtgcaatccaaaaactgaccgaccaatccaaaaactatcttaaaaccaactgttttgaacctcagtttgagtggtttagtgacactaaaaattcagtgttagtctcttgtaatgtgaatcactaaaaatatgaagtgtcactaaagactaaaacccacaattttctgatttttattaatataaaaaatattgacatatagtgacacgccaggcacgaatggataaatatatgcctactcatttagtgtgtcactatagcataacttattatttttattttttttttttttataaaaaaagaaaaagtacaactacaactctaactctaattaataagtaaataaaaaaaattgtaaacgccagcctttttttttttaacaacacaccacctcttttttaaccaattaaaatctaatataaaaaattaaataataaaatataaaataaatttaattttttttagaaaagctaatatggcaggtgcttatttattatatacacaaaatatttttttttcttaaaaaaacactttactctcaaatggaaccctagcatcactctgcatcaccaactgcctcacccattttctctctgcatctttctcgtccaggtgaacgaaggtggatggccaggcggaggcctctctctctctctctctc

SEQ ID NO: 17038 - DNA, 5906 bp, Cannabis sativa
ccaaaaaaggactttacaagaatagtgatagaattaagagaaacaataaagaaacaagaagaagacatgtgattataagaaataaaagaagatataggatagtgtggaattttgtgctaccaattagttatcttttttagagtaagagtgaaaatttcacacctatttgctagaaatgtgtaccttagagatgctcttacaataatatagtagtaaatttactttactttgtttaaaaataattattttttttttttcaaaaaaatgagctataaattcatagaacataaaatatggcatttaagggcaaattctgaaatgaaataggcaagatcctaaaaaatattaaggtggtatttagttggaggtaatgaaatagaatgaaatagaaagaaaataatttttattctatttctttgtttgattgtattttaaagtattggaatgtcatttcaattgaataatttttccatcatcttgatggaatgactattccattttaaaatagaatgtatgaccattccaatgtaagataaaaagaaatttaataatttttttatacattttaaatttgattccattcttatttctatttttacttttattttcattcttatttctatattttcattcctcctatctaaacgccacttaaatgtccaactgaatcaattcataagttcttatagcagtagtaaatacttcagaaaaacaaaacacttggaatgaattttttaatttattacataattgtaagacctatataaaaatatatatttaaattgatacataatatatagatcatcaaagtaattagggggctgccatggcccctgcaaagcaaacaccaaaagttccgtcagtgcttgtgagatctatgcagctttatttctggttgaacttttaggacttgttcctcaatccctgttgaatgtatttctttttaaaaaaaaaaataataaaataataatactcaaaattgacctccaaccaagcaataagtactagtagaagtgaagagctggccaactcgatactataaagttggtattcttccaaattgataaaataaaattcaggtaatattgaatctaaaaatgagagttgaatctgaaagaaaacagaacaaaactgtttatcaaatcttaaaaagaaaaagaaaagaaaaaactactgcatcatgaatcatgatatcgccttacattacagccaaatcaataataacaaataaacaaaatatattacagatgaaggcgtacatttaatttaagatagaaagaaagcttcatgatgcagaagccaaattttcatattgccatgggttaaactcagttaatttcacatcagttacttcatcgctgcttgaactttctattgcggcccgatgttcggtatacttgccgttgtaggcatatacttccaagtccccccatggtgtaggacagatttcatcagtttggtcaaaccatcttggtgtgaactgatgaccactggcctcccggttctttttctcagccctctgcctctcctccaggctgtgacaaggattggagtgttagacatgtttaagcttcatagccttaccatgaagaaggcactcgctaactaacaagataagactgggttatctctaaccctgcttgtaagtatatgtagaatcctacttgcttatatgatgtatttatgtatgcaatatgcatgcattcttacaatagagaaaatagaaaattgaaggaataagaaaagaaagaaacctgctcttttcaaatccagcctttgatagatcacccttttctaaggcatatctatcaggacgcaaacgtgagtctgatgctaacaacttctttggagcagtgtcaaagctatttactttgtgcgcaaaatgtgtgtactgatatttgtcattttctggacccttgataactctccaggcctgtaatgcaacacgagaatattttcatgagcttattttgaaagaaaaagacccacctgagaggctatcacgaacgaacaacaaaacaaggaagaaaaaaaggatgtaagtgtgtcaatcttctccagttttcttactttaggggaaacacaaaacgatgccatttagagtaccagaagagaacagtttttatcatcaaaaaaaataaataaataaagaagagaacagctctttcagccttcatatgacagctatcataaacctgatatcgttttatcaaacaaacatgacagagaactttatacaaaaagacagccagaagttgaatcttaagttgactgtgaaacagttgaaggtttggatttgcattcacaaacaagagggcaccagaaaatggctatggacatggtattaattatcaagcagaatgctaaaaagcaaaaaatcccttctggtaatcagtcctcacttggagaagctagcaagtcaaaggatactaaaccggaggccgtggaggaaaaaactactttatgatggtggtggtttatgatagttgtcatttcaggttgctgccatattaattgagatgggttttggaacagaagttcaatggcagttaagtttacattttttttaaatatatattagcctttagatattagataggctttttcccaatctatattttgtgacagtagcagtatcatgttgaaagtagtatatcgatatcacttcatttgttcatttgttactggccatcaatagaattttgctggtactttttcttttttcaaataatagaaaaaaaaaaaaaaaaaaagcagaatagatagcaagcaaaggtgacgcacaagaagttataaaagcacttataagcctctaacattaacactcaaaaggacagagaaaaaaacaagtttgtacaagtatttaatcagtagataaacaaacctctttcaattcagtcccaggaagtggctccccttctgaatcacatggttgataactcattgactcattccatttgccagtcatcaatatttttggttcctcgctagaattataaacatagccatcaacttcatagcgaccagcactggaaaacaaccacaaaggcatcagataaattgtgaaaatcaaaagagaagtcaaaataaatgttcatcaatacacatttagatagtatatcaaaaggccaaaagttaactataattcctatcattgggtttttttttgaaaaaagaaactataatcttttgtcattttttataaatccaggacatttatttttaaaatggcttgtgtgatcatatatcagcaagcttcaatacattacattatgtaaaagacaaaaagctacaaagagaaggccttcatacccaaaccatccacaaggctggaaatatagtacaactttgtctccagtagtcaaatttgtcagaaccatctcccctggtgcatcgatccaagtacgcccaaaaattaagttgttgactttagaaggaggaggtaccaattccaggactacaccatccctttttaagactagacgtgtcctgcaaccaatatattgcaaaatacgcaaataatttgagattcaacttgctcacggaaaataactatcaaaataaatttaaaaaactgcagctataatattttcatcttagcattatgtctttcaaatctgaattggttgtataaaacagatgtttggataaaataaaaagtttcattgactcgttaacattacaagcaaaaaccataaatatgccaagatgacaatcgagtaatacaagtatcgaagaagtctagatttgtcgaacaattgtccacaaactaagaagaggggataaaaaagcgaatgggccagagtatgaagtttgcaatgcgtacatgtactagttagtaagttcattggtaaaaatacaattcaaaacgtgaagctataaaaagaagaattgaaaacactgaaagtataaagtccattgataagaagtattatgtgataacataatggagcaagacctaaaaagattaacaatcacgttaccttccaactggatagacatcaattgaattcccaagaaacttggttttcacctttgaagttatgtcataagcgaaatgctcattttcggcatgtgcagcaccaattggagggtgatgactaacctgaagttatatagaaaaggcaatgaaatttaacaactgtaaccattttcggctcatgtgaaaaagagggcgagcttcctaaaaaacacacctgctctgcaatgaatgagatgccatgataattagcaagctcataagtctcgccaagaattggattaaatggcttccatgttcgattaaaggcagtataaacagatataaaccatgaagctgcacccaacaatcttaagttagccaccgtaaaatgcatgcaaaggcaagcagaaaaaggcacgtagacagagacattcttaccagaatacatcattctcatataaggatcctcacttttatccgctagttctaagagatgggcatactccataagctgtgacaaagttatttataagatcatatagaaatcacgttaccaaagtagttcaattacagaaaagcaataacactaacctcagacattttctgcagcatagacattggctcaaaaataagcaccggtagtgtaaccattgatgtgacatcagatcctatatacttctgcatcatcttccagtaactatctcgatcctaccaaaccaagtaataactcagttattaagtttaagtctgactaaaaccataacataataaagaacaaattgagtacaaaatcaacaaagtaatacaatagtattacctcttgcttccatcttcctttcgttgcttcctcttcaacatcctcggtccctccttctgggttaatcacttcaagcccttcataacccattaagctgggccataaacaaaaggaaaaaaagtgtcaacaaactagagcttaatcctaagtaattagaactacccaaacgaaaaggccatatcctttcgaatacattaccatagagatctccaaaatagaaagaaatgaattgaattgaattaagaaaaaaaaacataaagatcataagctaattgttacaaacagatagaaagtgaattttaaatacccagtgactgatttcgacatagcgctaccaaagttggacagaccggaagcgatcgaggcgaagaagcccccgctttgtttcggatcctttggtgccatggtcgatggatcgtgaagaacctgaaccagaatcagtgcgatcgagagaaggagatttcaaacttcaaagttcaaatcgagagaaatgaagaatttaaaaaagaaagaaatgggaattagggatttcaattttaattttatatattaattaaataaacataaagaagaaaaacagcgaatgagagtagtgggtttcgttggcggttcttggatttgaagtcaaatctatagctacgcgcagaaggaagcgcgtggtcatgaataataatattctaaagtggcggctcggctgctgttattagtgaacaatttgcttcgtgattggctaagccggccaagcctacactcgctctcacgcgtttttgcttttggaatctttaccgttggaaatatctgtttgtcaacgtggcatttggtgggagtttattcttaaaatacatttctttgtgagaagagtcctcctaattaggcgtgttggcagtgcgagtggtgcagtttttcattatttttttaaactaatccgaatatgtagttttttcaatttccaaaactgcacccgcaccgcgaaattaaaaacccacaaaaattgcactgcaaaaaatagtgcagcgcgatgcgttttttgtagtttatatggtttggtctatcactaaataattaaactatcacaaatacaacaaactttgagcaaaacttgtcaaaataccataagacttgaaaata

SEQ ID NO: 17039 - DNA, 4718 bp, Cannabis sativa
tgacctccgccaccaccaccaccaccaccagcccacgaggctcgacgaccgaaaaagctattcaaccttcatcgcggttccctcttcaatcggcgccgccgcagcagaaacaacgaattaacccttctttttatccctgaatactggtgctgagtgagtctgtctttcgcctctatcttgctaatgattttcatttttcagatcagaactatattttttgtttattcttactgttgttattatgaatcgttgatgaaaaatatgttaattttgatttttagttaaatttattaattttaatttagggttttgattttgttaattttacgtattagcttagagagtgagattttgagaagaagggttgtattatgcatagttgaataatttgaagagattgcttaaaccctgaaagttttatcctttcatttattattgtagttgtttagtgttatttttagttaaatttattaattctaatatacgggtttgattttgattatttacatattagattagagagtgagattttgagaagaaggattttataatgcatagttgaataatttgaagagattgcttaagcccaaaattttcatcttttttatttttattattgggttgtttgtgtgtatgactgtgtgttttgctttaacaaaggttgtaataactatggaggaaaccccaaacccttccccagctccagctccagcttcttgctggagtagcatagtgaaatcccaggtagctcccaagccccaaaatcctacccctgaggccaatgtcggtgttttcgcacaaacctgtaactctaccaaaggcattgcagtggctgtagtcgatgccaatgccatcatccaaggcggagagaagctttcccaatgtgctgacaagttcgtttctgttcctgaggtcatggacgaggttcgtgaccctgtctcccgccaccgactctctgtagtccccttttctgttcagtccatggaaccttcccctgaatctctcaatagaggtatgtggctctttcaattgcatcataatttagttgaagatgtgaattaaaagtttatttctagcttgggttttaagttagttttcaatttgattttttgttttgtttttgaatagtgattaagtttgcaagagccactggagatttacagacattatcggatgtggatatcaaacttattgcactgacttatactttggaggctcaaattcatggtacaagtcaccttagggaatgtcctcctgctattcatactgttaatgtgaagagattacctgagaaagaattgcctggttggggttctaatgttcccaatttggaagaatgggaagctttggaacaccagggtgaagataaatcgaatgacaattctagaatccttcccttgaaagatttgaacttgaatgttatttccgatacaagttctgagcatcagcaagaggatggtgaagaaggtgatgggggaccaaaaagatcatatcctcctaagaaaaaggagataaatattgaaggaaaaaagatggtggttgatggaatagatgcgtctcagggagagtttggtgatgatgctggtgactggatgcctgctgtcagtcgaagcactcatagaagatttctcagaagaaaagctaggtgggagcattatgaagctttatccgaaaaagataaggcttctgaaaagaatgaggtaactggagagaacaatggtgtaacagaggaagagaatggtgttaaagagagtcacatgcaagttggacagaatgatgaagaaagtctttctacagtcctggaccagatgaggttggaaggagattcagcgaatcaagatgagaatggaagcgctgaaggagatagtgaagagctcgaccatttagagctctcaagcgagatcagtgatagtgttgatgcctcaaataccgaggatggtgatagtagtgagcagagctgggcgctcaggtccttgtctgagtccagtgtggcttgtataactagtgatttcgctatgcaaaatgttattcttcagatgggtttacgcttactagcaccaggtggtatgcagatccgccagctgcaaaggtacttgattgtacaatttttaagcatttaccatgtcaaaatgtatgtatgacattttttttttcaggtgggttttgaggtgccatgcctgctatacagtgactgctgagatagggagaattttctgtcctaagtgtggaaacggtggcactttacgcaaagtagctgttacagttggtgagaatggaattgttttggcagctcgacgtcctcgtatcatactgcgtggcactaaagtaagtttatacctcatccaccgatacaaactcttattattccaatttcagcatttctttagtcaattcgtttgttgttgacacttttcttgtatgcagttctcactaccattaccgcaaggtggaagagatgcggttacaaagaacctcatcttacgcgaagatcaactaccccacaagatgctatatccaaaggcgaagaagaaagcagcagcaaaagaggttggcttcatatcgatatttttcgtcccaattaaattatcccaatgtctgatttttcgtgtcgatacttttactctttcagggagatgaccttttcgtctcgagcgacctcttcagccaacaccatagtgataaaagagctccttttcagcccccagtaaggaaagcattagctgctttcagtggcaagagaaatcctaatgataatcattactctcgttctaagcattagtaagtactcaaattatgagatttagctaatcttttcataagaaaaagttttgtatttcttaaattgttttgatattttaaagtttaatgtttgccaaggaaaatggtcaaattttgttgagtgcattgtaattttcccctttttataatattatttaaatttcctcttcttccaaatgctttatttattatttggtagattttaaatataaaatgtgtttggaatgtagtaattatactgaaatgttcaattatgtataaataataatatttcgtaattacacgatatgagaattggagattataattgagatctctcgattatgtacctactcggtgatttcgatccaagtaataataagagaagaattattaaacaaggaataataagttccttctcccttaatgatttcgatcaagaattatgcgctctcgatttgattttctgaattaaattaattgctgttcattcagtgaagatgttctaaggcggtgattcaaggaattagtttattagaactactcacgtattttaattttgacttatataaaaattaaagatgtttaaaatatacagattttaattttcaggtctataaattgaaaaaaaaaaaagattggataatttataaaagaaatgtcttgaaaatttgcaaatcatattttgatttattttatgtagattgtatacctaatttgattattcgaattagcttttttaaagtgataaaatgtgttatttactttgttagtctgactcaattaatgaaattgtcctattattcttaataacataaaataatttttaggacataaacctcaatagagttgtatatttgggttggaccttttggcatcgcacgaaattggcatgaacttggggacacaagcacgacttacaaaaatataggcttaggcccgcgggctggaccttcatttttaaaaatgggctttctaaaatatgaatgcttaataaaattactaaatttaagaatcttacttagattttattgtgtaaatatctttcaaactttagacagagagagttgtaggagaaaagttttataaaatacttcaaatttaaaagtatttacttattcttctttttttgttaaaaatactttatataattttatcgaattgtaattttgtaatttaaaagcattatttttgaggggtaaatatcattttgcaccttatattgtgtaaaagttactgattagacctcctattttgttaaaagataatttagacctgtatttttcaaaatagtacaaaatagtatctttagtttaatttttgtcaaattaaaacttaattacttaatctgaaggtactatgaccagactagttatacttttttgtatctgttcgtactagaaattgattttagattggttttattaaaaaaaaaaagttgacgaaaaattgagcttatagtattattttgtacggttttaaaaaatataaaattcattttatcatttaataaaataaataatctgatcagcaactttactaaaacattttccatcccttgcatgcatgcaatatatatctttactttttctttatggggatatgacaaaacactactaatggaaagaattgcatagaaaaacaaatctttaggtgtgtcataaaagcttcaaggacaaaaacaaaataaaatttggaaatttaagattggtatcacaaaacttaataactacaatcatcatttataatgcaatggaagattcaacatatcttaactatttgtagtaggtaaaacatatctttcaagatatacaacaacatttttttttgctgtgaagatatacaacaacatttaattattggaagattcaaaattagattaagattacgactatctattttattaaattataacgtgacttgaagatattatgatcaaactgattacattatttacaata

SEQ ID NO: 17040 - DNA, 5126 bp, Cannabis sativa
ataactaatcagattgtaaagggttttatttagggcacaaaacccaacactaatttgatgtcgtgcttcgtattgttactcactcgagttttgcaaggtctatctctccttccagccatcaaactttgttacaatgatctttacgacccgaagctagtgttttgcttgcttttattaagtgctctttgatgccacgacccatgatactacaatgagtcagacacatattttcttattgtattgtatcttggcgagcaagaaaatgaatgtgggcaagatcatttatgataaaatttggaagtgcattaagaaaaagagcagcaccctatttttcccggctcctatcactcagatttgcgtagcgggtaatgctcctataggggcggtgaagaaattataaaagagcatatcaacattgattttggtttcgattcagcatgttgccagtcattgcacaccctttactgctgctcagaaccatggctagccatccatcactcaactggctcctgctagtgctccttccactctgctagcacatatcatgaattgcctagagcaccttgtggataaatcacttacttactttcgctatgttcaggcgcgttatactgcattggctaaatcgctgaagcgaattgccccaaggcctatagttgacttcctgttgtttccagatgaggtgcttgctcggtggactgatccagtaactcaggcatattctagcccttcggatgatgatcccaagggttaggtagagggagtgttctttctttcaactttaatgtttatttatttatttattttaattaaattttatgtttttggtattattatcttttgtgtttatcattgtttgtcctcttgttatgtgttctgggtgtaatttgtctttgttagtgttgccaaggggggctcaatgacgacgttgttgtttaagcttagctacttaaaactaaatgtttttctttttgagttttaaactgctctctttaagttggaatattggtttcccttagttattaaacgtgtgcctcttttgtttgtttgtatagctttgtttgtgtcgctaattagtttgagctaaacccttgtgagagtttaagcctctagaattacttagcaatttttcatttagacaaaatcctaggcatcatcacaccgaggatatgatttagaccgtgtttggaccgtttgagctttcaagcctatcctttatgcatattttgtccctagatttcctccttgagcctagtattgacactttcatttcttagccactatataacctagctagttattacttcatcttttcacctctacccaagatgcttgatccttacaagattttcatgtttgttgtccatttgggagttgtgaggagtggtgtaagtgagtgtcatttgggtgactatttctcattttcctcttcctttttttttatcaacattggggacaatgttgttctttgagtttagggggaggtgtttctcacttttattgttctcttgctatctagctagtctttgttacttgtattatttatcttcttttcttaaaaaaataaatcagacaaaagcgaaaagtttgtacttgtaaattgcatacccttttgaaaaaaaaggtgttaaaaataagtttgggggtgttagtaaaaaaaatattattatcgcaagcatatctatatttgtgtgtaaattttcaattgttaggagttaaagctaatggcaagagttgtattttgtgtctggggtctttaaaaaagattagttgtgcattgcatgaatcctataaagatcaaagtgtttagggtgtcttaaaccaaaattatttccttatcctaccctcaccctagcctatcattacaatcttgacaaagtcctattgatccttggaatggtgtgtgttaatattagtggagaggaagttgttaggtaacctatggaggcatcatttgaacttgaggatcaagggttagtttaagtgttgtttgatcaaaattgtttaggaaaagctatgcttgcataaaagggggagtgcttgatacttattttgtgcagaagcatttaagcttaaagattttggtttaaagcttgagtaagatccacattcagtgttttttttttcgtttgcaaaaatattatttatgagagctattttccctaggtcttttctaggtctatttgcatcctatttcgtcgcgttttctttattcagttcaatttattcgtggtttctttctcttttgttgggtgttgtgcctgtcttattttgtggtcttgtcctcatcactcgagggcgagtaatgtcgtaagtttggggggtatttgataatttttgagtaaagagttatttgatatcactttaagcatgtttttttttttatgtaattgttttttatttcagttattttgtcttttaatttgtgaaatttttagtgttttatatttatgtgtgtaatttgaagctgctagttagaaatcaataacttttgtatataaatgggcaaagaaaagagcatgttagtcaagtttttaactttgctgaaattctgtgaagtttttgctgcagcaaacatgtcagtagcaggttgtgtaaatttcttggacaaaagatgagctgagacttcattaaatgtggtgacaatttttgagatgaagtgacattctaggagtcgctgctggggcaaatacttggagaggctagatttatgacatgtgtagggtttatgttgggaaaaggatacaaaacctaagattttcttttgaagagggcgtcctccattgtgagaaaaagaaagaagtaaagaaaagaagaatttctacaatagaggaccagatcatacagaagaagaaaagaagagaaaagaggagaaggacaagaaaatttcatcatctacctttggagaaaattttcttccattgttgtttgttatttctttcttttttctcttctctaactctatctttctaactccatggatgaattttatattgtaatggtggtttctaaattagctatgagctaagctttctacagtttgaactgttgaagaaacctatgtcttagtttagtaattttcttatacaaatattttagtaaaaaatctcatgttcattcaagtgtgttttatgctaatttgttgttattgattggccaccaatagcttgatgttgagttatgtttaatgatagagaggttaaatgtaatggatttaacttggatgacacaagttcttaatcttattagattaggttagtgataatataggaatatgttatttcattgtgtaacatttgagaattgtgcttggaaacggtattcttgagttcgattggcatcggaatatgtttgattaggttcaataaattgactgcatagaatttaaaagatttttatggacgtttatgaagttcttattaacctggaatttttgctaaaattttactgtagcaaaacgcacagttctgctagacatggaggaattcaatagttcaagcttttcacagtttaatagtttgcaactcatttttattttcattgtttagccacttttgagttaatttacttcttactagtttatttagttaaagcattaatcattccaatttgatttttgggcattttgcttggtaatttacttttgcaataaaattatattttccttgtggagatgatatccgttactcatcattgtattacttgtttgtgactatgtgcacttgcgtatatataatttttacaacactggctagccttacaatgtctaaaggctggctatagggccggccaacggtggccgaccaacccccttagggtggctggtttgtcattttttcctccctcctaagtactcggacctcttgtcagctgaagtgttgagtagatgacttggctttcttgttgacaagttgtactcccacatgtcattgatcttagccacgtgaacatgccacattaggtgggtaaaaataggataacaagattgatatttatatatttataaaattaactctaactgttaaatttaacaaaatatttttatattagtttaagaatataaaattgaacacactctcaatattaaaaataacaataaaaaataataatgttacaaataatatattaatatttttatatattcaaattagtctaaattgatataagttcaattaacctaaaacaaataatattaatatttatatatatttaaattaatcaaaaataaataatattaatattataaaagagtaatctgcagcataaatacctaaatttaactcctagttgcaaataaatacctaaatttaatttttggcagtaataatatctaagttataatttcagaacttttgtaggtacctggctcttaagtgttaagtaaattgccacgtgacaatccttaattggtccaagtcattaaatttttatttttaaatataccaataaaaaaatgacacgtcgataatgacttaacatttaacgtttaggtacttacagagttccgaaaatataaattaagtattatttttgccaaaaattgaacttaagtattattttgcaactaggagttaaatttaggtatttatgccacaaattactctatataaaactaattcttttttcaccgttaaatttaacggaatattctattagactaataaaaactgttagatagctacattttatatagagtttttagtggttaaaccctcccaactatagtttcacttgcacttaaccttccaaggtcaaattttgattgtaaaacctttaaaactactaaattattagtaaattttaggtgtcattcggttgactgtcatcatggactgcttatgtatacactcttgtacacgtgacacatttatattagtccacataatattattatttcaaaatttattttaaaattaaacaaaattataaaaataaaagatagaatattaaaataattaaaaatattataaattttgaaatatgattttataatttttaaataatagcattaggtgtaccaatatacacatgccacgtgtataaaagtgtacacataaaccgtccatgttagcagttaactgtaaaaatagatgttgtaaagaccgcttactttaatttggaaatta

SEQ ID NO: 17041 - DNA, 8696 bp, Cannabis sativa
acctcttgaagctctttttgctcagcttctacctctgaaatatcccttgaaagagtatgaaaaacacatttgaaacaatatttagcattataacttgccatattcaacttcaaacacagcgaagacagactccagctgtaaagaggcgtgagtatcgacattcataactaaccttccaactatttgtttaacattgcagcgacacttggcacaaacaccttgctccttggcacaacctaaaaacgacaagacaaaaacccattaaactcccatagatagcacatccaaaacccatttaagcttcactcaaaaacagactacaattgaaactaaccattgcagagattatggtaagcttggcgaacagctcgtttagtacaactttggctgaaacatttcaattgcatattaatcacattaatataccaaagcaaaaaacaccagagaaaaaaagagtgaaagataccatttagcaggttcagtaagacccttatactttccgtagcggcgtttccactcaatctgatctctacagcgaggacagactccagtgacctccgataacggcctgaacctccctccaacttcctgaaaagaatacatataaataaatacactaaattttacttccgtactttaatagaaggagaagaatgaaacggcaccgtttcgttgattttgacgccggcgtttggtttccatgcaaccttgttttggtgcttcggagggccttgtttgccgctcatcttcttcttttacgaaagaaaaacacactcgacggcgaactggaccggtttcgggcggctgccctaatttatatgtttacgatttgtgcgtttgggcttttccagtacttcatggtccggcccaataataaatgggccgacgcaatgtaggtccatactccttcgattcacattcttaaagacacttgcaatgatgaatgaacttcttctgaaaaataacaataacagaaataagtgaaagatattattgtcagaaaaatacaaaaatctggaaatttaaacttacgcatgacttattattgtatggaaaatgttgaaggaaggaaggatacagtatttcagatcccactacttcgtgaggaaagagaaaatatatgcgggtcaaattgagttgtcaatcgggtcggaaagatccgatagtgaccgtttcatctgtattaaccacccacaccgagtagtctcccaatactgaggattcagttgaggaaaatgcataccattaccgatagagtatttgtcgtttacaacaactcacattcatcttccattcacagatctcttcctctcaatccagaatcttgatcaaatttaccaacactttcagtttctgcgatcagattgattaatagcaaggatgcagcgtgttccagcgacgatcgaggaacaattggaatcgaaagcaatcaaagaggaatgcccttgggagagcttacccaaaaggcttcaagccactttatcttccaaggaagaatggcacagaagggttgtcgagcattgtattaaaaaaagacttcaatggaacgcttgttttgctcgcaaaatatgcaaagaaactgaatactacgaagatttgatgcgatacttgcgaaagaatttagctctgtttccttatcaccttgctatgtttgccgtgtaatgagggtatcgcctttcaaatactactgcgatatgatttttgaggtcatgaagaacgagcaaccttatgatagcattcccaatttcagtgctgcagatgcattgagacttacaggtataggaagaaatgaatttattgatataatgaataagtgcagatctaagaaaattatgtggaagattaacaaatcaatcgcaaaagaacttttacctactcatcctgtggatttacagattgaatcatggtggggagtttgtcttgtgaactttacacttgaggaatttaagagactctcggaagaagaattggccaccattgataaagtttgcaaggaagaagccaattcatatattgtgtttgatccagacattatcaaaggtctttttcggaggggattgatatactttgatgtgcctgtttattcggatgaccgctttaaagtttcaaggcttgaagggtttgtttcaaacagagaacagtcttatgaagatcctatagaggagttattgtatgcagtgttcgttgtttctagcgaaaatgcaactgttgctgagcttgctacgacattacaggctgagctttcacagctccaagctgctgcatcttttgcttgtcggttgggatgggctgagaaagtgattgatccagcttctattcttcaagaaacaagtgtgcctcgttctcctagaaccattcttagtgatgaagaggcttcccaagctaatgcaagctcatcagatattttcattgatggtgataataataatgctttggaaggggaagcttattcttcaggagcagagaagtatggggcagcagcaggttcaatgtatgttcgtgttgccttcattgttgatgctaacataacatcatatcttatgatgggatctgtttcaccaggcttgaaatctcatgctgtgacactctatgaagcgggaaaacttggtcatgctagcattgctgatctttgcaaggatttgagtacattagagggagctaagtttgagggagaacttcaggaattcgcaaatcatgcttctagtcttcgttgtgttttagaatgtcttcagtcaggtggagttgcaacttatgagaaaacagatgagtttttcaacaatataaatgaaatagcttcaagcaatgaggaaactacttctatggttgctgatattaccttaaagaacgtatcagaacctgcaggcttggaccaagatgggcctagtggtgatgatcccattaataaagaggtgtctcagatggattctgaggtctcaactgaagtctctgaatccataactcttgaaggatcagatgtaaatggaaaagaattgtcaaagaagataaagaaatatcgggtagatatacttcgttgcgaaagcttggcatctcttgcacccacaactttagaaaggttgtttttacgtgactatgatattgttgtgtctattattccacttccacattcatcgattctccctggaccaacgttccctgttcattttggtcctccctctcactcatctatgacgccttggatgaagttggtgctgtacacaactgtggcgtgtggtcctctatctgttgttctaatgaaagggcaatgcttgcgcttacttcctgcaccattggctggttgtgagaaggctctcatatggtcttgggatggttctacagtaggaggcttggggggcaagtttgaaggaaatttagttaagggaggtatacttttacactgcttaaattcacttctgaaacacactgctgtgttagtgcagccactcagtaagtacgaccttgatgaatctggacgagttgttactctggatattccattgccgctgaagaattctgatggttcaactgctcgtgtagagaaggaaatggggctgagtgaagaggaaagtaataagcttaactatttgtttgctgatttggccaacagtatggagttgtggacagttggttatattcggcttctgaaacttttcaaggaaaaagagtcggaacagttttctcctgatgaggaaaagtatgaatgggttccgctaagtgtggaatttggtgttccacttttcagtccaaaattatgcaacgatatatgcaaaagggttgtatcatctcaattacttcaagcagattcactacacgagcatcatgatgcaatgcaaagcctaagaaagagactgagagatatttgtgcagagtatcaagcaactggtcatgcagcaaaacttctttaccagaaagagaaatcaaacaaggagccatctcgacaacatctcatgaattatgcaagtggaaggtggaatccacttgtggatccttcttctcccatttcaggagccttgagcgaacatcagagattaaaactggctaacagaaatcgttgccgaactgaagtgttgagctttgatgggagtatccttagatcatattgtttagcacctgtgtatgaggctgctacaaggccaattgaagaatcaccttcagggatgatcacaacgaaagttgagcaagaagagcctgataacagagaagttgtccttcctggtgttaatcttatttttgatggctctgagttacacccttttgacattggagcttgcctgcaggctcgtcagccagtctccttaatagcagaggcagctgttacctctgctgcttttgctgctattaaatagggagtttctggtacatgcttccttggatagattttttgttttgattttttttcccatttgctagcttattttgagaatggcagaaatcactggcgtgtagtcaaaatcagatctaaggtaaacatacttttccccctttttggtttgtgctatcaagtatccatgaaatcaaaatcaatttatagtataacaacagttttgattgcttaactacactgatttatgacagaaatattatcatgaaagacccattctttgattctgtatattagttggatttagattacattcattcatgaggttgagccctcaaaactctttgcttgtattaatagaatttggggctgttaaggcctttccagaccatataaaatggtactcaccctagtctccaggttcggcttatagatttcatgacaaatttataacataaattttatttatattataagaataacttcttaatttaattgcaatacttttatctaaatgaaacaccttttcgttccaattacaaattaaataattttttgaagaactaacttagtttgatattttgaagtaaatgatctcacttgaaatttttaagataagaaaacatcctttgagattttaaggtaaaagacatcacttgaaatttttgaggtgaatgattttatttaaaatttattgaggtgaatatcctatttagaatttttgttgaggtgaaaagcccctttcagaatttttaaaaattgtgattatacttagcaattaaattgattatttatcctttaaaaggaatctaacttaattctaaataatcttttgtgacgctttaaaaattaagtgaattctcttttttgagctattattatggctttgtacatttctagttttctactaaggcagatcattttcatatttaaaaattagagaagactatttatttagtatttacattcaaagttttggacagattccaagtttctacgaacacatgcatctatctatctatgtataatactgatctgaatcatcagacctctccctaccactactcctcccattactactactaaacaatactgtcgtatgactaaaattcaaagaaaacgagtcgtcacttccttcaccaaatgccgtactaatcgccgccgtctctaatccacaaacattaatggtttcctctgcattcacttgaagctccaaggcgaattcaagccctcccaccacatcatgcattgacggccgttcacccccgtcatcttccaagcagcttagccctatctccacgaacttctttaaacacaccgccgaaaccatctcgccaatcaaattcgggtcaattatctcttcaacccttccatttcggcaacatttttgggcccaattcgctaggcccacttcctctttcggcaaattacggcccagagctggcctagcacataaaatctcaaacaacaccactccgaaagagtacacgtcagatttctcagtcaactgttgcctcctgtagtactctggatccatatacccgaaactacccttgactgcagtgctgacgtgtgtaaccgacgccgaaatcggacccgtcctggataacccgaaatccgaaaccttagccacccatttctcgtccaatagtatgttagttgacttaacgtcacggtgaataatcatgtgtttcgcaccagtatgaagataatgcaaccctttagctgcaccaatacaaatctcgagtcttcttttccacgtaagaggagggttatcagtcttgtaaaggtgatcacggagggtgccacgtgacatgtactcgtacacgagaaccatctcgccgttatcgtcacagtaaccgatgagagacacgagatgcacgtgtctcaacttggaaagcatatctatctcggtaaagaactctttagctccttgcttggaagaagggttcagtctcttaacggcgacgataacgccgtctatatctcccttgtacacgttaccaaagcctccgaagcctatgacgcgtcgctcgtcgaagttgcctgtggcttctctgatctccttaatagtgaaatgacgacacaaatctgagggtagtgaagaagctttcgttatccccgatgaggctttcagcgatgtccttctccggcggattataaagaagaatttcactgaaagtaaacagaataacaaaccaagcacgattcccgaaactgtaatagctttgaaatctaacaacaccttcttttcgctattccttagtattgggctaagcattggtttgtgattttgggccgggccggcagggttgggcccagcaagactaccgtcagatcgattcagtttaaatatctcggcaccgttgagcatggcgttgtaattctctggatttatctcgaaagaaggttgcaactcgaggagtaaagaatcagaatctttttcgatatatatgatataatctatgtatttggggatttttgaaccaccggtgaaatgtataacatccatttgtgtgtgagcaatcattctgttcatgtaaatattaaacactatttggttctctcgagttatctcgttaagaatggagcagaagtgaagcctaacgagatagtaaaaggccgaatccaatgggaaataccaagtgagattgtacttggtgttgttataacttattggatccatttgccgaaaggtggtgtaaacaatctcaggtgcagtgtaagccggtgtatcctcgctgtagtggatcttcacattacgaagataaggaactgtaccaacattgtaactgtgtatgtaactcaagtcttgtttccaatttcgaaacattgaaacggtgtcgtttatgctgagtacatctggaccccctacgtttaacctgtaaaggttttcaagaacagtgttgtttgtaacagagaagaaagggtttgaagggttatttacgaagattttaggtttatcatcatcgttgcttatgtagagattttctggtatggaaacgatttcaatgccattaatgaaagcgtaagagtttggagatggattgaaggttatgttgattaacttttgattgttgttgataatgaattcttttgcgaaatagggttgagcttgtggattcttgatagctgaataagcagtaaggtaaacgctgaaattgtttagaagaatgaaattattggcagtgacagagaagaatgaatcggatttattgaggttattggagtaggtggctgaatagaagtaaagacggagaaactttggtcctggggttaagagaaatgagtaggtgaatttggagagaaagattcgagctgtcttgtaagggacttggggaacagaaaagtcttgttctttggcaatggattttgatgatacgtcttctatgtttggtgatgatgaagagtaataatagtgttttgagtctgagtcgctttcccagagacggccttgagtatcagtttggtgattattagaagaagatgatgatgatgagccacaatcaaggaaaagataatctgtaggagtgtttggtgtttgattaatggcagtggaaagtgtaaagagaagaaaaactgagatatagttagctatggcgtcttgcatgttttgtaaaccgtacttagctaggatttgagactttttatgaaagagattatagtagctgcttatataataatatagatacctgaaacacagtattggggtggttgattatcatgtaatgcctcccatgatatccatttctttgactttctttttgggcaccacttgcagtgcacttttttcataggtagtaagaagaaatgaagggttttagactaagactgggtttctcccgagtctcatgttacgagtgagaaaagttaataaaaaagagaaaagggcacacaaatatctaatatgatatcgtacacataatatttctaaattttagttaaggaaaccatttgtcttgtttgcaggaagaattttcttggtcaaggaaggaactcgtctttttttaaaaaaaatattatacatggaatatgaatgacatgcaatgccataattttcttattttattaatttatgttttacgttttagagaatattcctatttggtactttatattttagtaaaatataagtgatactatttaatatgaaaattgatttttaggtaccctctatttataaaactattaaaaaaattgtaccttctatatttttggtcaataatcttttcataataccaaatttgccttccattttaattacttaagttattttattatttttcatattttaaaaatactcatacactcacgtataaacctccttgacttgttccatacttatcatcaatccatctacttactatcatatacatta

SEQ ID NO: 17042 - DNA, 9862 bp, Cannabis sativa
  modified_base (1541)..(1553): a, c, t, g, unknown or other
  modified_base (1663)..(1668): a, c, t, g, unknown or other
aaaaaattagactaaaaagttattctggatgccgaaacaagtcaaaggtgtatcagtacatcccttttaaaggggtgcattgtagaatcacccaaataaatatatcacggttaaaaaattatgatttcttttttaattcagttactaaactctatatatatgtttacaataaattaattaataattataattattgagttcaaaataattagaaaaattaagactcaaaatattaatttttttttgtgttattatgagttaaaaaaataaaagtttaaataagtactcactattaaaataattatataaaaatgttaaaatttaaaatttattataattttataacttaattatcattaaataaaatacaactgcagtggtttatttcctaaaactttttataatatttaaattattacacatgtgtaaacaatgacatgcatcaaatttaaaaacaaaattaaagataaaaaagttttaccataagagaaaagttaaggagttatgtatctagcaatttaaacataaaaaattttagctgcaaatttatggtttaaaaatgaaaaagatacctattgaaataatttcagagctgatttgttaaaaaaaattatttgataaatgctaaaagcaattgggcatgtcatggtgccaaaatttctactccggatggacatttttgtttttctctaattttacagtaaggccaaaagaatccattaaaaaaaaaagaaaagaaaaaaaaaagaaataacaaataacaaatcttatagtgtaataaatagatggcagcaacaataaatgatgggttgccatccctgtactgctttccgttgagggaacaatatatgtaccataaaatttagtggttcctgtgattgattaggttggctatattgataaattttacctggaaagaaaacattatcaccatacaaactgtttgtggatggattttcttttaagaggaatggaatttacaatggtgctaagccactggtcaattttgatttaaacaaaacagtcatataattgagctcagtaacaatcatgtataatatatcatgttgtctcttttatcataagataagataagagagtcacaacaactcaactagtggtggcaaaactgttagagagtctaacattattaatgtgtagaaagatgataaaatatataagattaatgaactatttttctcgttgtcaattggtttttaaataaaacctcattcaccttatttcaaattttaatatagtattaaaatatttatatatttagtgattcattaaaaaaattaaatttaattttctttaaaataaaattgaaaatatttttttttttagtaaaaaataaaaaaaaatattttaatttttattatatatataaaattataaggaaattttatttacaccttaaaaatttataaagacaccatattttaattatttttattttatataaaatttatatcttcaattgtactaagttttttttaacttttttctttcaattcatatttttaaaaaatatacctatnnnnnnnnnnnnnattatattttaaatattatgaccaaataaataaaataaaaaattatatgaaattttcttagaaaaaagtaaaaaaaatatatacatgaggtagaaaaaattatgaaaatnnnnnnaaaataagtattgaaattagcataaaataatgtgaagattttttttaaaaaaaaatattaaaattagtttttaaaaattatttaagtttatatttttttaataatgagatgtatttatcattttatgatgtgtaaatagaactcaccaaaaactatatatagaaaaatgcttttcaaacattatattaagattgaaaaaactacacacgagttaaaaataaatagacacacttaacacgaaatataaaatcaaagtgatataaaatatgacacgaagataatacaatgccaagttttgacaccctccagtttcttatgctagctgtaagcttgctttcttttttctattttttttttcctctgtgatcaatgtaaagattttcattcaacggttaaaattttgttccagagagagtgcacagacacagacaggctctgtcataattttgtcctctttcgtggtttatttttggttacatttcaccaaaagtcattgtacccaacgactgctagtttcccattcataccccacattcacaaaccaacaaagcaaaatctgtcatagaatccacggcctctgaggtcatttcgcatttcagtcaaattaacaagtaagacccaccaataaaacaaccaaaatccacgtcttcagcactcactcaccatcgactcatggacttcactaatcactatatcaccataactcaaaaacaacaatttttatttacaaataataataataataaaaggaatacatcttttggtattttctgtggccattctcatagtcaaaaagccttgggccctcatcttttgtaattggtttaactaacaaaatcattgacataataaaatattctagcttagcttgcttggtgaaatcaccttataatacccgccatttttttttgggtttggatttaatgttcatatattgcataaacaccaatcttgaaaatgtctctttgatgtgaggaataagacattattatcacaatgccggagttgaattttcaggatcagagctcgtcgagatcgggcttcagaccccgtgactcaagccccgactctgtcatcttcacgctcgagtcaaacttaagcctcttctcttctgcgtctgctagcgttgaccgctgctccttcgcttccgacgctcacgaccacgattccatcgcgtccgagatctctctggtaaatttgcaaagctcaacttcatactatttttttcatgtgtgtgtttgtgcttgagctgacatttgtgtatacagttcagattcggatcccttgcatgtccgattgcccttttgcgactagctattttggcaatttgtgtgaactatcttccttaacattttgtggtttagtaataattttccgtgtatttgttgatttgaaagtttggaggaacttgtgaagtgacatttctttgttcggtagggttgggagactgtgtttgtatagggctcgaaatagagtttggactgtgatgaatggcgaagtaattgttatttatttatttatctacgagtatgatcgttgtttttcttttgaggaacagaatcttagatgatgaatctaaaggtattggtaaattggtgcagcatcttgcagggaatgatactgagctgcaagagtgttcgagtggtccagatctagatccaaacaaacccactatacagatccgtaagtatagaaaaggagaaaaagttaaaggtatacagctctatattcgtagcttttctccaaaagttttataatagcctacccatgtctttttgcggtttttcaaaatttgagtctcgctcacggattcaccttacaacactcgtcttctttttaaatcaaatcattgtgtcgcagttcatagagatgatagtgatgctgatgtagctcttgattcagctagaagttcgttctccctcgccctcaaaggtattaatttcattcacaatctggtctaagcaagctcaatctcttttctaataataactaaatatgtcaccatttatttgcagagtgtcaggaacggagatccagatctgaagttttagctaagaagtcagacaggcgaagacccgcttctttggatttgaacaatgccactgcttcccctcgattgggaaccatcaagaaggcctccttaacttctcgacgctcaggtaatttccccagtcccggaacaccgaattacaggcatccgagtgtgggaatgcagaagggttggagctctgaacgagtaccgtctcattcacatggtgggcggaagcatgcgagtgctttgttagtacctttcaacaatggaaagacgttgccttcaaaatgggaggatgctgaaagatggattttcagtccggtttctggtgatggagcggtaaggtcttatcagcagccgcagaggaggcctaaatcaaagagtggcccgcttgggcctcctgggattgcatattattcgttatactcgccagcaataccgatgttcgatggtggtaacgtcggcaatttcatggcttcttctcctttctcagctggtgttattgctccagatggaattgcaatccgtcccaatggccatggtggagcctttcctgcacgaacagagccttccatggcccggtcagttagcgtccatggctgttctgaaatgctgagccagtcatcaatgcctgttcttgaaggtaacgatatatcttatgtacaaacaaataattttatagggatcgtttgactcgctaaggaaatgctgggtagtatttgaatttgttaacatatttaaacaattgatttaaatagccttacgccaattagttaacttagtacttattggataatattgtattaaatgtaaatattgagtcaaatataagaatatgagctactccacttatttttaattggttttgagatgtaatcctatgattcttgtcatagtatcaaagtcatgaacatgaactaccccgtaattcttgtcgaatatgaaatttgtttctgatttgagagttttctttgtattgtcatttgttaaaaacaaattgaaacatttttaaaagtattgtacccattcaattttaaacatacagatcaaaatcatgatggggtcgaagattcaggacccaatgtatctcgtgcagtttcaagaagggatatggctacacaaatgagcccagagggcagtacccattcttctcctaaagcagggctttctttctctgattcaaatccctcaatcctgcctttagtggcgttggagagtggtccttcatgtaagtcggaagtcagagatgtgcaggtggatgaacgggtcaccatgacaagatggtccaagaaacataaagcacgaatttctggaaagggttctgaaatctttgagaacgggaaaaagaaagatggagatgctcgatctccagcttgggatctttctgacacaacaaggagcatctcaaagtatgtatactttaatctattatcatgtgcattttcttttacaaatttgctatgacggtcgacatgatgagagacattctactagtttttaaaaaacttgaataatttgcatgccaaagttagtttttaaacatttaatagtactgtgacaattttttttaatgtgtgcaattgattattttagactttgtttaagtattctaaataatttagaatttttttaaaaaattgtgagatgcctattatgattgtaaacttttatgtaaaaaaaaataggttataattttaaatgctggagagttcttaccgaaaggccaaaaatttagacaagttagtaaaaggtgcatttctactaacaccaaaccatgtgaaactgagaaagcacggagaaaataataagatggaagatttgcaagttgcaattaagtaaatattgggtcccttttgttgtttgactaaatcgtaatttagaaaagattttcgggacttatattagtttactaaagagaataggatccttttacactaaaagatacgtggccctcttgagattcctcttaggctaaaagataatttcccaagtaacttatcagagacgtctttgacattgttgacatgttaagctcccttttctttttcagagttaaaagagaggaagctaaaattacagcttgggagaacctgcagaaggcaaaagctgaggctgcgatacggaagctagaggtaaaaatgcttacatatatctccatatatatatttgtctctacttgtgaaaatctcaaaagctaaggaaccaaaagacaaaacagcattttttgagcaactgggctgtacaaaataatggtttgttgggtataccactttatgctaatttaaaacatacatgcataactgttcctcagatgaagctagaaaaaaagagatcatcatctatggacaagattatgaaaaagttgaaatcggctcagaagagagctcaagatatgagaagctccgttttagctaaccaagctcatcaagttcccaggagtaatcataaagttgtatcatttcatagaactcgccagatgagttccttgagtggttgttttacttgccatgctttctaatttactcttattatccagctttatgatattcctccacttgacctacaatgccaggtagcttctccacttcaaaatcatcccttcttgctcttttcttatgctgatgaaaaagagcattcttttctagttaagaaaaaaagaacagtcgagagtgagagcgagtatgaaaggtgtatatagcagtgatcaactagaactttgacattaaatcagtgtccatacagatttttggtgagaccagtatgcgtaactctactactcgcagacacaaggaattgaagattcaaatggtgattctgaagtttcaatgataaaacaatgaatatatgtatgtattgtatacccttctagttattttcaaacagtttgttttcgttaagaaaatgaagatatatggtcggtcaagtggtttaggtcgattaatcataaaaacgataattagtacttgatttctttccaactgggggcgtttttttcttaacatgataattgtttgctaatttgaatctgttgttgcatgaaacatacacatacatatgactgacattttaaacaaagagggatggctgaaaactatctgcgtgctgggcaatactggctcctccctgtccctgctgggtcgggtttgcctcaaattatgggataagttgaaaactacccatttttattatacattaaccaaatataattttaaaataattttaattgataaatatcttcttttataattaaagtaataaatataacctcacataatttatcaaaattagaggtcctaatgtacataatggggataagagttaaaaaattgggtataaattaaagagtaataaaatgaaggtgaaaattaaaataaaaataaaaaatgggtatatagtgtaatttcctttcaaattattctaagacaaacaataaaagttaggggtattttctttgtaaagatatttatggcttaaatacttttattttttcaattttatacacttatatatggtatgttttttatgggaggattaaatactacatgttacatttttgttgttgccattataataaattttgttaagtaaaataccacatgccaatatattaacgatgcaactcatttttatgtttaaaaattattaaataatcttaaaataaataacagtagaatttgaaatattagaaattatgtttttatttatttagtttttataatttaataattattatttagttttttttttttaagttttgaaattatttaataaatttttttatttacagtgaacaattaatcaattaacgcgtgttagtttggtcagatataataagatttaacaaaattagaattaaaagttagaacaaaaatataacatatagtatttaatctgttgaaaaaaaaaaatatgtagtatataagtgtatactgaaaagataaagtatttgtgccgtaaatatcttttctttgtatacttatataagactcgaaaattacatttatatacatgagaattatcatcaaaatacaactttctcatgaagtcttaatcgcacgcggatcaagcctctctttcatgtagctcccacgacgctgatttgggagcaacaaaaatccaactcaaatcaacgaaaaacaccatttatcttcgcaaactaatcatccaaacaaccaaaaacacgaaactagattcattatgaagagatttctttaaatgttgaagataggttacgctttagtaattaattagcaacaacaaacgacaatcaaggagatatccttgtgaacgttcgcgacaaaaaatcaacgaaagacctccattaacgctacatgagaaaaatcaatggaaaaaactatttacacgaatagaaaaattattgatcaagagttacttaaacattttgaaacaaaatagaaaaaataaaaaaagaagcaattttgaagttagtttatcgtggttcttttgatttatttatcaaatatttttattggcttattaattcgtataggttaatgatattagttctcgcacttatgttgtatttaggtaattttcaaaaatttggaaaggaataaaacacataattaaaagtcttggtagtccaatgagaacgagaattttaaaattttaatttatagcactgatattgtcgcactgttggtatgttgtattgacgtcattatcaatgataatgacgtacaaaatatatacgcaacataagaactacatgaaatcaacaaagcaacgttttcaagaagatgatgaatgaaataaagagtgttgactaccaaaagaataaaaaaagagaattgagtttgagtcgtgtatcatcaacaatatcttaacttaatgttctattattttgttatgaagaaaaagtctattttattaagagaataactccaattacaataaaatattactaagtttagtatgagttggcgaaataaattaaaagtttaaagtaattaaacataaactacaaaatatgtacaaataaatatactttgaatacaaaaataatattgatactgaaattaatgcaacaattaaaaaacataaaaacaaaggtaatctacctaaaataaataataaatgtataagatagtccgagtattatgtaaagtgatttgcgcagggtagcatatcaacttttattgatcaaatagtgaaggggtattacaaatgactttaagcgtaagttcgaagccaaaatgcaaaatgaattcggattttttgagagaaaaagtctgaacttagaaaaagagtctgaagatcagaatgtgagagtgaagaaaataaactaaatcagccttctatttaaaggagatgatgactgattatttacaattaaaataataataaataaataattacaaaagtatatttcaagaatattcttttttgttcatcttgctcttggaccattgacagatgccataccatcattggatggttgagattgctcatcttggtttgaatggcggccgttgttctttgagatcaaatgaggttcgttgatcgaatttaggagctttgagacccaaaattcgtaacttagcttgtgatccaattttcgataagaaggggtctaattttttatatgcatgtgagacactcatcgaaacatcatcaaaatgtctttccaatgcacttggaatcctgtcgatccaagttgtatcgagtgagatgctacaaaaacactacgagagttctcaacaacggggtgagcagtatattctctgttgtcaaaattgtaaacgcaagtgcacgcaatcgtcaacaattaataaagtgataaatagagtatcgtctccataggaattgaaaattaaaaattagtttacaaaattaattactcacaaagtggtttcaacaaaaataaaataaattgttgagaatatacaaaaattaacaaacacaaactatgaagaaaacaagctagaattattaaattggcctaaaattgcaaagttgatataatagtgcaaatgagtaatattgtaaattgataatgtcaactaggaatttaaaatgtcataatcctttttccaaagtgtttatggtttgattctttaattagttaacatatttctatacagattaattttaagaataccaatttaagcacaattctttcaagtcatacaaggtaaataa

SEQ ID NO: 17043 - DNA, 8819 bp, Cannabis sativa
tttgtgactaatacttttaataacagatcttttagtgataacataaaccttttcactcacaatcctaaattctattatgactaaaagtaaacaaattttgtaatgaattatgataatgttttttatcgaataattacatattggattaaaaaatgtgcatttaaatctcatcattcattgagttttattttgagatcattagttaaattcacatatatataattaatgattattaatttgttattatttacatgcagctgaatatataggtttcaatgagtctattccaacctttttaacagttaataattctatggactcaaaattaatacttaatggtgtgaattatgcatctggctcagctggaattctaaacaacactggaaaacatttggtatgtttattattaatttattatacatgcttcataatatttttaagtttaattatatatatatatataaacgaatttatgttatgttatgataaatattagggttaatactatttcgaattttatattttataaaagttattaattggacgtaccctttgttttgttaaatagcaaaaatatagatcttatatttttgagaatagtataaatagaatcatgagttcaatttttgacaatttttttgttaatataatcacattgaagataattcctaacacaaacaaatgcataaagtgtaacaagttttattttgacaaaaaatcagtttttgatgctatttatagtattattttaaaaattacatggtctaatttatcatttaacaaaataaatggtcaacctaataacttttataattatagaatctaaaatggtatttaccctaaataaatattatgatgaaataataaatcacattcaatatttatatttatatatccttcattcacatccaataagttacataattaagtttacatttagaataaaataattttgtgataattggaattgagtgtaatgcttcatttcatacacaattaataatatttgacatccaaacacaaatcttaaattataacttctgaacatgctcaaaaatattgcatcaaattatttttttacgatgattttcgaacaaaatttaatcgtttctaacaaacttaatcaagtattttagagactcatcatcatgattattcataaattataatatttattagatacatttcataataatttaacaaatgtgtatattttttcgtatatatgtagggtcagaacatcaactttggtacacaattaaagaatcacagaagtgttatgacgagtttggttaagagcttaggaagccgaagagcagcaagaagacacttaaacgagggcttatattgggttgcaataggaaataatgactatctcaacaactacttctcacgtgatcagttatactcttcctctcatgctcactcgcccgaaacttttgctcttcttctcattgaacaatatcgtaactatatcatggtacgtatatatatatgtacacataatattatgatcgatatacttttctcatctatattgttactacaaaaaattttacttttaaccacaacaagtgctaaaatattggattaaaatttcatttttaaaattaatatttaattacaattatttttgaaagttcatatcaataggtaatatttattaaaatataattcaatatatatattcttgatcacatcttgggaagattaatactttgcaataacttctgctactataattaatgcgataaaatatatgaaatctaatattaaattgcatcaattattaattatcatatgcagaaattatataagtatggagcaaccaaggtagtgctagtgggattgggaagaataggttgcacccctaattcagtggcattttaccaaaccaatagctctaacccgtgcgtcgacaaaatgaacgaagcagtcgaacatttcaacgttaagcttttagcacttgtcgatcaactcaacacgaatttcactaacgctaaattcatcttcattaactctttcgaaatggatggtggtgatcctactactgctggtatgtaattttttattttattttttttaataaggtcttaaattcgaatctcattaaattagacgaaaatgtgaatacataatatgcatagtaatacatacatatgttattatttataaccatatctcatgacatatgataaattttcattatttttgaatttataaataattttttttttctaatactctaacaattcaacgaaatatttgtaatgttacaatgtaacatataaggtaatgatttttgataataaaaataaaaaagatcaataattggtgaaagaaataatttttaagaatattacatttaagtcctccattattttattttcttcctatagtcctcattctctttgtttttattattttcaggatttaaggtttgggatgttggatgttgcccagtgaatgcacaagggcaatgtgttccattgaaaaagccatgtgagaatagagaagaatttgtattttgggactcattccatccaactgaagaagccaataaaatcactgcaagtcgaatatacacagcttttgacctttctaatagttatcctatggatctcagacaccttattaatttgtcattacctccccctccccctcgctctcgctcccgctcccgctcccgctcccgctcccgctcgcgctctggtcttcgctctcatcctcaccctccactttaattaattttttttaattctttttatatgtatgaaacaaaatgtttatattgaagaaaaaaatagaaaatatatagtattgtgttgtatactatattttatatttgttgatcatcaattagtacaaatttgacttgtttagtattgttattttttatatttattttatttaaaaattatatatattcttacaaaaaaatatttatatagattttttttaatggttactctttgttcttaatataattataggtaaatttatttttaactttttattttgtaaaaattactgattatatattttgttaaatggtacattggatgtattttttaaaatagtactaaatagtagcttaaattaattttttgacaaaacaaaaatttaataataacaaaaaaaaaaaatgtgtacgtatgtgctattatataaaataaaaaaatgagatttaattatttttacacttcaaagtagtttttttttttgtatttttacagaatttcacataatgacctacataccaactaatggagcaatctaaatcacaaccaaaattcatatagcaacctacatagaaaccatcagagcaacccgtaaatttgaaaaaaaaaaaagaagttaaaaatggtataaaatttgttattgctaaaattatattgatgagggtttttctctctcttagctcccgtagttctctcgaactggtgccatggcagaggctagagcaataatgtaggggaagctcaaaattactgcaaagaatttaagaaatgtggacctaattccacaagtgtttgaaaaccaaaacaatggaagaggtacttggagttgagcctactgattttacattttactgatgatgaaggggctgggaaatttgatggagctaaaggagaagaccttggaagtcgagatgtcttccaagcacccttgactccacgatcatccttgcaattaatttaatgtcaggtatgggtgacaattcgtgttcgcaggtcgtgttcgtgtcttatcgagactcatgtataataggcatatgctcgacccgaacacgatccgtttaataatcgtgtcaaaaaaatgaaaccagaatacaacccatttataaatgggttgacacagcacgacacatgtaacccgtttataaacatattttgtttaaacatgtcaaccaataacacgtttgtgaagtattcaacgcgtttataacccttttatgacatgttaaagtactaatataactttaaataggtcattaacaggtcaatttcgtgttagccgtgtcaacccgaacacgacatgtttattaaacgggttagacgagtcaacccgaacacgacccaaacccatttaagaaacccaaacccactaaattttgtgtgagtttcaagttgtattatcgtgtctgacccgttttgctagccctaatgtcaaaaagatattcatgctaattttgccaacaccctagaagcaaatcaacaatgttcaaaaattattgctcaaggttactcttctatccctccaatacttagatctggtagttttgtgaggaatttagaaaattcatttgcaagttttgtgagaagtaagaagtttaattttacaatggaggacattcaagaggaaatttcttattgggagtctttgattgtgtgctacgtactgggagcaaacccaccattaatggtattggaagcatttgctagaagagtatggaaagataaagttgataaggtcaatctcttagcttattgtgtgttcttaatcagaatgcactctgatgacattatcgagaaaggctataccttcttcaatcaaaggccaattgttaggcctgggacccaaacacgaattttagtaaggaggatattcgaacgattccaatttgtatgatctagaaattaaatactggggtaaaaattttgttcaaaatttttgtataatgcccctagccaaaatagttggtattggaagaaaattgtggaacgcaaagagagagtttaacttctcatggatcatgtttagttttcacttactcactatacaatctttgtaggatacaaattgatggatgatgctgggagtatgttcattggagtaaggtagtttgatgcaaattgaatatttctaaacacaattttctgttgtgaatagttattctaaatagactcaagatcagagaaagtattgttggaagactacatcataaagtatcggataaaattataaaaacgtagattatatgtaaaaatattaagtcatatataagaatatgaattacttcatttatcattaaattattttgagatgaaatttcataattcttgtcataatattaaaagtcatatctctaacgagttttcgatcaacgcctatccaatgatcattttagaaaatagctagcaaagattagttattatgttattaaatgatggagcactatagtggattacaattcccaacacgtatgtaactcattagaaaatgaaatatcacttctagttaggatacaatcttttcctcctctttttatggatggacttataataatattatataaaagaaaggataataaagatatgaaaaaaaaataaaataaaaacatatatattatatacatatataaatcccactttcaaaaaatgatcttgatgaggatgagaaaagatgtaataaataagtatatgaaaataaaaagaacaaaatacaaatacagctatatatgaaattggcaagcaattaatatttaaaaataaaagaaaagaaaaatgaaattaacaaacaaaaaaaagttatattttcccttaaatttatgtcaaaggggtttttcacgctactaattaaacacttctcatagtgttatagcaggcgtttaaagagtttttcgcagctaaactttttcaattattgtttaattattcgtatttaatcatctaattaaacttaaattttggctgtaaaatcttctaaactatcgaactgttaacaaatttaaggtatcatttagttaaatgtcatcatgaactgcttatgtatacagtcttgtacacatgacacgtttatattagtacaactattatttcaaaattcatttaaaattaaataacataaaaaacaaaaataaaaaattacattataaattttgaaataatttattataattttaataataatataaggtgtaccaatataaacgtgtcacatgtataataatgtacacataaacagtccatgttattagcagttaactgtgaaaaatagataacatcttaaatttgttaacagttaagtagtttggaaagttttaccaccaaaatttatgcttagagaattaagtgcaagtgtaatgatagttgagagagtttaattagttacaaaaatatttatgttaaaatatttaattaattaatgagaattgctaaaaaagcactattagtgcctagcaccttggtgtcataccgctattagtataattaaatatctagtcttatgtaatttaagaaaataacttttagggaatatcgctaaccagtcgtgaccacctataaaaggtgatgggcaccactaatgcatgcccaatagcaatactcttaattaatacatacatggctcgtttggtacgccgtataagagttgtattgtattaaataataagtaacattatgtttggataaaacaatgtattgtattaattattacgactaatttttttttttaatacaatggatgttctattatttaatacaaaataaatggtctgtattagcttgtattataatatttataaagaattcggggtcaacactaatctccgaacaggaccctggacccgggacccagacctggacgtggaccccagacctgggacccagacccaaaccaggacctggatctggaccaaggacctaaacccggacccgggacccgagactcgaacctggactcaagacctgaacccggaccgggaccaggactcggacacgggacccgttcccgaacccggacccgttcctggacccggtatccgagacctgagacatgcaacctgcgacccgaacgcggacccgacccgtagttagtattggggtcaagtatattaaaagtatatattataactttacacaatctattaatataagtcaataccaaatatagtactgtattaaataatactaatatacaatacaatccaacacaattcaacataatacaatataatacagcgtatcaaacgagttatataaacattaattattgttatatatatatgattaaatattaattggtcaatttattagccatctcaattattaaatttatattatatagtgtcatattgagcaagttggccataagacacataccaaattattattaaactcaacaatcatcatcattctgttagcttacataattaaaataatatttaataaaaaaaaaactatatctatattacctatggctatgatcacatcactatgattattatatgatttttattattctatatataatattaattaatcatccctatatatatggtatgcctatagctccatattattatcaattctcagccaaaataatgggtatgaattatatatttataaaaatattggtaatattattattaatattattggataaaaatggtgttaatggagaagaaaatgtgccatgttttttcatatttggagattctttagttgacaatggaaataacaacagacttccaacctctgcaaaagttaattataagccttatggcattgatttattatcatctcctgatccaactggaagattttccaatggtctcactcctgttgacatacttggtatatatatatatatatatcttctctcttatatattcatatatatatatatatgtatgaacaaatttatagtacacttgctaaaagaaagtgtttttgtatattgattatgtgtttgtgcattcaggtgagtattttaatctgttttttttttctttcaaaaattatgtattgtattaattaattaatgataaattataatatatatatatttataggtgaacttttagggtttgaggagttgataccaccattttcgagtgcaagtggagatatgatactaaaaggtgtaaattatgcatctggtgcagcaggaattcgccaagaatcaggccaacatttggtattattaataattatatatcatcctaaattttaggaatttttcaagaaaattttacaatatagacattatttttgtttttattagtaaaaatttctctaaatttttttagtattttgataaataataacttaattttttttatacatacaaaaatatttacataatagatatttatttatttttgaaaaatttaaaataatttattatgtcaaaaataaaattaaaaatattacattgggtgtttttttaatacacttgcaattgaatattttgaatttatttttaggtatagtaaattatttataaattttaaaaacccggtgaaatacccattatttaaaaaaattatagttttaaaaaaaaaattctctaaatatcaaaaaaatacagataatccattaattaactaggacaaaaatctataattagaacgagcacaatataaaaattagacaaaaaagatctcctgatttaaatttaattttccaatatatttatatattatatattacaaaaatgagaagtgtattgtaatttgtacgtaataaattaattaattaattaactttctaattaatcacatgcatgcatgcagggggcacgtgtgagcttggataaacaattatggaaccatcaaataacaattttacgtatgaatcacattcttaataataaaaaatatgataattataattataattataaatcatcaacaaaagattacttagaaaaatgtttgtattatgttggaatgggaagtaatgattaccttaacaattatttcttacctaaaatttactcttcaagtcatatttatacacctcaacaatatgcttctctcctcatcgatcaatatcaaaaacaaattcaggtattaattattaattatatcatat

SEQ ID NO: 17044 - DNA, 8463 bp, Cannabis sativa
aaaaaaaaaaaaaaagaataatctcattaaatagctcttaaaaatgattgttaaattttttaaactattgaataatttttattttgttttttttttcctgttatttgtttactgaaaaataacaatgtgtttgatatatatttaatttttatttttattttaaaaattaacatttggtaatctttatttttatttaattgatgagagagaaagtaaatcaagagaaaatgaggtgagagaaaatgagctgaatactaactaaaagaataaaacatagaatagctagactctaattaaaaaaattatttgaataaaatttgaaaataactttaatgttatattgtaatagagtttacatgctacccaaaatgtacttccataaaaatatatttgaaatgtatgctattttttttaccatatatataccaaaaatactcccatttgaaaaatcaaatctatcatgactctctcattctctagctcttttgaaatccccaacaactgacgacgacactaccctgttagagtttatgacctaaaaaatctgcaaaaatatttctaattgttaaataagaattagatattttgatatatgcatgaatgttaaattattaacatttaatattgaataatttatatataaatatgaaaaaaaattcttaattcataaatgagactacgacttgtagctatacagagaaccaagatcacttagtcattaatactgtgaacaacatattaagttataaaatctttaatcaatgcttggtagtacagtttattgatgcccgttctttggtgcaagtaatctcggttcgaattactgatgtaggatgacatctaagtaaatgtgttatatataatagagactatatatgacaaggaccgttatgaataaagttatctttatcaaatttactatttactataatgacctaattcataccataatgatgatgaatagagatcggcctaaattctaagtaatcatgaactatgttattagttttttttattcactcgttacagtttcttagagaagatgattcttacaacatctattttgggaatctaataatgtggatgggtagaaacatgatctacaattatagaatcctaactttcttaaaggatcgaatgttgattccctttatatgttgattctagaactagaaagttgcgcgcacgtttagatgggatctaaattatacttccactagtaaattaatgctactaaaggataaatgaataattagaagggtaaaatagtaatttgatcaaaattaattacaaatcaacataaggagatttaatcactagaattgattatatccatgaacactgcagtaaaactcagtaaatataattctataactactaagagtttatttctatatttatagaggagtaatcatgaaattaataaacaaagattatttagtttatgagactcaataaataataaagtttattggagcttagaattataagtccatggaccccgaatcaccaccttaaaacaatatcaaaagtagagataaatagtagtataatgttattcggaaaaatctactttgaatttgtaaaatagtaattatttattttttgtaataaataaataatttttcaaaataattaaatagggaaaaagataaaagttgttaagataaaatttgtcaagcaaataattgttaagacaaaagttgtcaggacaaaagacaccatctttatctcaattaagacaaggtagactcgtacattaattaattaattaatttaattagataaatatttgaatttaaaaagttgttaaagacatttcaagttggttgagatattctgtcaagtggttgacagattccctcatcagaaatatcagtaactgaatacgattataaaagagtgagataatgagagaggaagagacaaagccaaagttagagttaaagagagcgatagaattttcaaatagaggcatttttggtataagatgaaagaatagcacaaatttaaaatgtgttttgtgggtgtacatttttggtccatgcacatcaattaagaatgtaaacccaaatttcccaagataaatgagtcgaattacgtgaaacgtgacataaacagaatatttaggtgaaaagttcaagatacgatctgtagggtaatctcatccatcaaggatcataatatttatgaactaagatacttcaatattctcatgctaaagaacttcaacatttccacaaagaattatccaatagcttaaaacattatgactgctaaagatacgactcaacaataatatgactgctcaagatacatcttaacgaaaattaatctagtcaaatcccacctttttatttgattattgacagttatttattaatgaatcgtctatttaattgcatatgtaaaatatgggcattaaacccacttcttgtaatgtcctactaagatgagattgaataatcgctatgttatttttataaatagggttcaatctaagggaaaggaatgacaattgttagttaggaaaactttgctaaaaattgtaatcaatctcaagctccaaaaataatattaacttgtggattaagtaaatttaattacttgaaccacgtaaaattaaaattctgtattctattatgatattttattaagtaatgacaattatattttaatttattaattcaaagtatttattattatactctcatttttagttgacaaaattttgactctaacatttaagaaaattttcacttttacatattaaactctcactaattgaatgttcatttattttgtattctaatctaattttttttattattatattaatgagttaatattcatttcaaatttagagtataaataatttattttaaatattaatatggataaaattttatttacaattttagtatttattactagattaagatttttattcctcaaactattaccactaccaaatttttctcattgaattttttattctgttaaaagttcccttgaaatgcacaatgctaaaatataaaagctctattaagtttatctcacttggctaataaaatgctaatgtggccaatgtgtcattgtctgatcaatgccacatatacaatttaaaataatattctttttagtaattattaaataaaaataaactattttcaaattttcttattaattatttataagaaaatattcttaaattcattaattagtttttaaactacacatatgacccttatgtggctatgacttgatacagcatgcacatcattattgtgttaacctaagataaaacttaagaaaaattatatttcaacactatcaatagttcagaggatatttttaacgagtaaataaattcagagagtacgattgcgtagtacattacttcaaaaattgtcattcatgaccctcaaaatttgtcatgtccctttttcatgtcctcttaatatttaacaaaatattgagggatattaaaggagtatgttttatgtcctgcattattggtcatgaaaacaaagtcaagatgttaatagctagacgtgaaaaagtatccccgagtaaaattctttttcatatcttacattattaaatgtcaagtgtaataatttatatcgtattattataatattaaagaatctatatatttaataaatataaatcaataaatttaaataattctcaaaatttaaatttttatatataaaaaatattaattagaaattcatgaaaataacatatttttaaatttaactatccattgaaattatagtaaattttatacatcaaaatatatttacttatatatatttgaaaacataaattcattagcattatagaaccgaatttaattattacagattaattctacatatgaattataccaattgcattatacttcaaattcatacacaacaaaacaaataacatactaaaatacatgataaacagaataaattatacaaccgcttaacatcacagatcctaacattagcactataaatctcactatcaatgaatccacaactgcacgaatacgatcggcacaagatccgtcacctccaaccccatattagcaaaagtaaaagcaaacatagatggacccaaaaggttaaacatagtctaaatcgagcaataagagagattttatgagactagctatattttgcctttgtcgaacgatgttgtttgcattagtcaccaaccatcatcggcccctgttggtcacttcagttgggttgaaatcaccacagacatattcgacattgttcagtttgaacaagtaattggattcatgaagagtttctttattgtttagtcattgtctcatcatcattttcatttgggaaatcctagatattgcgggggtgttaacattgacaagcttccaatcaactctattcttcaggccgggaatgtattatatcaaatttgcttgggatgcaagtatgaatggtttactttagtaccattcatgggcgacgtagacactagtgaaaaaactattactttctgttctattatcgtttgtgtccaccacttgcacctaaaaataataacactataatccttcaagtaagtaaacttttactcttgtttgagtacgccataaatttttttaccaccttatccaggcaccaaaataccactattttgggtgttacaattgtcatctgatcttaaactaagaatttaacaccgttaacaatacatccaggataacaatagcatgctagattagagggatttgtgatggtgtacaactcaaccgatacatccgtagggttatttgctatatgatttgattgatctatcattgagtgaaatatgtaatcaatactagaacaagaaactgtattttaatgaaaaaattaatagaaagtaataattactcgagacttgaactaactgggaaatacgttcttaaattgtgtaaagattttgatcacccctaagttgtagctcgttcttatgctgactacacataaatagatttttgtaaaggaatgtcatcggtgaaaagaactaaattaagaatgcaaaaaatatcttagtgatatacttctctacttcattacaattgtttagaatgtactactctgtcttaagtttttcttgcattgataaagaaatgatggtcctcttaccaatgggtctcccaacatgcttgaatatagagaattcccttttaggcttatttgagaggacaccagcatttccatctggtcggttaaactaagtttcaacttcctagaaggtcatggaacaaaagcttaatgcctcgtttattgcacaagcttcacaaatatatcttgcagattgagatcgatttttttacatattatttgtatatggatatggctcattcaattggatacaataatttgaagtgcactggtccctcaagcatcgcttgtttaggtaaatgcatcaccaagtgaaccattatgtcaaaaaataccagtggaaaatggtttccaattcgcaaagaatgtccaaaatactttttttcctgttctgcaagtcttcaacattctatgtcttcaagcacaatttttagaaaaatacacacagttcaattattgtaacccatacttctttctttaaaaattttctaatgctccccgacatcaagcgttataacaacacatatcaatcgtgagacttcaagccagaattgttttcttcggtctcattcacattcttctctaaatttgaagcaaatttatctaggaacttcacagacttaataaatctgtaaaattcacgccattcaagatgactaagtgtgtaactagtaggaagtttcttccaatttccattgtagtcttcgaacaaccacaactaacgacctattttgaggtcttccaattccaatcttgctttctttggactttccctcaatacttaaaatagtttcaaatatattgtcggaaacatttttgtcgatatacattacgtcaagattatgtctaagagacaggtctttctaatactctagttcaaaaaatatacttatctttaactaatttagctcagctacaaaacgtttatgcttgactctaagttgataactttaaaatattaaaaattaaattgttaactttaactaatagaatgattacaaatagttattaagttaaaaaatttggaaacttgagatgataaataatttattaattgctaatattgagaaattagaaattttaaaataaaaaaataattattaatttaaacaataattgaaaatattaaaatgacaatattatttaatttttaaaagttggtaaatatttttacttagtaataaggttatattaacactatttataattttgaaattgacataaaaattagtaggtggtaaaaaaaaataacataaaatattgtgagagagcaaaaaataaaattcttatctagacttgatttctttagttataaatcaaagataggatagaacaattctatttgtattatcacctagttataattttttttataggcacaattttctttaaatccgtttggagaagttgagttagtaaggactcttaattatgcttctctgaattatccaggacttttttttgtccgcatggatagtttgggcttgttatatacccatagtgtaatctgttattcatttaattatttttttactaaaaattttggtacgtcatctcctcgcacattcatagttttcttacttatgaaaaatgtggagaggtgttgccaaaattttgacaaaaaaaagcaatcttaagagcatagattgtactatatgtacattacaaatatgaatgggataagttctttatccttttagtaatggagtgggaaagtagattaggacacgtgcacattttgaagtttgttttgaactttctctttttatattatgtagaaatatggtgagcgacaaaagttggataactttaaacagacagtctgtagagtttcgcaggggtgtggatgagtttattggagttgctcaaatgcaaataaattctgctggacttactcgattcccttgcatgagatgtttgaaagtgaacttcgagactctagataaaatttgggtacatttgtttatgcatggcatccaacgatcgtacacgacctggtactttgatgggtgtcgttcatgcgatcgactgtagaaatagtagacaacgatgaagaagaattggagatgtgatgactgatattttaagagaaaatcgtggttttaacgatacaagtactactacaaatttattcaacgagcccccactaaatggtagtggtaagtatgacgatttattcagggatatggaaagtgaattgtacccagtttgcaaaaaataaacactcaatgctttgctgaagttgatgcactacaaaattctcaataagttgagtaactatttatttgatatgttactctccatattgattgagttatttttggagggtacaaaattactcaagtcccattacgagttatagatgaagttgtataaccttagtttaggttctgactccattgatgtatgcaagtatcactttgtgttgttttggaaggagaatgcgaaaaagtatttttgtcttatttgtggcgagagtcgttggaaaaagaaaaaagaagatggaaaaaaagttgctcgtaaagttaattttgcagtactttttcctaactccgagactgaagatgtcatatagttcaagacactcaatcgaggatatgttatggcatcactctaagagagaccaaatgaagatggtgtgcttagacaccatgtgaatgcagaggagtggaagcaatttgagaggcgccacccatccttcgcacttgaacctagaaatgtgaggttgggtttggccactgatgggtacaatctatttggtaacatgagtaactcttaaagtatgtggattgttattttagtctcttataacttactcccttggaaatgcatgaaagcagagtcgttgatgttgtctctattgattccagggtgcactacacctagaaaagacatggatgttttcatgagaccattgattaatgaattgaaagagttgtgggagttaagtgtccaagctcgagatgcttactatgggactgtgtttataatgcatgctactattttattgaccattaatgacttcccagcgtgtaacaccctaactaattaggcatgttagcgtgctttttaacgtactgtgcagctcgttgctaattaacgagattaatttgcttatttaattagaaacataaagtagtatatttataaaatcttgggatcccgtttacaaaatacatttacaaaagtttgctattcatataaaatagttttgtcgcctaactactacacagcaaaagccctgatgtcccaaagatcgtacgcgccaggcctaaccgccccgacatgtacaatcttcatttgctcgccctcacggttgctcagc

SEQ ID NO: 17045 - DNA, 9753 bp, Cannabis sativa
  modified_base (3825)..(3827): a, c, t, g, unknown or other
cctactattttaaaagttttagtactatattctcacaatttttttcgtttataattatatggtgagttttattcaattttatcaatatatttttgttttaaatataaacagaaaatacatgtaataataaaattacgatttaattttttatgctttatatttgaatgatttatatagtttaaatttgaatttatataaaattatgatatatatttacttaaaaaataaatataataatgatatagtaaaaaaatatataatatatgttcctaaataatttgaaatcgataaataataataaattagtttataaaaaatcataattcaaagtattctaaacttatttctatttatctttatatatatatatccaataataataatatatattaacaataattgatatatttaaatttcttcactatgttaaatagtgaaaatatttttagaaaattaataacttggacagttcaatcaattacatatttataacactaattaaatataaaaaatgaattaaaggctcataagagtctaaataggattaagagactagattgatcagaagtttaattttgtgtgcgattatttataaaacaaaatatttatgatctatgattaaaggatgatcatagttctttttgaaaatgaggtgatcaatcttaatagaaattttaaaattttataaacaaccgcaagcaaagagcagtttgtttcctagttacccctataaacaccatcaaatcatgatcctaactttgaagccaatatttgaacaaaacaaaaggaaaaaatcgatcatactcgattgaataatcatcccaattcaagaggtgttaataacaagttatgagtttattttattattaaaaataatggtaaatttggttcattattatttttgtttagcgaaagggtaaatttagttttttagctcataaagcattcatgccaaattccaccattgtaaattgggttgagcaccatagtaacttgaaagcaaaacgcaaatttagtttagagaaaacacaaaaaaaaataaataaataatataagtcaattgggcagctaaagaggctaactcctttatacaagttaaacattcagatccaagtatgagcaaagcaaagctggaagtaaatacattatgtttttcaagaaacaagtatgcagtcaaaagaaacatcaatcttgcacaagagaataagacaacagcagaccaaattggaaaatttaggtctggatacctaagcgctccgtgattaatgcttaaaggcctagtccaacagtacgcccatctctcctgcgcagcccagcagtgtattgcctctctaaatccatctgcagttccttttgcttctcggattgaaggtcgccaccttcttggttttctggtttgtgatccactttcggttcgcccttcacaccctacaattggccataggcaccaaggcaaactcagactctaaaattgtgtcagtaggtgaacaaactctaaagggagtgagtcattcaggcagagacaagggaaatgtagaattttataaccgacatattattgtaaatggtaagcgtgatggagatttaccatgagtttattaaatttctcttgccgttctctgtcagtaaaaagagcagtatcccagcggaccagactacaaatattgaaaagggcatttatcagaaagagcagcatttttcaaaaatggaaagagaagcagttacacgaaagaaaatgatgacctaaatgctttttacaataatcaagaaacctaatttaatattgatagatactattgaagaatgactgctacatatctaaacctaaagaatttgatttgcataaatgaaaagaagtcatacacatacttcttctgcctttgtggccttcttgtttccccagagcagctttttcttttggtcagtagtcatgaatcccgttcctacccctccaacaaggttcttattcactgggtgtgcaaattagcaacaacacagagattaagaagattaagatattaagaagattcatgtagttgatcgataatgtataatctattggcaaacccacaacaatctaggtcaatagataattaaccataaaataggttgttggacacaatactaaccataaaattaatgattctacaatacaaagaaatacagtagctgaaagtatcagatcattaagaatgcatgacatattgacaattataggccgtgttaatttaccgaataatcataaagaataacagttaataaataagtacatataagagatgccaattctactatcatatgagagaaatttagtgagaactagagtgtgtacccaattcagcagctttcatggcagctactttagcagcatttatatcactagttatgtcggaattagcctgtgcagtcaatttggcattctcaggttgcttcgaactagactcctttacatcaggcatagttgtggactttgaaactaatggagtaaatgtaaatcagccaaaaagaaaggagatgatattttaacaagatataaggcataaatttttcaacataataacaataataataccatttttcaagctagcattgtcctccttcaagctaaacttgggtctttttgaaaaagattcttgattttcactattgataacagatttttctacaaactgttctgcagattctccaatacacctatccttgctccttttagcttccacatcatcacttcttcttccttctttcgtgagtatcccaccatcactctctttcagctcactcttgtaactttctttactgtgatgtttaccatcatctcttctgaaagatgaatcacttcgatgccccttaaactcttcatttgtttgcatccgatcacctctgtaatctccagaactcctaacaaaatcttttttatcatcttgaccatccttttccattttacgtttctcccttctagtatcttcaggatatgcttgccttctgccagattctgccttatccatgctcttataagaagaatcatatttatctcggaaacttttctcactatttcgaaaattatctttagatctataattgtcaaaatgagtagaacctcttgattcccgaccagaacgagaagattgcctatgatgctttctttcttcctcatccgcatgtttgtcatgtctgctgtaatcatcatgcctagaatatccacgagaactcctggagaactgtctatcagaatgtctatcggtatcactacccctaccatagttactcctctctgaatctctgcctacttccctcccatcatccttccttcttgatcgaatttcatgaactcttccaggatcttcccctgaatattttgggctagtgccatagtcatgttcaggactccctacagaaatagaaaagctatataaccaccaaaatgtacgattagcaatgaatcaatacagcctacctataaatttatctacaacatatatatgcactcttaatggatattacccatgaatgggtagtattataaaattttaagtttttatgcttaatttttctatctaattaaaaaaatctctaatttttacattatatatattggaattgttccaagaaaaaaaataaaaaaaaaaaaaagctttacgacaaaaaaaaaaattatgttgacttaaatattttgtatacaaatatattttgatataatgtaaaaaagagatatttttaaatttttttaattaaatagctaaattaaacataaaaattcaaatttcctttttattattcgccattatcaaaccctaatggtttcatatttttaaaattaatatttannnttaaatttatttagtaactatcaatgggtaatattcattgaaaaatattacatatatatgtgtgtaaattaaaatggtatattgtgaaccaaatctacaaaataatccaatcaagagaacagcaacttcaataagaaactatgttctaaaaaatataaaaaaaaaataagaaactatgttctcatttctcatgatgttaccgtaacaagtaccaacacaagctacatgcatgcaagttattagcccatctagagagctgagtgatagcaagtaatatagctcttttaataataactaactttggtttagttagttaaaccgtccagattagttttctgtcagaattagttaggctttttttctctgtcaatttagtttgttagattggcagttagtttcaattctagatttgtattaacctttgtactcattataaataaacatcttgatcacacattctggtcaagctttccactatcaattcatttcagttttctgtaagactccttgaaacactataattcttcatggtatcagagccattttgatcatgtcaatggactcgtcctcttccgatccaccaacaactgtagctccggtagtggctcttgcccctccgacaacacaaatcagcaatggaatcccttctcaaattcactcacttctttaactatcaaactcgatcgagtaaactttcttgcctggaaatcccaagttgttccgaccgtgattggacatgatcttgatgagatcttgtttagtaatgtatctcctcccaaaaaattaatcaatggtcaaattaatcctctcttcttgcaatggaaacgtcgtgatcaactccttttgtctttgcttcaatcatccatgacaaaaggaattcttggtactatttttgcatattccacttcctatgaagtttggagagctctcgaacaaaaaatcgtagggcaatcaaagacaaggcttcttcaactgaagagtcaactcaccaacatttagaaaggtaaagataaaataaaatctctctatgacaatcttgctataagtttgatgtacaatcagagatcaagatgtagacttaaagttgaatatgatccgattgtatctagtattacttccaaccttgaatccaagagtcttgaagaaattcaagctctgctaatggctcatgaatgcagccttgaaaggcatcattttgtagctgatatttcaaacaaaatgtctgctaatctaacaacaaatggtccatgaaatgggtcgaatcagagtatcaaaagccttctcaatattcaagaccaaactatggctgaaactactcaagataccctccaccaacaattcaaggcctatctatcaagtttgcttcaaaataggacacactgttatttgtcattacatatatgacaaatttactcaatccatgaaaaactcagggattggtaattctacactttctagagccttcctaactgaacaagaaccaactaagacacctgatccacaagcatattcatccaaatctatccctgattttggagatgattttctctagtatgctgacacatgggcaacaaagcatattgcaattggaatgaaacatcttgatcataccacttcaaacctggatctgaatccctaacagttgatgatggtaagaaacttttaattaatcacataggcccttctacaatcccttctaccacagtacttctcctaaacttaattttgttttaattgttcctgctatcaagaaaaatctggttagtgtatccaactatctaacgacaatgatgtatttcttaaatttcacaaaaattgttgttttgttaaggacaagaaatcagagaaggttctacccaaagggaaaatcaaacatggcctatatgtgcttggggagggatcatctacttcaacacttcagtgccatcttgccacaatttccaattctgctaaggatcaaagttctagttgtagtactagttcttcttcagctgattacaatgttcaatgtaataagcatattgttgctcaaacatgtgcaaataaatgtaattgtaatcactcttcaataaataaagattctaattttgctattaaaaatcctcaagagtttttctctcgtgctagtagtgatataaatctttgacatattaaacttggacatccatcacctcaaattcttcagaaaacactctcatccctatctattccatgttttctaaagcaattaaaattttgtgatgcttgtcaaaaaggaaaaagccataaacaacattttcctctctcaaacagtcatgctactcaacccttacaattactttacaaagatgtgtggggaccctctcatacaccttcaatagatggctttaggtactacattcattttatagatgacttaagtagattcacttggatttttcctttacacctcaagtttgaatcctattttgtgttcttaaaattcaagtgcctagtttagaaacaattttctttacctatcaaaactatgtaatttgactggggaggacaatttagtgtttgctctttttttgcaggctcaaggtattcagttccaacatccttgccctcactctcatgagaaaaatggaagaactgaaagaaaatacaggcacataacaaaaacttggttaactcttcttgcacattctggtatggacttatcttattggttgcatgcctttcaatgtggagtgtactccctaaacagacttccaactaggattcttgacaatattagtccatatcaatgcttcttcgaaaaaacaaccagactatgcatctttaaagccatttggttgtatttgctatcctcacttgaggccatgtaattctcacaagttggatttcatgtctcaaccttgcagatttttgggctactctcctaatcgtaaaggatacatttgtcaaaacgaagaagacaaaatatatattgctcgaaatgtggtctttaatgaaacacaattctcattcttacagctttgccacctattcaggattctcctcaacacaccagtgccttgcctcaagctcaatttcaaacaacttcaactagtgtctcaactgccattgatccagttccatctgtgcaaggggaccaacctctcccttccaatgcagttgttgacattggttcacctctatctatagatacatatgagtgctcccctatgaaaattaagccctcatcaccacctgttcccattgaaactgttgttgttagaaatcccaaatggcatgcatcaatgcaggatgaggttgatgccttgaaacagaaaaagacagggactttggtacccacttcacctaatatgcaagtcatcaccgacaaatgggtgcacaggattaagttaaatttggatggtactttagataggtccaaatctagactagttgctagggtttcctccaaacaccagaagttgactttgaagaaacattagtctatttgtcaagcctgctactgttagaacaatgctcaccattgctatctcatatgattggattgtaaaacaactaaatgtcaataatgtctttctcaatgacactatgaataaagtggtatatatgcaacaaccaacaaggtttgtaaatccctccaagccataccacgtttgcaaactaaagaaagcaatctatggtttaaaagaggctcccagggcctggaatgataaactcaagcacacattgtttcattggggtttctagcaatcaaaatcaaatacctcatttatttttgccactaggacaaatcttatacagcttctggtttatgttgatgatttcctcattacagggccaaactctaacctaattcaaagactaatatctaatctgaactcaaatttccccctaaaaggccttggtgacattcactagttccttggcattgaagttcgtagaaataagaaaggtatgtacctttcccaaactaagtacataaccgtgctccaatcctacaatttcagctcacaaactcaatttgtcatctaggggccacttgaagacatcattcagatagaagtattgttggagccttacagtatctcacacttacaagacttgatgttgcctatatcattaataaactaagtcaattcattcatgctccaacaacagttcactaggatgccacaaaaaggttacttcaatatctcaggcattaattcaaaaggcttgttgctcaaaccaactatgcaattgtctctctatggttattcagatgcagatcgggcaagctgtcttgatgatcgacaatccagtgatggctatgctatgttcttaggtgaaaatttggtgacttagtccgcaaagaaacaacctgtagtagctcgttccagcattgagagtgaatttaaagcgcttgccaatgttgctgcagaagtaaaatgattggtaccattgttacctgagcttcaagtttcccttttggaagctcctattctgtgggtggacaatcagtgggctacttctctagctacaaaccctatttttcatgctaggtgcaaacacaccgagatagatatacactttgtttgtgacataagtgacattgttgcacagatgtagttactaactatttttaaaagaaaaaagaggaaagggggaggaaaaaacaaacaaaaaggctagagaagaaatgtcaaatgactgcccgcttgagatacttcaaagattagatgaaaaaataacacactaagagttcgtttggtatgccgtattaggtcgtattgtattgtattaaattaagttatatatcatatttttgtataatatgttaaattttaatttatactaaaatatcatatatttggtacaagttaatatcacatatagttttacgtactatacaattcaatgtaccaaataagccctaaatggttttaccacccaaaaataatcacatcaactaagagaattgtagatagcataaaagagaatcagtgcttaaccgcatactaaataggaacactgacttctcctggatagctaaactagaagatcctatactttaagtccttcaaagaaaaccccaaattcaaaaactcaccatcagatgaagatctgctaactggagaatgacgcctatactttctgttagcagcatccgtagtaggcttgcggaaagctgttttaatatcggaattgtctggggacgaagactgtaagtttgcatccatggtatcaacaacctacctcataacagcagcaaaatcattttcatgagcgaagctatgaactgtaatttttctaaattaaatttttcatcgacatccaaaaattccgaatcgataaaaaaaaattgagagaacatcaatataagtttacttagagaatgctaatcaggaattcattttcacttgcaagaatctaaaatttcttcgaaaaccctatgaataaatgtatacaaacataaataatgaaatgaaaaacaaagagtatacctgatagcgatgaagagtagggaagcggcgaagtgggtttgccgtgcccgaggaaccaacaggagcggcgagagagagagaaaagttagggttttataagaaagaaagaataagtcttcagtgaagaggaaagcccggaaaagaatcgggtgtttttggattagtgattgttaggcgaaagttttagacaaagagaagaagataaacaagtcgaatagagaacgaaatagggatgacggactacggagaccttcaactattcttgcaaaaaagaatcaaagctcaatcctacaataatttgcaatcaatatccttatgctatcacacaatttgcactttgatccctcatgcctaaatttatatagcctcattgttttttttttatttttttttggctaattaagatttttacccttgaattttgacatgtaccaaatcatgctccctgaacttttaagatcgtt

SEQ ID NO: 17046 - DNA, 4059 bp, Cannabis sativa
ccgccgctaataacctattgcggccgattggagggctattagcggtggagtggtctgccgctaatagagtgatatgttgtagtgtgacggttgtccggtgctcagtcgagtttctccaatatacacctagctagtatttctagtttctaagacaccaaatgtgactctagtgagggaagatgtaattccagttccccttgaattgacattggctagaaggaactatatatggattaccctaaggtggtagtcgtgtgttagattctcaacccctaagtaagtgagaatttggacattgagatctgttgccattgggtcgtgtggctgggtggattgagatttccttgtaagaatcattgttaaaggatcaaaattttttgaaggatgaaactgtattcctttgctctcaatgaaggcaccaaaatattgacctcgcttttagctaacgacactgagtctttaaagcgattgaattgaatgaatcataataataataataatgataaagcgatatgagaacataagaaatttctagagatttgaccctatgataatggtaatagcctactctcattttctttgtattacgtaaagaattattaagatcacgaagatctgactaggtgagttttttaatattctgtagaatgtttacaagtatttattagtataatagctatctaaaaagttgaaatttggatctctaaataatggaatggctccactatacaagggtgtgttacccaaaataatagaaaaagaatcaaaaactaaatattaattcccatccatctctcggttgtacaaatcaatcccacaagtataaggattctaattaagctataattatggtaacatttaaggaaaatatcatagaaaatctctaaatgtcgcatccttctacgcagataacgatgctcaggtggatacacgtattctgctcagaacattgcgaggtacaggacctgttcggattctccctgctgaagaactagactttgacgatttaaccctgaattgttctagacggaacctcatgtgagtatattctgttcaagtcttaaaatgaactccacgtgtcaccctattgagtgccacattaccctgtacgaaaattaagataacaccttccataaaagggttaaataacctattatatacattgcaaaaccaaaaggataaattacaattaattaggatcaattataaggtatataaataatttaatcaaactattcataaagggaattcattctctattatgaaaactttcctaattataaatgacagctataaaactaaaatttatgttaaatatctgtaataaattaaatactattttgacaattaaattttcaaagaagattttacatgttataagtaaatcgttggcaggctctttctcttactctacaatgtgtttttttattggtttatggtctccacatgtagcaggtgatgcttaggtagtaatgagaatttaactctgtcttagcactttgtgtttgtgttttttttagtagtaattttttctaagagacactctatacttgttaactatcttccaagtgttattatttttatacataacattatgatagaaacaagttagggctgcatgatatatttgacatatgattattattatcaatttaaaaaacgtttgtatgatagtagacacctaatgattccttccactaatattttataccgctaattgatttatagtattgtcagtactgatcacatttcgtttgcaactgagttagtatttgcattccacacaatcacatatatatttaattaaaataatggacatataacaaacattgctatatatgtcggttatataatattcatttgaatataatatatatgtgaagcataaaacacacacatatattgatcactcacttcattttttttttcttgagagaaaagattattaattaataacggcctacttctctttcaggagaacagacaaatagacaatttatcaattgaacagaataataaattgaaaaagaaaatataatttcatgtttatataaaagcaattaaaataagagaacaaacaaagctcaagtaggctagcacttacgctgacaacactataatatattgactatgtccctacaccaaatcgagtagtacagcatatactcttgagtaaaatttaatagtactgtcacgtttctttctatttatttaatttgaattaattatttaatatcaaaattgtttgtgcttacaacattgcctctctcattgaatttagtttaattaaattggtgttatttggttctctatataaatgttgccatatatccctcatgtatatcacaacatctttcttcccttctcaatcacaagtagaagtacttctattgcttctttctcactctcttttgtgtaacctcaaaatcaaatattcatattctctcatattacttatagttcgtttttttgtcttcactaccatgacaatggattgcctcaacctctgcaaacagcaggtaattatatattggaatttattcctatgatcacaacactaataatacgtataatggtattgtactcttgttatgacttataagttcatgatgtgtataaagtttaatttatgtactaattttcaataaataatctagatatatagaccagaacaaagcacagtaaacaataaagattaattttctactttacgtaacagaatttgtcaacaaattactaaataaaatttaaagcattaattaaaaggtccgatagtaatgttcgtattgatatatagcatgtatataaaatcatcaatacgtacagtgttgaccggtttattttatgaaccgaggatcagcaattaatgcatgaaattattctatctcttttaaagaaccaaaaaatacttgttttatacaagttaacacaattaaattatgtatacattgatgatggcagggacactacgatgaagaagataagggaataattatgtttacccttgatggaagtattgataggcaaggtggcccagcagttcgagggaggactggctcttggtttgctggaattctcattctacgtacgtatatgcacattagtaaatataaatattacacctccatctcatatttatatacagtatagtataattcatcattgttttttccaaatgcttaatgagatccaacactagttttaagggagacatatgatatggatacgtgggttattctttcctttttccctatatatattctttttacggcaagcatatatgcatctgcaaccaaaaacaccaatttggtatgtatttcctattttttttttttatttaacgtttttattttattttagtaaatattaactatgtacttatatacattgagataatatacaaatagtacattttaaaaaattaaatagcgtatagctagtataatttttgttttacagtcctattttagagagaatagtgagattttgactaatatgtttgtgtattggtccttaataagatcaaatatgtcacacagcatgttaataatatactttgcaaaagttgcattccataaaaaatgtattcaatatatccatttaattatttggtaaaataaaataattattatatcaaattaattaacttcagccaaaaatagtaattttaatgggaatcacatcactataatttgtatggttaaaattatactagatatattgaaaacattgataaaattttagtttctcaatttttaaaacattgatattgaaaacaaattttatttttgaaaagaaaaatatatgtttagtaacttttattattattattattattattattatttatttaagtaaagtaagaagatagaaaaaatgtcatagtgtttggataaaaaaaatgaaaagtatgtttttaatttaaaagtaaagaagttaagatttatagtttctacaaaaagacttttgaaaaattatttttaaaattaaaataattgacataaattttaatttactaataaaagatttttttaataatatccaaatacataaaaaaaa

SEQ ID NO: 17047 - DNA, 7062 bp, Cannabis sativa
aaaaaaaaaaaaaaaccagcaaaaaaaaaaaaaaaaaaaaaaaactaaaacacacactaaaattggactctaaaaatgcataaaaataaacctaacaaattcccctaaacttagcctttacccaccctcgagtaaagaccaagtttaaccaacaaaaaagaaaacaataatgaacacacaaaagtaagccaccattgttatctaaactacattgtctttctcataaaatcttaattataatttttaaccagatttttagattagttgcatcaaagttcaaccttaaaatttatagggaaataaataatatgacttacaaatgaccccaatatttagacattaccatatatgttcaacttaatccaaataaatccacaaatcaatgttttaatatgcttcaattatttaacattctcaactcatgtcaacgataaatggtttgaaatcaaaaagactttaaaaggttatgacgttaggcttaggtaagggtagatgaaaatattatttaggctcaactataccataagctttttatattccaagaatctcaattttatcccaaaactattccattccccacttaatgctatacacaagagagatatatatatatatttttgttttccaatccacaccaagaatatttatttactattcacttttttttttctattttttttcaagaattaagagaaattaaagaaaataattgcatctaattaaaatattctctttcactctttttacgcttgtaacttttcaaaatacaatatccaattataatattctccccaactacaacatttgcaggacggattactttaatcaattcagtcttaatagcgattcaggcttactggagccagatgatggtgttgccaaaaaaagtaatcaaggttattgaagccatctgtagagcttatctgtggagagttcaagtgatgttccatggtgctggtgcggtctcttgggaaaatacttgtcaaccaaaaaaagcaggtggattggggattataaagattgaggattggaataaggcagctatatgtaagtacatctgggctatttcaaacaagcaggagagcctttggcaaaaatggatacacagtgtctatctcaaagaccatgactggtggagctactcagcttctatccatgctagttggtattggaaaaagctagtggccatcaagaatcagataaagcaaatgagtgatacaaaagagtttcaacaaggcaaatacactatagcagctggatataaaatgttttccccttctgctgttgccccgagatggtgtaaggaggtttggagtagattaaatactcccaaacataatgttatcttgtggttagcaatgctaaatcgtttgaaaactcaagacaggttgatcaagtttggagtgcaagtaaatggaaaatgctgcctgtgtgaggcaggtgatgaaacaaatcaacacctattctttgaatgtgttactgctgtaaatagtttgcaggaaattaaaaattggttgaagtggaatgttgtttcaaccaatctcccccagctgctgtgatggatagatagagcaaagctttcgaaatttcgaaagatggtgtatatagctgcgattgctagcttggtgtacagtatatggaagctgatgaataacataatttggcagggggcttctattgactctaaccgaattgttgaagaaactaaatggagcatcaaaatgagagtggctatgtttacttctaagaagaccaaagatatagataaggagtggtttaatgagctataatgtaaaaattgaggaaagatatactattgtatagattgtgtaggcccggattgggtgctaattggttgtaaattttgagttgtgcaatataatgtcctgatttttttaaaaaaaaatattctccccaacttatttgaaactcatggtatagttatgacaaagcataataataaatgggtcaaaaaaatttctctcttttctttttttagctcaaaaagtatgtatttaaaaaaaaatatatattttgaggctcaaaaggagtaaactagggataatcacaaaataggttagcttgaaaggcgcaaacattgcaaataaattacctaaatcatttttcaaagcataacttatcaatgatttcgtcttaaaggccaaataatgcaagttctatcaaattcaaattaacataccttcaaccctagtcaagcataaataattaaatccaaaatattgtattagtaaaacatattaaaaatttcccacataactttttaattaaactctaaaacaattaaactaggcacatatattagcaacttccttttcataggtaaagtaatgaaatatagataaaaacaatggcttaaaacaaataaacacaaacaaaccaaaaataaaaataactaactacaaattatatgtccctcccctaaatgaaagtttcacattgttcccaatgtgacaataaaaataaagagagagaacttacctcaaatacacgctacatcaatgagcggttgacgtttataataagtgtcatgcaagacaacttgaaagttgttattgtaaatgccctcaaacttggcatgtgatgagtttgatccaaaagcagcaccaacaactcacgactttggatgaagagctttgggagaagcctttggtagctcgtagaggatataatatggtgaatatggtattaatggaaaataagagtccattggtggttcataatatagtgacatcgctgacctcaaatcagcaactacaagtaattattcagccaccaatgacacctctttctcgatttcctcaaatagcctctcaattggttgttctttttccacatgaccatccacaatcttgactgtgaattgatcttaaataacttcatcaccaaggatggatatttcttcattcaccaaattgagatcatcatttgtggagtaagcatccaacgtacccaaattttcagtaacttccaaggattctttctcttcaattctaggctcagtctcttctgtgtattcatgtaatgatatttctacattattcaaacaactctcataaattttgttgttcatgttattatccttagaactctccaaattatgcactattaaattatcacataaagatcttactatgtttgccaagtggttaatttcttctacaagtgatgggttatacttctcttcctcaatattggtgactccaatcttcaagtgatggatcccaatgccaatcgtaatcaaaatctgtaatgtcattcaacaaattcattatatcatcatggcttctcattaacaaatactctccagttatatctactccataatccacacagcttctttttttttttttgaacaagagaagctgcagaaaaagaaaaactaaaacacaagcaacaaaaagaggcaccaaaacaatcccctctagctatcttctctcggcctgggggcttcttttgtaaggccatgggcgtccatattaagctgacgagggagaaaatgcaaagaagcatcagggaagttggagaagagcaatcgaatctgagacacaagactagaaagagcagaattatcttgccaagcactattcactttggataccaaattcaaacaatctgagaagacaaacttaggagacaattgagaatccaaacaccacagtaaactctgcaaaagtgcctggccttcagcaaaaatgggagaaacagcaccgggcaaaggacgacagtgagaagctaagacagtctgataaccaagcttgaagatgaaaccggttcctgttaagccgttcttgtgatcaagggccgcatcaacataaagagatggagtatccggatgcagggtagtaggatgctgttgctgagtattacgagatatggtggcagcctcagaatccagctgatctccttgatagttgcgctgagcagcaatatattcctgtaggtaattaataacaaactcttccacattgttaggaataccagatttattaaatataattgagtttcgagtattccaaatatgccagacaaaagcaatgaaaattggaaaatcctgtttaggtatattatgcagtgcctgaagaaaaaattcctttatatcatttcgatgataatctatgtaaaattgtttaaaccttgaatacttccagatggtctttgctctaggacaaccgataagggcatgggtaacagactcagtgttgttgccacaaatagagcagtttggatggggaagaatccttttcagaaataaatttaaggcacaaggtaaaatatggtgaaaggctttccaagtgaaatgtttaattttgggggggacagagagagaccaaagctttttccaccaatgttgaaaagggttggggctggaagaagagggaacatccgttgatgcaagggaagaggcaagatggtaagcagatttgacagtgataatgccagaggggtgaaatccccaaatgagagagtcagacaaagttggatccaggggagtttggagaatactttcaacttgataagaaggaaagaaatgcttaagtttaggtacattccaagtggaatcctggttgataaagaaagaaacaaaagcctgggactggtcaataggatgtaagagagtgggactatgaatactagggatccaatttggtgttgataaagggacattaataccagcaccaatcttccaaaccagacccttcttaagtaattgacggccccaaaggagactcctccaggtgaaagaagaattatgaccaacaagagcattcaaaaaatcagaatgtttaaagtatcgagctttgagaatagaatgaagaagagaatccttatcattccatactcctcaagcttgcttcgctaaaagagcttggttatgagaagacaaaatacgaaaccccaaacacccaaaaaacttagagacagagatgtcattccaatttttccaatggacctttttggcgccctgagaaccccaccaaaatctggctatagagctttgaattttcagacagatcgatttaggcactttaaaacaggacatagcaaaagaaggaatagcttggaccacagccttaattaaagtttccttgctagcacgagagaagaacttatcattccaagtatttaatctggaagaaaccttttggaggagataatggaaaatggaattggtgaccctaccaacacaatgaggaacaccgcggtatttgctaataaagccctccccatgaagctgcaaagactgacgaaactgaaactgggaatcaatagaggtgttaggggagaaaagaattgaggatttatctctattaaccaattggcccgttgctctgtagtaaagattgagaatggcattgagggcatcgctagatcgagaataacacctcttttttcatcatcaagtttattataaaataaccaagtaaaatatccacttgaaaaattggaataacatctctctccgagctccttaaatctctccaacaaaatagaatgactcattgtgttgttgggcaaaattcacaaggtactgatcttgatgtagcatttttttcttatataccttggaagacaaactcataaaataaaaatattagcaaaataaaaggataatcaaattagaaataaaattaattaaattaatattgattattttcaattcccggcaacggcgtaaaaaacttatttggtaaaattgatatgcaatcgaatcaagtaatatatataataataaatagagtattgttcccacgaggattaattatcaattaccaatcaattaattttttagttctatttgattaatgaaaattgttggagaaaaagtaagtaaatcaagacaataattaaaatttagaaaaataataataataaagataaggaatattatgatatccaacaatcttttattttacttcctaatgtaattacctaatgtctcttctttctattcaattgataatttgaattaagaagtttataatttgattaagacttattaactcaatctatataaaaacttcatatattcttatagtaagtttaatcacaaagagagcattaagtataataactaataaaatcatacaaataatctaggtactttcgtcctaaaccaatttgtatccataacaatcatagcatattcaaatcttaccttttagaattttgatctgaatttatagataaaaattatagatgaccagtaaataattacaaaattataacaaattgtatagaatttaataaagagaagaagaagaaattgaacaatcacatcaatccataaaattaatttaagtagttcacataataatcattaaaagaaattagctactagaagatattgtaaaacaatagaaatttaactaaagacataaaaaattgagatgaagagataaaacactattggagtcttccactagtgccttctgcttcttgctcttcttctacactcagaatttctctcaatttttgaatgatattagatctaagctttcagtccctttaaatacacaattagaaaggttgcccaaaatcctccaatgcccaaaatttgtttccaagtttgaatgataaaggaaatctagctccaactcgttttatagaaaaaattaggaaagtttcccattttttttgcaagagctgggactctctcgttttctgatttcctactgcgatcactgatagtattttggccataactctattaatatagtttggaattggacgattcaagatgttttagaaatctgaaagagagatctagatcatttattcagaaagtatttcctagaagtgaatgaataatagtgaaaaaatagcttgaagcttttgattttattttccatcacaaacggagaatgttgagcatccaaaacttagaatttttcaatttacttttgggaagtgatcactcttgactctagaccacagattttggagctaaaaaatataaactttgaccaaattgagtaggggtgttcatccgatccaatccgtacttttttggtcaaacaacatccaatccgcactaagtgc

SEQ ID NO: 17048 - DNA, 7391 bp, Cannabis sativa
aaagataaaaacaaaacgaaaattagaagaatgactaccttggcaccttttgctgctttgataatgacatatggtactcgatctccaacatttggagcagtggcagcatctctctgcaaatacataataaaagctaactttagtttacttattgacttggatctatcaaatgataaaaatgtttttgagattcaatcataaaacactttcccctcggttgtatgtaaacccccttcacccccaaccccctaaagtaagggcttctaattttataatattccagaagttgctgttatatttgccctttaattgttcagacaaatcaacatctcgtactttaatgaagaataccaaccccacttagttgtatatatttccagatcattaggaagaaaagaaaaagaacaattacctcggcaactttagcctctaaaatgtacaatttaataattcttaattttgggatcacaggaaatgaactatgctatctcagaagatttttaaattattatcctttaatcaaataatacactgtacacatacatacgaaagggggggagtcttacatataatatagctgacatactcatagtccaactccctccctactgaatatacaaaatacagtaattcattcactcaatcatagatctacatgtttaaacaacgactaaccattgcttcatttcctaaagtcagttgctgcgaaggtttattttcagttgaagttgcatttggccatgaactggactcaacttcatggttacaaatccaatcaatttagatatgtggaaattgagccaaactgaattaacttatgttgagtgtcattaccatatggatatctcaattttatataatatatatgtatatataatgaatcaatacttaatagttacatcaatatttatccataaatgcttagatatgttttagccattaaattttattcattaaatgttattaatataagtttgaaatatcttctatattaggccactaaaaacatcaacttagcatctgaaattaatggttgatgtaatttttttccattttgcaactgcaactactatagagatatagggattgaaaactcttctataaatgtaaaattatggtgcaatctgatgttgctaacaaagcaaattgatttctgcaaatatcacaagcataagcatgatattgtgtcactcttgtttacaactaaatataattcaacttccatgaatggacattgtttgactttaaacaattatcataggatatcaaatatatatggggaccataagcaagattacctagtgaagctaaaagtccattaacaggaatgaaaaatcaataatgcacaaaccaaccttacgcatgcgttcagcaagttcaacatgagcagtctttacttcataatcatctccagtctttgttaaaccctattcaatcaaatttgttggcccaaatcaagagaacttacaaagtcattgtcaacaataaattttggtgaaaacagacttttcctcaaaatttattgagacgctatgttgacaattgaacttaaaataaattatttttcaccttagttataaccagaagtgacaaatccatacggttcataagaagatctgaaatggtgttcttgacatattggactgctccaggaacgtccctgtcaattagtattttgtgcaagcactcatttaccaagttctttaccaataaacaattgtctcttcgaacagtttcaatacctgtaaatgataacaaatatattcacaccaagtccaattaaaagtaaggatattgacaaattcaagaaactctaatttctacctttggtatccattttgtcaaacttgtctgggtttgtccaaaacagaccagcatatctcttcttgctgatcagaagatatggataataaaccttctcaaactctaacttgataggcttcattaacgagcgataacaagagaaaacaaagacaaaaattagaaaggaactagttacaacaataatgtcaaatataacagaacattaagccctacaaagttaataaatacaagtatgaaactacaaatcatttcatgaccaaagtaataactcttactttaatgaaagttccactaataaaatcagcagcttctctccctaagttcattgcttcttccacagaggccacaccaaactggaccataactgaatctgtgtctccgtatatgacctgatatcgtaacaatgtcaacaatagtatattgttacttacaattattttcatatatataagcaaccagtagcaacatgagcaaaggaaatttaacagtatagaatgcaatctgataccacttgatacaaccacttgggtagaacacactcccaaaagctagcctaagagaggagggtgcctaagtagctactagttatatactactaaccaatcccatacttgatcaatttggatcttaatacaatccagttctacaaattaaaaatgtacaagcaaagggaatcagaaagtccaatatgcatcaaaattggtcatcattgactactctattagacatttctataagaaaaattgtaaccactcacctcagcattgtgttcatatcccccaagtgtagtaaatttatcttctacatgtttttttgtatgctcaatcatttgtcgaccttcacaagggataaaatccatgagacaaagcagaaatcctcaatatctatgtttcaagacaaacaagagtaggctaatgttttgaaaaataatcagtaccatagcttgtgacacttgaagatatctctaaacaaggtaactgaccaacagtagctccagtaaatccataaacagagtttgcacttatctgaaaggatgagaatgttatcaagtttaaagcaaacaagaagaataaggagcacatttacaaaagcaaacaaagactttggcatttcaaagcttacttttaatgctaactgccgaccatccagcaccgctttctcaagaggatcctttgcttcctaggtataaagatacacaaaataaggcctatcagtaaagctagatattattgtacaaaacaaaaagtagaaacagcaaaaacatgcatagtctgctcttattttttatcttgtaaggaaacatgaaaaattattaaagaggcagagggggtgcaagaagattgaggaccaaaggtcaaccaacacagagcagaacaaggaaaccaagacataattataaaactgtaggaatcaaaatgaaaggaatgttctagtcattggcaaaaaaaaaaataccttcaaatcggccttcgctcttttacgagcagttaataattcttcaagaatttcaggaagtattccctgaaaacaacaccaagtaaattctgttcatatcatcagtcttaagatagatgttatggctaaagcattaattactcttacaagaatcatattttccaaaagaaaaggataaaattcaattacatcactggaaaactcaccttctgcaaacttgatttaacaaatgtttcaccagatggagttttgttaacacattctggagggaggttgaatttgcgagcatcttccggtgtaaccttaaacaagatgttaagaggtaaaaatgtaaaaactggaagagccattgtcaaatctgtcctcagcttacatggggggcataaatttgataaaaatgtattttaaatgtctattttttaattaaaaattaatgttcaaaaaaaaaaagagaggattattttccttcacatcaaattttaagtttatagatatctccaaaaaaaataaagtcatacaaatatagtaatctagtcttaaaatctcagatatatatttggtcacaaatttaggcatacatttttggtcacaaatttagacatatatttggtcagaaatttagacatatatatttgttcacaaatttatacaaatatatatatgctaccttctttataatagtgggctttataaatatttatgttgcctcgactcaaagacatgtattctgaaacttaagaaagcagtcaaaactacacatgattaaaaacaacgcaaccagaaaatttgtagactaatatttttctcaaagtgtgttttggaacaacacaaattataattatttgcaaactccctacaacacatactataaaatgtatcttactaaaactaaatattgtatacattaacttaatacaaaactatttgaggcaacacgcgacagaaataagatttttttattattattatttttgaaaaagagaaagagaccacttgtcttagcccccctcgaaatattattgagatcctcacttgtggtggaggaataccgtagtaaacatcagcgtgaaaatgtatatgaaatcataaaatatttaaatactacaatcaacagtatatgaaatcattgagcttgttttaatttgttcaacaaagtctacataatattaaacgctgcacaacaagtttgttttaatttctcattgtggttttgtttttcttttgcttgattgttttatatttaacttgtatgagaaaccatagaagaattgtaatatatttaaaataaattgtgcatttttatcaaaaaatatataaattgtgcatcttctaaactcttaaaattttgcactatggcacgccctcaactatagtgctaggtcatgcccctgcccatgtagttccaaaaataaataactggcaaatggaatactacaaacaatttgtctaaagaattaccagagtacagtagcacagattatatgccatcatgattgacgggtacaaggatgcaaaatccaatgttgcaattggcttttcataaaaccctgactttgcctccaaaacctgcagtttaaaacaaatgaatgaatgaatgataaataatcaaatgcatgaaagtagcggaggattaaagcagtgaacactacactcctagcaaacaaaactaagtcaactctcaattttgtaaataaacgttttcttgtttgaagactgctaaaaacaataacatgttaataggaaatttaataaacctgaagtctagctgataagatagtatctagtgatggacacaagttagttgccccacataatggagacaagttaaagcatatatacttacagattcattacttgcaaatttaaataaaagagaatctccaatagattttaaatttctgatgcaatgccatattttactatttttgcaagaaaatgcttctctagtgattgactaaagactgccaaattttggacaaaatatagcatgagtcaaatttagtacaacaataaatatacgtaattgcaatattgtcatttaatacacttttttaaattacaatatcgccaataattattttgtaaaatatttaatttgttaaatgtcatattgtatcttaaagagaaaatttgcagcaaaaccccctaatgttttaatttttatacacttaactccctttttttttatgtggcaaaacccccttaagtttacttttctttgcaaatttaaagtttcagttagatataaccgttaaataccaacttcgaggttttaccgttacatataaacaggtgtatacagtggtcatccagttaatatttgacggtaatatttaactggtgtgtcaaatttacaaagaaaaataaatataagggggttttgccaccaaaaaaaaaataaagggattcagtgtataaaaattaaaacataagggggtttcgccgtaaattgctctatcttaaaatgttattgtgctaagtacaatatttgttcatattttgtgccaaatttagcattttgttagatctttaacagagatgatctaatcttgttagctttatctccaaccccaaaacagtcagtcaacatcacaaagaaaataacattgtaatcatagtctctagtaactacagcgaacataataatgctgtagcaacacttgtgatggcatgagaataattgactgcctttaccaaagaagaataatgaacttacagtggcaccttcatatgtcccttgttcagatcctgcgtgtttggcatttggaattacaagattcttttgttttgccttcctcagaagttgagaaagtacctgaagcaaaatattaaatgtaaacttcaccaagtttatcattctccaaatggacaaaagttcagaatttggaaattgttgtattgacctttatgctttgacccctggagagaagaaaagaaatgggaactcctgtaactctagccatctccacataattgtaaatgaacatcagtttgtccaagagtcgttgaggaagataagcatcctgcaaggtaacgagatatatgattattctgttacattattgattgaactcggaactcccagccctcaaggtttaaaataggaagtgcctaccaaatcattggtaagcataaaatgtgtggttaatctctgggcagtagtccttgaagaatggaatcttgaatcatgttggagaaaaccaaaaatctacgactcaataaaccctctaaggatttatgttgatgaattgaaataaacatgtgaccgtaacaactttatattttcacagataaggttcacactcacagtattaactcataaagagcacaaggctacaaaaagcacattaaatgtaaagagaagcagtgtatgatcctacagatatatcaaatatatatatatacataccttcagacaatatactgcaagtcgccttctggtttcagcattcccattctggagatcagatataattgaatggtgaacatcctctttctgcaaaaaaaaaaaaaaaaacaaattaatatcagaaacatcaatgtctaaaataattctaccagtgttgaaatgggagaagataaaagaaactctttcttttctaggtaaaggggcagcaaggagggaagatacacaactttcaagatcagccaggaaatacaggtctctatgagcttacttgctccaatcaccatcattgttatttttagaagatgctcaccgtaaaaatattttaaacacacacatccttgataagaaatttaaaagggaaatatttcacaaaacatccaaggaaccctaatacctcacctgctcagaaaggaagtgtgctgagacagaattcaaggagtatgaactcaatttataatctcgttgcataatctacaatgggaacaaagattaaaacaaacttgagtgccaattgcaatatgaacaaagttctctttgaccactaattttagataaatacaaaataatatatcaaatatatatatggatcacccatcaatatatatgtatatattaaaataaatggaacctgtagcaagtcaaattgaactctcccttcaattgatacttctttactctcccgggtaccatactgtctgcaacc

SEQ ID NO: 17049 - DNA, 4827 bp, Cannabis sativa
tatatttttataacttgtagtttatagaaaactctaagttgatgtagtttgttaataataaaaataaaaaaaatataaatatgaagtatttttttaaaataaaatcaaaaaaagagatttaaatattatttattttaaatattttttcattcaaaaaaaatatttttatttttgtaatatataatatataattaaatatatctttattaaaaattaattattatagtcttttactcaaaacagttttttctaaaagttgggttgtaccaactttagtttttccataaattctttaataagctgttttttaactgcttaccaaacattttttttatcacaacttttagctttttcaaaagctgtgccaaactagccctaagaacttaattaatcacaatttcgatcttgcatgtcataactttttttttactcttcaagtcaagttatattatgatcagtattttgttaaaaaaaaatgcaattagagtaattatttttagagtcagtacaactcacaagttttcattttctttaatttttattttgtagggataataatcttataaggttatatctaaggggtaattttggttataagtttattggtacgtagtctttcaagcaggaggataggattgagactggcctaaaatattagactaactattatcaggatcttctcagagtcgttgtcatttgtgttaattttggagtcatattcacggtgtaccagatagaaatgagatttattttagtctacgaagtaattaaatataattgttatgttctcatcaataaagactttatagataagttataattatcacattataatagaaatattaatattttattatttacttgatttgttattgatttactttttcttttgtaaatatatataacagaatttgtgctctttcagttagttagttggtcttccagttagtttagctttggtttgtttgtcaatcgttttctatcaatatagttaaagttcgttatcgaactctagttatggtttatcttattctctagttatcatagctaattctagtcatcttcttctctataatcttctcatttcgcaatatggtatcagagcgagaaagataagctttcccttagatcctcttcttcttccttctttccttcctcgccgcgtattcttctccgacgagggtggcgtcttctctctattttttctctgttcttcttcccttcttatgtttctagtgttcttggttttttcttctttcatatccagaacaactatatcaagcgatgatcaatcattatgttctgaagttcgatccatggatctgacgatcgttgctaatccacagttgccttccgttcaagagaaccagaatcctaaaacgatcaatacaagaaatcctattgtagatcctttcaatccatgttaccttcatcacaatgataatctaagtaacaatttagtctcttaactcctaacaggacaagacaactatgtgtcatggagcagggcaatgcagctggccatctcgatcatgaacaaacttgggttttttgatggttctatatgtaaaccttcaccttctaaatttatattgtataatgtgagggtcgaaataacaatattgtcattttttggatctgaattatgtttctaaacgaaatttcttctatcattctttatgataacaatgctgaagcaatttggaatgattgaaaagtcaaatttcattaaaggaatagtcctcacatctacaatctgagaaagggtcttatgaatctaaggcaagaaagtcaaactgtgagcatgtacttcactaagctcaaaacagtttgggaagaattgtctaactatagaccttcatgtacttgcaatggatgttcatgtggaggagtcaagaagttccatgaatatcaccacttggagtacaaaatgtcctttctcatggggctctcagatcattatacacaagttcgaagtagcatcctactaatggatcatctgcatgaaatcaactgtgttttccaccttatatctcaagaggaacatcataagggaaatcttgctagagatacaaacactaatcaaaacatggcttttaccttttaaggagataaaacagctgcaagaaagccaaaatctaaagatccaaagacacatcctccaaaatgaaacagacctttctgcgctcactgtaatgtgcttagtcatactgtggagagatactacaaaatctatagttatccacctggatacaaatctagtcaacctaaagatgctactgctaactaagtccagactagaaataacacaaaaggaacttgtgatgaaggcactactctcctccctcaacttaatgggtggaatcttcttgcgaatcatcacactggtatgacaaacttaggacctaacacctcaacagacaccacaggtaccattttatctctcaattctgttgctcccctaaatgaatcttgaattataaattctggagcaacaagacatatttgcaacaatcccaggttatttcaagtcatttggcctatatctaaaactaaactaattctcctaaataatgaaagtttgtatgtatgccagagtggatccattgcaatacataacaaattagttcttattgatgttttttatgtacctagttttaaattcaatatcatatatgtaatcaatctaactgaaaataacaacatcaaagtcaaattctttattgataatttctatataaggataaccttcacaagaagataattggcaaaggaaaaaaagatgaactttacatttggatcctattgctgcataagaaactattctcaatgtttcagcagatgtgtggcactcaagactaggatatcctttcaagaaatgacttcctttactcagttaataattataatgtaaaactagttatttacatactactactccttgttatatttgtcctaaagcatagcaaaggaagctacccttttccaataataactattttgctgctaataattttgatttgatacactgtgacatttggggaccatatcacatcccctcacattataatttcaagtattttttttactttagttgatgaccattctcgtttcacttggatttatctcttacaacaaaaataaaatctgatgtttctcatatcatcccacaatttctgtcctacatacaaacacaattcaattgtatttttaaaaaatttagatttgataatgtacctaaattggtattcaaagatttgttctctaaacatggcatattacataaatttacttgtgtaaaaatgcctgaacaaaatgtcattgctgaaaggaaacatcaacatcttttaatttttgctagagctcttcatttccaagctaacatgccaataaaattttggatagaatgtatcatgatttttgtgtttcttatcaatcaaacaccaactcttattttaacaaacaaaacaccttatgaacttctgtttggtactccaccagattacacacatttgagaaattttggttgcttagtgtttgcctccatacttactgcacacagaacaaaatttacaccaagagcacgtacttgtgtattcatggggtatcctcaaggtataaaaggatacaaactttatgatctaaacatgaattagttttccatttatgagcaactcacatgatcaatcctctacaccctatcctcacaaagcttttatttgtgatgtataggctcatcatgaaccataaaatataatcaagcaattcaatatgatgtatggaaccaagcaattcaatcaaaactacatgctattctcaacaataacaccagggcctgtgtgaagctgcctccaaacaaacacgctataggatgtcgttaggtttataaaatcaaatataatagcgatggttcatttgaacgattcaaagctccgcttgtagcacaaggatatacacagcaagaaggcttagattttttcgacactttctcccctatggccaaaatggtcacattcaaaatgttacttgccattttggccatcaaaaattggcaagtgctccaactcggtattaataatgatttcctcaatagagatctccatgaggaagtctaaatgtgtcttcctaaaggtcttacacttccctcttctttgtttgcagaaacaagtctcgtttgtaagctgcacaaattgatctacgatctcaagcaatcctccaagcaatggtacaggaagctatcagatgcacttcttctcgaagaattcactcaatcataaactgactataccttgttcaccaatgactccaacaataccttcattgctctcctcgtttatgtcgacgacatcatcatcataggaccaaatgcttctctcttacaccaattgcaagagtccttacatactcaattcaaacttaaggctcttagaaaactaaaatattttttggaattcaaaatagctcgagaaaaagagggtatgtttatttctcaaaaaaatacaccttgcaacttttggatgacacaggatatattggtagtaagcctggaaaaaccccgatggacctaaaagtcagattggacgatcaagacgacactcctcttgaaaatcctttaacatatcgtcaactcattggtcgattattgtaccttaccttgttgagatcaaacatcacctttgttgtcaataatctcaatcaatttatgtcagctcctcgaactccacatatgcaagcagtccaccatttacttcgctatctaaaaggcaaatctcgccaaggactgctatattcagctgcttcttctctacatctttaaggattctcaga

SEQ ID NO: 17050 - DNA, 7020 bp, Cannabis sativa
atgattttattatattttacttatgatttaaacctttttgttatggcacatatacttatccctggtaggggaatatgtagtgtttttaaaccacaaaattaggataatttttttttagttccctcataagtaaaaaaaaattcccaattgtcgaaacaaattagaaagttatgcttataaattataatatattatgggtgataaataatgtgtacttgaggttttttttttgtagaagttaattttatcttacgtctgttgctaataggtaagtaaaaactagaaagagattgaaaatgaaatttatgaattctgaacatgtttactttgtcctttccctgaagcccccaggaactgcagaatcgcaggctcttatgttctctgcaccagattgtggtgatatactcagcagtccaggtggtatcatggatgtttcagatccattgctttccaatgaaggttttacttcctttgacagctttaatccacctcaagcagttaatgacgaggttctcagcaaaaatcaaggggtcataaataactcctcttcatttggtttagtaaatcaatccgcagcatcttctacaatttccaccgagtttgatcatattataaaagctgaagctctgatgacatttgcctctgaatttggggcagtggaaactccttcaagtgagttatcttcatccatcttcagaagcccatactgtcccaaatctcggaaagtggaaagttcaagctcaagctcaaacaattatgtatatggtgcaacaccgcctagttctccttgttttgatgggggtgatgagaagactggcaccctcataaatccaaaaatttgcaacaatttaaagcaaaattcaagtactaatgtccagtcaaagaactgttacactgttgtggagagtgtgaaagaccaaaacaacagaagatcttgtaataacagcattgttgcatctgatggcgtggctgcttcatcttcaaataccagttccataactgccactaactctgcccagaggaagcttcatgatagcacatttgattcagataatctatttctctctaagaaaaccacgcttgcaactgaaatcgagtgccttacgttccaagcttccatgtgtaggattcgacataccctattatcttcaagtagctctacgtcagtaggtttaaacaggttaaattcaaacactattctaaatcagcttcctagtgaaccaagtatgatgacagacaatttatctggcaaatatgaggtgaagaagaaagaatctataccaattagaatagctggtgatattgatggtaggatgctagatgggcatctcaatgctcctgttggtgtttggcgctccgttggtgttcctagggtatcgaaaccaacaaattcaccaagtatggaaattagccaatctttgcctcataagaccttcaatgaggaaggtattctttcttatgggcaaagacaaccacttcaagagcttctcgatggtatgacattacttgtccaacaagcaacttcctttgtcgatctggctcttgatgcagagtgtggtgatggaccttatggtttgcttgcattacaagaacagtggaggaagggtttttcctgtgggccttctatggttcatgcaggctgtggggggactttggcatcttgtcattccttggacattgctggagtggagttaatcgatccacttactgctgatgtaagatctctttattcatgattcacaatttataggattatttttgatacactcatttgacctgttatgcaagtatacttatttcaagacatcacggtgatagaaaatagaagattcaatatttatttcttgtcaggtatatgcttcctcggtggttagtctgctgcaggctgacattaaatcagctttaaagtctgcatttgatgctatggatggaccattgtctgtcacggattggtgcaaagggcgaaaccaatcaggtgaagcagggaacacaggtgatggatattctgctgaatcatctcttaatgaatcaagttctgcagttgtttctattggggaaccaattagcccatctcagacttctagtggacaatctagcctcaaaggtataattagacctttgcaaatatgcgtgttatcacgctgatctgatccgtgatttgtttagtttcatcataacaatcagtttgaccatttggctcaatgcctagtgctgcagacggtgtgaaaatggatgagacatgccaaaggagattgaaccaagagaactctggttctgaggcagatctgtcaattggctctcgtcttagaccaacactttatattgttcctttgccttctatacttcttgggtacaccttctgctcaaacttttgcaacaacaagttatattagatatcaattttcattagcaacatttctaatatgcataagacatctatgagaaagatacactgaatttctggataaatgtgtgaatattctcgcaccttgaccttacaatcatattcatttttgttttaatcatattcttgtgatagtctattaaatagtgacttttgtaacaggtatcaggatgattggctcaaaacatcggcgagttctctacagctatgggaaaaggctcctttcgaaccgtatgccctgcccaaacctgtaagttcattgatctttttataaaactgcaatcttctgtgaagagtatattcaatcacttgcatcttctgaacatcctattacttgttgcagattaattactgtgtagtatgcccaaacattgatccccttacttctgctgcttctgattttttccaacaattggctactggtgagtgataataaatttgctagaaaacatgaacatacaatggagtttggaacttaaatgtctgcataaatattccctttaaagtgaaggaagatctttaatttgcttttacttcctggcatttatgtttaattgatataaattagtgggggacataactgctaggttattaattgtgcttttttccttcaaataaagtgattgcacaatttttgtttaaagaaacaaattttataagttaatgcaactaatagttgcattgaagtcctcagagacgtcgattggcatttgcacctttaagttttatggtggcatttcctctaacttttgttttgcactttgtgtttgtgtaacactctttgtttcctctcattttttttctcttccagtttatgagacatgcaaactaggaactcatttacctcagagttttgggaatcaaatggatgtagattatgggaaatcttcaaattctgggtttgtattactcgattgccctcaagcaatgaggatagaaagtggtaatgcttctcttgttggctcaataagtgattattttctctctctttccaatggttgggacttaacaagttatctcaagtctctctcaaaggctcttaaagctttgaagcttggtccttgcatatccacaaatgcgaaagaaggaagtagtacttcatgtatggtaagttacacacttggttggcataccttgtcctttttcttcttttattggttctttatttgggtttacattgaattatcaattctccgaaacagaaacatctttcataggattttcttagccgtttttctcattattactagatgcatgtgtgggacagcgttgcttttcttgatcgatcaaactcaacaaatacacagactcatttagttgttgaagcatgtgacatgtcacattagggaggatatccacttcaaattgttaaagtttctttattcagctttctcagcatagtatggcatgtgcaaatttaatttatcatgtagattcacgtaacatttattgactctcactgtccaggtaatatatgtggtatgcccattccccgagcctacagccgttctacaaactgttgttgaatctgctgttgctcttggttcggttgttttccagtcagaccgagaaaggagatctgtgctgcacaatcaggttgccaaggcattaagcggttctgcagctgttgatgaggcgtcaatatcaaatgtattagtgctttcaggctttagtattccgaaattggtactgcagattgttacggttgatgccattttcagagttacaagtccatcacttagtgaacttgcaactctcaaggagattgctttcactgtttacaacaaggctcgtcgaatgtcacgaggatcctctaatgatgtcatccagtcatcatcattctccactaggcctcattcggtcttatcacaaatgacttcccacactcctggaatgtggaaggattgcataggtcctcgaatgacagggcattccctgccaagagagggtgaaattgattctagcttgaggtcgggtgcctgggataattcatggcaaacaagaggtggatcaatagcctgcgatccaaacagaatgggtgattactttcctcatgatgaaatccgttacatgtttgagccacttttcatcctcgccgaagccggctccttagaaaatgggtatacaccttttagttccagtaattcagcctcggaatcttcaaaatctttgttggacgatagcagcggaagctatatgcagggtgatactgcctcgaactctcacatcgatggatctgatatgggtaagacttctccaagcttgcactgttgctatggttggaccgaggattggcgttggctggtatgcatttggactgatgctagaggtgaattgcttgatagccagatattccccttcggtggaattagcagtaggcaagacacaaaaggtctagagtgcctttttgttcaagttttacaacaaggctgtcatatacttcaagcttgctcttccgattccggtgttgtgagacccagagattttgtgattgcccgcatcggaagtttctacgagcttgaatatcaaggtaatccaagttttccacttattgctttctattttaaatatttgcttgtttatatgtttaaatatattacataatggatttgatctcataatgttgtgttttccatctgactataaacagagtggcagaaagccatcaattcggttgggggttctgaggtgaaaaaatggcctttgcaattgcgtcgatctgtgtcagatgggatccctgcaaacagtaatggaacttccttgcagcagcaggagatgggtttgattcaagagagaaatctaccttcttcaccaagcccactatacggtagccctcacccaaaagcttcgagctttatgaaaggcggtttaggaggtcaaactgcagcaagaaagcacattatgagtggacacacagtgattgacaattcaaagggtctgcttcagtgggtgcaaagcatcacctttgttactatttcgatcgatcattctttacatcttgtttcacaagcagattcaccatctcctggtaaactacctctcgctttcttacttgttagaaaaagtgacactgctcatttacaaattaggggattctattgtgtgtgttttgttttggcatagaacattatttgaaaagttaacttgtgcttcttattcggtagccagtcaaatgctttgattcagttttaattgtattcaaatatttcatgtaagtcgtatgtgttaattttgagctttgtccaggagcaacacaaggcagtggtctacatacggggtcctcgggatatctggaaggattcaccccagtgaaatctctcggctctacatccgcatcttacattttaatcccatcaccgagcatgcgtttcctctctccaacaccacttcagcttcccacatgcctcacagctgaatcccctccactcgctcatttacttcacagtaaaggctctgcgatccctctctccactggtttcgttgtttcaaaagccgtaccatctatgagaaaagatagtaagcacaacttaaaagaggaatggccttcagctctctcaatcagtctcattgatcattacggcggaaacagctttaatcaagataaaatcaccagagctcctataaaacaagggagaaggagttcaaattcagatccaaaagaatttgaaaccgaaacacacttaattctcgagtctgttgctgcagagttacaagcactttcatggatgactgtaagcccgtcttacttagaacgacgaacagctttgccttttcattgtgatatggttttgagacttagaagacttcttcatttcgccgataaggagctttctcgacatttagagaagtcacaaactggagggtagaagtttagcggcttaccgatcggccattatctttcggtggaaattttactgaagaaaaaatgattatgggaatgagattatcacagtttttcttatggaaaatttgtacatgggagtctagcttggtgatgatctttagtaattttatttttctttttgaatttgtagagtaaaaaaatgaaaatagcttgagtagttattattactatagattttgagatatgtatattaaccttgatagaacttatttagtgaatttgttggtggggttgatatttttctccccagggtagtacaagtaaattatcttttttattttttagtttttcttttaagaaaaagaaagtaaattatcttttataacctaattttgacactatgatttttttttgtttttttatgtgatagatttatttcttcacttgtgttgaatcttatacttcataaaagctctgtacaattcactatttatataaatataaatatttttttctaatagaaaataaagttgcaaattaatcattagggtagatattttttgaaaaggctgggttgttagagggtttctgtttctatgaattgtttgtgggttgtatggatgttctttcgaagtagaatatagaagaatttcttgtgttatgttagaggatttgatatcgtcgcaacacttttgttcataagaataatctactctctgatgaagttggcgacgattgtggttgaattttctaatggctttattgagacttt

SEQ ID NO: 17051 - DNA, 7232 bp, Cannabis sativa
attcaatacatagcatgcaagtaacataattcaaccgcttcaactccacaaaatgcttacgtgtatattctgccggtgaaatgctatgaagtaattatcacacacaatttttagcttttgtctaaattcaactgcttcaactccacaaaatgcttccccagccaagatgaagacattgagatcttcataatttttcaagaattggtggatactagcggaagaaacagcagaagaagaaagcaggacagatattcgactagttgtgagttgccaaagattcttgcgtcctctttgaagggtttgtgaaacaaatcctgtagcatcttttcggagatgataccatggagatccactggttgatgttgccccatcatcctttgtatcttcaacaatggagtcatttggacttgtatgtgcggaacttgtagaccgagtatcctcagataaagatttcacagctgtagcttctattgtagaagatgaaccagaaactctatctacagattgatcaagagagccattaaatctagaggaatttccagaggcagacccaactttctggacctctcctgcattcctagagttatcattttcccttggcacactatttgatgtttgactggctgtatcctggaacataaatgtaaagttgtctcattcacatgaaataatgagaaacaacccatcaatcagaacaaaacaaaaaggtattaaagttaacaattaaaaacaaaaaaaaaaattaaaaattaaaagagtacaatgagggatcaacaggcaaaatgattagactatgtgaggagggtgtcaaagtggtaatagccaccaatcaatcccaaacttagttgatgagggatctgagcaatacacctctctttaaaaccaatgtacacacaatggcccactctaagcttatatttgcaaaagttgagctaatgagaatatattgcccaagtgatttataaactaccaacgtcgtacttgagatacagcttgcgatggcaagaaattcatcaaagacaacttgagaaggtcaaagctacactaaacaatgtttctgatttatcattaagcaatggttaaaccataggaatagctaaaaggaaaaagaccataagcaaggggagaacactctagaattagaatatatcagtttatctaccaaaatatagggcactaaatctcattaatcaccacaagtgagtaataacaagttttaaattctaccttattctccagctgaaatcccataatttcattgtaggagcacattagcctaaaaaggacagctagtgttctcaacaaactctgcctaaacatagattcaggtatccgaaggcaaagatcactgtatgtgagtctggaaagaaaattaaaaagaaaacatcaggaagcatattgtgagaaaggtaggaagcaaatcaagagtcattattaacaaatactcctgcaagaaaatatatgcaaaattgaaagcaagagaagaaaaacaaaacctacctattattttgtttatgcacttcctgatcctgtaagataaaagcaataataatataagtatattaagaagtacagtgtataaatagataattaattacacaatttaaaagtgaatatgagttgtcttccattgtcaaaaagtttgggcaagtttgttggtttactgttttggccgttagctttgttgtttcaaccctgatttctgagagttcaagatctttttcatgtgttttaattaattagaatttgttttggtttctaaaccccctcttttccaccaacaaaaaaaaatatacaatcgtggctcaccatatctttcccttttctgatctagttataattattgttcgtgaaaaaacactctgaaggcccttcaatggctaatcactttctatgacttatagtaagtacataagccagacaaatctagtaaagagagtaagaagcacacctcttgcacagtatccttcaatacagagtgggtttctgagagaacttcttgcataaagaagctttgtatcttctcagcaagaccggcgatatcaccaataagtgcataagcatcaatcacctgttttgcattttaacaatatattaattttaataaataattcaagaaatacatatttcagaatgtaatgacagcttaatatggataacactcacagtaatatagctctgttcattaaactcctggcatactcctaacaaaagtgaatccaacttttgaagggttcttcccagccaaccctggattgaaatatacatattaaaactcagcccgtgattgaaatttgtaaatgtttagtgaaagaaacatggaccacagtgaactcgtttacaataataatgtaatatccacctctactccacggctcatctcttgtacagctgaaagctcggagaaactatctaagagttgcaaatactcagatagaacttgaaaagcctgtaaatgacaaacattagcccaattattttagtattaagatttcaatgtgaccacaaaaatgaatagagtattgacacttgtagatcataaaatgcaactgaaaagtaactctcaccttgcagtaatctccgtcttcgacaagtgattcaagtgctgcttgcatgtccaatgcatggcgaagctcagttaaaacaggaactatgtcctaagatttacaaaaatttgaagtttaacatttttgaaacaattactctttctacaaagactgacatcccatgagatagttatgattttctaggaaaacaaaatttgaagtaaaagtttagggtaggtctgtcactgactgctactgtctataggaagagcaatgtaccagaaaagcttgcttctttttggaatgggaatttacaacgagatctcttgaaacctcattgatagatgagttaagatgccttcttccattctgtaaaattagatatatacacgtaaggaaactataaataatggcaacccagcaaaataacattgtttttcaatttattaggttcattgcatacagatcaaaaatcaaactacgacttaccatgcagatgacatttgcaacctttaagtctttctccacttccctaaccaaattcatacccttcactggccaaaagtaagtatcaacatctcatttgaaacttcatcttctatataaagttatcatagcaccaaacttgtgggaaaatggtgatagaatgtgggaaagtacaaaagaaatgtattttctattttttttataataattactaaagactcacccattacttcatgatgctccataacttgtcgagacaaccgttccgatactctatccagttgtgctaatcttagggtagcctatgaaaagtttcatataaaactaaatgctttaagtccagaaatgtaattgattataataatacattcaaatccatgagctccaagagctattggcaaacttgaaacactcaaagatcaaaaaacatgttgatacttcatttaaaaagaaacatattgtttatggaatttatcttgtaaatttctttttttggaaaagaaacaaaacaacaagaattcaaagaaataggataaggtgtccccaacagaagcaaaatacaaattaaagctactctagcaaaaaaaaatttattagacaaccaacattttcaaggtaacttgagcatcccacaaatgctaccttcctcaatctttacataatctgttaaaaggttgaattaggaagtctattttggccttattgtaggttgcacatctgttccatttgtttataggttacacactttaaaaataaaatccgaaggcgacaacgaaaaaaagcatcccagcagtcactcatagaaaaaataataataaataagacattaaagccgtacaaacacaaacttaagcataataggaaacctggtagatttagtttcaagagagatacacaatcccactataaaaaataaaataaaaaggaagagcaaaccaataaatgctttgtgaacagaatttattggtttgctgttcaatttgagaaacagatacaaaatcccactataaaaaaataaaataaaaaggaagagcaagtattttaaatatctgtagaaacagaggaattgaaacgtacctgtttctcaaagtactctagctcattttcttcagacggaacattctctaaaatatggcttatgggatcaaattcctgtttgtatgtatttaaaggggcatctcagaaaattaattaaaacttactcacagaagaaaaaattgatattaaactatgactgcacaatagtctaaacaacaagcatggacacttgggaatggtttctaaaaattagtaaaggctatacttagtgtatctgaaattcatatatacaggaaaaataagctcgtattgtaagtaaattttgtagcttatgaccactccttgatttaaaaagatggctatcaactgataagtgcatgtgcatcaaataaccaaatcagcattaaaaataaaatcaatccaacatgaaatagtgaatataagaaagcagcacctcttcatagaagtcttcttctagctctgccaccacttgactctgaggtctgctgccatatatcgagcttagttcttcagagcttgatgataggctatatctttgatgtgggggcagacctgcaagggcacgagcaacagccgcagcagctgcagctcgttgaggaacctgaacaaagaaagggataaagaacatgcacagtcaagtttaaactctttcaataaatgagttaggtaatggtcaaatgtatcagcttaggtgattgtatacatgacataatttggaatacatatatatcttgacataaatacaaatttataatttaccatgaagcgacttccatacaatatctatctcaatatttggttaaatgcttttgaaaaaagatgtgcaaacacttggcagcaccactacttatattaattatgactatgggtctaaacataagtgccgcataattttatgcaatgcaagtataagtttctcttttattttatgtaaagattccttttaaattacattatcaagaagcttcattttttatgtaataaaatatattctacaaattttgctctccatatttttctactttcattttcttcctttaataatactatctgcttctgaaaaaatggtgagaacctggggcaaggagcacctgaacaaatcatattttaatatatcagagaataagttgtatatttatattaagatgaaaagatagcagcctaaattacagttaatggtgccaatcataagttagcatctttccttcgccgtaagtgaggactcccaatacatttgggaggaggtcactcatgaacatgtgaactttgtctctttttcaacaacaaaaaaaataaaataaaattagcatcaaaacagcaaaagactaaaatagccgcacaatatctcactctctcacgaatggaaaaaagaaaaacatcttcaaaaacccaactgtttctttctaaatataaggcccaaaaagtggggaaattactgtggcattaacacaaaatattttgttaatcccagacaagcagttgtgagtattgttactgtaagaaattaaaaagaaatgtagggaaaggcataatccccagttgtgagaaatgatttccatgattaaattccacaaatcaagtcagttccaaccaattcccaacagagggcacaaatcctctaaattttcagccaaacccattatattaggatggtatttaaaaatattttctttgttataaaaatgaagatacagtaccctaattatattaactagaggatatcattttgcagccaatttaatatatcatacataaattgtgccttagccgattaaaaatataaaaaactattacaggtgatgaagcttcagcagtgagttctagcctactgcagttagtagataatacacaagcaacctaattctaatagatgaaggttccccctgtacagcattgccaaaaagaaaaaactaaaaacagaaccattctaagtaaactctttcttaatatattgttttgttactaatttcatccacaaagcatcaataacacaattttggtaactcaggcgttagttgattcagctttttactcttttaaccatgactatgctgccctttaacaaaaccaaatgctctctcactaaacaatggaaaacaaaaacagaaattgaagggaacaaactaggcaactgcaacatgatatatgaacccattctctatctctataagaattccaagcacattttcagtagcttactcaaacaggtctcattaaacaagaaacatagttaaattgaaaaggttaatttcaatatttcgctcatgccttaaacagttcgataatcaaatcctctaattcttgagccaaaaccattatattaagatggtatttaaaaatattttcttagctataaaaataaaatgcaatgcctaaatatattaactagactagaggataccatgttcacagccaatttaatatatgtactaccaataatcatccataaattgtgccttagaaagacaataaaaagaaaatgattacaggtgattaagcttcattagtgagttctaacctactgcattgccaaaaggaaaaaactaaaacagaacactcaatatattgttttgttactaatttcatccacaaagaacctctcatacaacttctgtaactcagctgttagttgtttcagctttttactcttttaaccataacaatactgtatttccgtattttgacaaaaccaaatgctctctcactaaacaatggaaaaaaaaaacaaaaacaaaaattgaagggaacaaactaggcaactgcaacatgatatatgaactcattatctatctctataagaatttcaagcacattaagcacatttccagtagcttactcaaacaggtctcattaaacaagaaacatagttaaattgaaaagattcatttcaacattcctaaaacagtttgatcatcaaactcaattagcaagattcaataacgataaccataaatattagacacattgcgtaaatttgattcaagaatcagtaagtatatatacctcaggacgatcggaagtagaaggaagaagaccaagcgatctagcagacctaacggagctcaaaatcttctcaccaaccttagataaatccattccaccgccttgtgacaatagaaagggaaccaaaaagaaaaccct

SEQ ID NO: 17052 - DNA, 5659 bp, Cannabis sativa
tttttttttttgtaagattgttttgctctgatttttgatgagaaccatagtattacatgttatatatttataggctaaaaaaagtagagtaatatggtactcttatcaccttatctattttatccttcaaaatataacattaacatatataggttttttattttacctgtttcaaattttaatatattttattcattttaaatatatgatattaatatttacattgtgtaattcatatataaaaagtaaaattgaaatcttaaataatgattcaaatatgtttagattaattaataacacgaataataaatttaaaaaaaaattaaatagagaaaaaatttagattacccaatataatgtgttttaaatttaattattttgagttgtttaagaatatgtgctaagatattatatatgtatcgttcattaatttgatgctgtgccctatcgccagtatttgttttctcaaatctgatccactaattattttgagacacattataaataataaaatggtatgtagactgttacattaaaatatacattaatattaaaatttaaatatttactaacaaatacttattttaacccagatcatattttagtctatacagtagataaaattaaattttatttaaaattaaaaatgtccaaatgttcatttttttatattattatatatcctacctttagactaatttatttgtgcttttgtgtcaaaaagtacaaaattacctgtctcattcctatattttattttaattttgtttttattgatggcatgaatcccatatattcattatctttgttttgagtgtgatttaaatattaatgtttatctcttttataattatggataatacttgggtggaggctaataaacgtaaatacatattaatttaacttccaatatatataataaatttaatttaagaaatagtggtaaaaatacatactttacatttgatgtagtcatacttttttatattttattggaccacgtattaaataagttaaaaacaatatattatttctgagcggttgcttaacggatttaatattgtaaatctgtgtgtgtcgtgcaaacccaacctatattataccatgcttttttaaaatatgaatcgtagcatgccgtgctaatatttttaaaggataggcccaatgtacgactcgtaggcttgatatttttttatgtcgtttttgactcgtgttagtccattttttttaaacaggccaattcattttttatattaaggctcgtaatttatttttaaaattaataacacaattaggaaactatatttatttttcatattcaattacatttatataccttttgaataatatattactgataatattaataattattagaattttataatttaaaaatttagttaaatatttaaatttttatgataaactttacaaataatttaatatatagttttaattttatattttttaataattaaatctaattataaaattatgatattctaagttatatttaaaatttattattattttgtcacgactagagccctaattatgtaatatctataatataggtggtcaaatatcacactttaacacttctagaaaaataagacttacaaatgatcccttaatatatattttaaaattacataagatgtgattaaaataatggagtaactcttataataaattaaaaatagttgtaataaaataagatcacttgttagtatatatttacaactataatattctcacaattatatagtcactaaatagttagaattaataagctggaaaataccaagataatacttatatcatctatcatattcctcatcccaaaccggtcatgtttatgtaactgacacagaccatctgttaataatcagatacatatccaatctttaaagaagagttaatttataattaaggtagtactaagctaatctcgtcgttctccatcaacgacttttccacatccacaggtatccaattgagtttttgaaaggaaaatatagggggtgagcttataaaacccagcaggaagaaaattattatcaaatgactagtagtttaataaaaatctctgcatgtttaactctttaaaaataaaatatctcatcatctcatggataaataaagtagagagactacaaataatcacaagagataagctacccatgcatatcacactgtccactagaccccttgctctcaataccaatcataaaaaatgacatcttaaactgggtagtcccacctgataaccaccatattatcgggactcaaagtcaagtcacttctgacagattctaagtctttcacctataggtgagtgcacacctgttctacccatgatgatacagagactaggtcatgaaacaataatatgcacaaaatcatgatcaacatgactctcatcagaaataaatataaccaaaagcaggcaaacaagaatgacaaaagaatatattccctttttattttaaaaaatctgctaccatgcatatcacattatccactagatccctagctctcaataccaatcatagaaaatgacatcttaaattgggtagtcccacctgataaccactatattatcggggctcagtcaagtcactttctgtacagattataagccttttacctacacgtgagtgcacacttgttctacttattgtgatacagagactaggttgtgaaacaataatatacacaaaatcatgatcaacatgactctcatcagaaatcaatataactgaagcaagcaaacaagaatgacaaaagaacatatcttctttttattcaaaaaatctgacagcataacaattgtaatttgaataaatttaaaaatcataatctacataaataattatacaaaaatatatttgccactcaatgtctagttcaaaaaaatatgcagatcaagttttcaattttttaaaatattttataaatcataaatatttggatatatctaatgtcatttaacacatataaaatcaagtccaataatcaagttgactccccacctcctaacgatcgtaaagctttctccaaaagagacgctcttaagcctctaattgttaagttcagatagcttagtcactctaaaagttactttggcatgcgaactccaactaaataaataatcattgtaatatgcacacttcaatccgagtccaacaatatacagcatgaccatgtttaaaatttaaagttctaaaatctcattttataaacggtgcatattaactatcggtggcggtagaactcggtgtaacgaaaaatgttaccaaaaataggggtagtatatatcaaaataactctcttgatgagtagatcacaaatgtacaattcattagcccaaacaagcaccaaaattatcagaaaatgcttccaaagggtcggagatactcaaatctcaccaggaaaaagtaattagttgagcaaaatgacttagtaggggatgttcttctcgtgacgctgatttcaaatagtggtcaaacggtgactggagggcagcgatcgaagcttggtcaatggtagtgatggtgggtttaagtgagtaggaaagaagaagaagaagaagaagaagaagaagaagagacaaagagagagatgtagcatgttgggcagattggaaaaagatttttttttttgaaaaagatattattctaagtgggtcccacaaagtaattattataatatatactttgtttatttttgacccattattacagttttatctcatttttaattgacaaatgcatatcttttttattattaataatattaagttatagagttatttaatgtatcgtgttgtgctttttagacttgtctcgtgttgtgccttttagtactttatttacatttatgtgttgtgtcattcatgttagtcgtgcttaaacacataattattgtgctatgtcgtgtcaataagtagcggattgtcatggatcaccctcgctcgctctaagcttcttcttctccattttctaggatttctttctgtctttctcttctaaaattgcgacctccttttattaaaatagagtttttttgtccgaaattgagaaaagacaaatttatttttaaaaatttcaaaattttaatttttaattaaaaaattaaaaagtgaaaatattttatagaaggtgtttttagaatatagtttcacttttttaattaaaaaaaatattaaaaaagtattacgcaaggcacttaataaataaggggcaaactaagataaataaagattgcttctgtactaataagaggaaaagtaagtggataggattggatcacttgttcttgttaattatttggtttgtaataaaatttctagcttacataaaaaaaattacttagctattaaattatgatcattctataatattataattttgtttgtttgttccccttaaaaagaaacaaaaaaaattgtttgtttgtttacttgctatatatttaatttagtttgttctatatattaccagccacatatatataggaaaaatttgaataaggtaataaatgatattggctctttcttgaaataatgcaaggccggggacccttcttgtgtttgatcatttgtttttgacctttgggttggtttaacatttaccacaatgaaattgttttattaatcttatcatgaaaagaaaatgatagcctatatatgcaaagggatccaccagttatataggttattgaacctttgttggaggaacgttagtttgaatctgatcttttattgggtatgaaattttagagaggcttaatttacacgagattgatcaaggggtacctatttgttcatgaggaaggctacgatcgattctggtgggtgtccgggtgagggccagggtgggcgatagggtccaaggccaaggtccgggattgtgtttgggtttcgagcctaggtccgggtctggggttcgagtttaggtccgggtccaggtctatgttcaggttcgaatccatgtttgagttggttctatggtctggggatcgggtctgctgggtcaggggcagggatccgatcccaaggtccaagtcaggctcaaaaaatattttaagaaaaaaaaaaaattaattttttaaaagtgattttttttatttttaaaatttttattctaaattaaaaaactaaaaagtaaaaaaaattactagaacatattttcaaaatatattttcacttttttttgttacataaaaaaatctattataaaagtattacaaaacacaacccaagtaaatgggggcaaactaaattgattactttctattgaattataaataaactatgaaactaaattttgtttgtttggtcccttataaaaaactatttgtttgtttacttgctatttattaatttaaatttgttctttttttttttttttgaatggaaagttaaattttattaaccatcaaactccgttaccaaacaaggtaacaaattggttggaacatcctccaaaccaaagatacaaccagaatataaatgagaagcccttgcgaagttatgagctacaacatttgctgatcatttaataaaataaacactaacatgacccaactctaacatgagttgtttacattcattgataatttgaccaaataaagaaaccatatggatagagctgcg

SEQ ID NO: 17053 - DNA, 4844 bp, Cannabis sativa
tataagaatatgagctacttcacttatcactaattggttttaagatagaatcatataattctcaatggtatcagaatcatatctcttacgagcatgtgatcctatcagatccattatttttaaaattaaaccccataattctcaacagaagattattaatgaatataagtagcccacattcttatataaatggttcaatatttttgcatttaatctatttgaaataatgtagtccaattctatttaaatgtatggtacattagagattttcttattatacaagagggaatatgaaggattacaatcaaatatacaaaatacatataaatgtattacatcaagattataaaataattaaagaaaaagaaaaaaatctcaagaacacacaatagatttgactaaggctcaaacacttttgtcctaaaagttattttctccctcacatagatacttagaaaactttagaaacacttctaagaatttttaagccttataatatgcttaacctagctagtgtctatgaatgagcatctcctcacaagattctaactacacaactagtggtttcaactaggctatttaggatttttaccgcctgaactgtgatacatgtattattgcgtcccatgaacttttcagtctgttacaaatagtccctgaactatttacagtattgtaaattggtctttctgttaagttttgtcacacttggcaaagaaagtgatgacatgcatagacactcagtcaattgtcacatcaacgtcgtacatgtataatttaacatttaaaataataaaaattatgtattttttttaaaaaaatcaaaatcatttaatgattaagaaaactacgtacaactaaattaaaaaaattaaattattattttcaaattaagtacacacgtgtcgtttatatgtcactgacgtagcaactcgctaaacaagcatgttattattttgtttgccacgtgtgacaaaatttgacaaaagagctaatttataacactgcgaatatagttcagggactatttttaacagactaaaaagtttagggacacaataatatatacataagtcatagttgtgagacaaaaatcgtaaatagcctttcaactatataccttacaactgtagaaaaaaaaactatatatatgtcttataagtgaacaaatgatcactattaatagaggcttaaatcctataaatatatatatatatatatttatgagcatgagtggttgtcggaagtttttcataagtgtgctacacctagaggcaaaataagaaataaaatttaagtgagacgattatatatttttatagtaaaatgctagaaggcacttatattacctaatacccttataaagtgtcgtaccgctattcataatcataaaatttataactcatctcactattaaattaataaattgagttactaatcatatttaaatacgattaggcatgactatcgtattctaaaaattatataacatggagatagagattaggcatgaatatcatattctaaaaaaccctactcaattaattctcgcctcctaacattataattttttttctctttttactgttagttataacaaatttttgtaactaaaaaactaacattaaatgttttcaaaaaaaaaaaagaaaaactaatattaagtttatattattatttaaaaaaattaattgtaggtaattttttatatatatgttacaaaaattacaatatatttgatcaaaaacaaatattacaatatatgtgatcaccaatgcccctttagttgcatctaacaacttatatctactatataatcacaattaacattttactatgattaaaggtaccattttgtcaaaagacaattgtgaagaaaaatttgtcattataatttatatggtgattttttaaattaataataatgatgatatgtttaaaaagaataaggaagttgtgtagtaagataatcctataaaactaattgttgcagtactggattagtggtccgaaattggtagctgctgatttagtgttcatgcataatggacactcctcttgctcttctctctgccgaattgttagggattagggcatgccaagttcgagctctaggtgcacggtggagttcgactaatcgcatgcatgcggtgatgatgttggttaagaatagatcaataggattgtgttgaagctgatggagttatatccatgatattctttctctttgcgaaaattctgatgtgatatataagatatttgttttgagtttagtgatcagaacagatttgtctttaggtatagacgagttaagcatatgcttaaggtttaatttacaggactcaaaaaaaaaattatgtaattttatactactatactttgctcattgtttatctaattaatttgttttggacaaaaattaaaaaagaaaaaggaaaaaggaacataccccacaaatgtcgcaaagtataagggtacaaaaacatgattattagaaagcaaaaaagaaagttaaatttaatttgttatgtaaaaatttataaaaagaaaatgtcaaatcttagtaagtgttgttaattttagttgaataattaacatgtgagcctccatttcagggaaagaagaagacagaaatataagcatcaaacattaataataattatataaagagttattctcctctttttccaaaaaaacaattaattatatcatatatcattaacttcttttcatttttctatttttcatgtcatcaataattcataacacaagccctattctacaatcaattaataacctaccctatacatatttatgcaagttgatcaaatcgatatatggtcaataattgaaggttctattatttatccggattgttctatctttttcttgcatgatattatgagccaataaagaaatatgagctatatattgggtctcatatatataatattttttaaactacttagaaatttacattatatgtatattatatgtgtttagggttaataaggtgtgagctagtttttttttttttttgaaagaacccaagttcaattactaagaagaatggatggggatcagagggagatttccctccccttaaaacaaaccaacaagattgccagaaaatttgactctttttgctaaaccatccacacaaaaacagttacaacgcttaacaaagaaaaaattacaaagactaaagctattataaggtctaaaatagaaaaagatagatctaaaagttgccaattaggaatacgcctcctctattctaaagcttggactgccactttagaatctgagattacaagaatcttatcccaattgttatgagccacccaagtaagagccaattgaatggtctttctctcagcctctaggggggttgaagcagtaatatgctgcagattaaaggcctaaaaactatctctcaggtcgattttaactgctgcaatacctactgcatctctcgaccacaaagcatccttcatttctgtcatagtcaatgtgtcatttccttacaaaatcgtgtctgaaaaatgttcatacatcttgagcaaggagctgagctatataatttcttggtcttcatcatcaatcctcactctaagataattaagataatggaagatcttgttaaagtcatctaaatgtttcctcaattttctgttttcatccaatcgatgtgtccacgatttcttcttgagatacaacttatttgcaagatatttcttcatgtagattaatgatataacttgttccatagcccaagacctttttcctcatttgtaacctcccacaacatttcttttatgaggctaagaagaatggaattatgtgcctttgcatcaatatcaaatttattctttctatctttaatgagattcattgattcaacatctagagcatttgagataccttaatgaaccagaaaagcattcaacttgagcctccataaactaaaattattggaggcgccattgaacttgtccaccttaaatttggttgtagccatttcagacttggttcgtgaatgattaaatgtggttcttgaaggtttgtatttagatcttgaaaccttttcttagagcctgtagctctgataccatttgtagtaaaattaattcactcgaacaaagctgttatgaacaataacagcaacaagaaccaactaaatcgaataacaataacagttatttaccgagattttgggaaactaaatatttagaactaaagaaagaagtgaaataataaataacagacacgaatggttgaagtgtgcatgtatcaagaatttcttgaggtgattttctcttacaaatgaaatcaatcaagaaatacaactatgtgtgaaatatgaatggttgcctatggtgtgtgcatcatgcaagatgttggtcatcgtactaaagagtgtcgtaagaagaaagagctgaagaaaaagtgggttgtcaagacccaagaaaccatcaaacaatccttggtggaagtgcataatcaaatggataatgaaggtttccaagtggtaaaataaggtggtaagaggccacttattgctgaggctctagctattattgtcattaatagtttccaatcattagagattgttggcgaatgctcaaaaattatggaaaaaggaaatatgaagaaaggagggggagtctcctactgcaattggataaggtgatgtcttggcatgtctaagggatcaacagtttccaaaaacaaaaagaggtcaagcaattaatttccaaacacaaggtggatctggttggtcttctcgagacaaaaacaaagattgatagtttaggggttgtatatgtaaacatgtctgatgg

SEQ ID NO: 17054 - DNA, 3173 bp, Cannabis sativa
aaatcaaatttaatataaatatatataatgaaattgataaaaaaaactatttctaccaaacaaagggatatacattccatttcattacgccacctaaatgtatttgtttaataacacttacatggttagtattaccaataccaatatatatttatagtgtattgttatagcaatgcatataatcatatcttccacgtggtgatcatgtagcacttgtaagcacatacatatatgatttgtatataacgatggcaattaatttttttatatatactacataggtttcgaccttttatatataagccataaaccattttgtgaaatgggtacgtttctaacattgctgatttaaaatgaatgaaaacagagatcgatatatatgttgtcaaattatgttccatgcaaagtacaatgcaactgctcaatgttggaaaccaaatatataatggtaaaaagaaagaaaagtgtgagaacccaaccaaacaagattcttttaaatcagctctgaacatattatatgtatataaatattcatagagagagagagagagggtgtgtgtatgtgtgtatagagcccactctatagagaagagagaagcagtaggtttaagggtttaagaggcgtaatgaatgaggacaataaaagaagcaaattataagaagagaagtagttttcgtctctctcttgccaaactctaagacgcgtgcaatctacacgagcccactcctaaatagacttgcatggaccactttcatattttcttttttactgttaataatgttaatgacacaccaaattcccgtgacacactactctacacccttctttttcacacatccacattatccatttagactttgtgttttttctcttctttaattctcatcttatagttttattagggttattatatatatatattacatatgtgatggtgatgatggtggtggtttggcatgcatgccatttccttggctttattatatttctcttctttttcgaatgaggagtcccctagtacactcaacattccatgttccaaaagttacaatgggacagagataaatgtaaatctggacctgaaattatgaattttgagtcagaaccatgaacccccccaaaaaaaaaaaaattaaagctgatgacaaaaaagaaaaagatatacggctgcgattgaatattatcaatacatacatatataaactgatcctcctcatcatcattatcattatcatactataggcagcactagtagtactagcacccatgcagaaagtaagaaaaagaaaaagtagtatagtagtagtagaagaagaagaagtaactgaattaagcagacaattgagtttaaagaatttcattaatcaaaaagagaaaaggaaaacaaaaatggaggaaggaaaagaggtgggggtcctcttgtagagagtagctacagagggtgggaccccatgtggcttaaaacccattctagtatagagagagaaggataaggccaactctaatggattgcctaatgcctatattggtgctggtaaatcaagtagagtcatatgacaaagctagagggaccagagattgccatcccctcctccaatttattttttatattttttttctatttttctaaaaattatatttaaaaaaataaataaataattttttattttatttttctatattggtcatctataagagcatctccaatacaagtaatgtctaaagttgtcataacactccaaatcattctaaaatataatattttattttctctctagtccacatcattattggccacttcttactaaaaatagaaaaaaattacacttttcattttcaattttaatttttaccatttttgtgttattctttaattcatatacctagttttatagttatattttcattatgtgtgttagaaactctaattttgataagttatgtgagattatatttggtactttttttatataaaaaagggtattcatcaataaaaattattttacaattatatttaattaatgtgtgataaaaaaaagtacttctggacttattcaaaatatacttcaatactaaggaactctataactagtgtctttttttttttttttttaatattttatagattaaaataaaagttagatcttattacaaatgacagttcctggtatagaagatggattaaccttgctagtaacattgttagcaaacacccatttaactacgttataggcagcgaaattaaaatctctaggaataaacaaaaaattacagcttaacaaaaaaaaaatagccaaattataaatgatgtctcacacactataatttaatatatcattaattttatttgtaatatttattttgttattgtttttttttttcagccaaaaacttttattttgaaaaaaaatttgaataccacattgctcctatggtagttgttcaactattttactccaatggaatagctaccattaaaagtagcgcaccccctcacatatactgtgatgagcaactttgatatatatatatatatatatatatatatttatagcattagagctatttaagtttctccaacgcttaaataaaaagtgatttgtaaggttcatcagacaactaagtaaaattgtctccatgttgccttactaccttgacattgtttcagattaaagtaaaaatgatagtaaaaaaaattatttaaagaaaatattgtaaaataattagtaatttttcttcatgaaaatcttacgctactaagttgtaccttttaaaaaatacgacttattaataatatctttgaaaatataacttttacattaatgtacgtagttctcttttatcatattttattcaattgtttttatgaaatgagtgacagaacagttgatagttggcaaatagatataaattataatatacttttcacttttttttaccttaataattaaaaaactaaaaattaaaaatattaattattatattaaaagaaaaaacatttcattctattaaagtatataattcacatctacttgtcaattatcattctttgtgccatgaaaatttgaatagaatgtaataaaagaactaccttaatgtaaactttatattttgaaatatattattaacaagttgtatattttagaggcatcacttagtagtataaaaagtt

SEQ ID NO: 17055 - DNA, 5430 bp, Cannabis sativa
tatctcaatttaggtcgtgcatgcgcattatttatggtgctttttattatatatgttttgtaattttcttagaagatataattaagtatgatatgctattttgacgtatatcataggaaaaataatagtattactgtatattatgaaaaacacaaaaagttgcaaatgaatatatgtgtgttgttaaggctatcttctcacaacatcattatttacaacactagtttcattttttacatggatatttggacttggagtatgcatgtaccgaacatttgagcatttttggtcacgaaattcaaccagaaacatgaagatgttgtaattgtaacaaacatcatcaacatcagtaaaatagtctgtgtctgatgttttttttattattattattattattattttgattggagaatttgcattcaaacaaaatcaactgttagtagggaacttaaaaatcgaaaacaaatatttgtccaaataaacgcttctaagaatcacattaattcagctctataaataggcaactcaagcagctcgcggccacactcatcagaaaattcccagctgcacccactgcgcaagcaccccataccacaccaaggcagtcctaaatactcgcgcaaatataaatttatttgtgtgttctgtcctatgtcgctcgttgtgatttttatattacacttaccagctatcaaaactttaatctcatactaaagttttgataattggataaatattatgtttggtgtaattaaatcaaaaatagaaaagcaaaagttagtgaaataacctaataatgaacatgaaattaatggtatattttattaaataatcttatttagaaaaacattgtgctctaatctcaatggaaaaaccacattgcaagtaatgaaggaggaaaggtttaagttttgggctttaagctaatatgcaatcttagttggtctctaccctttattattgctttagactttagcataaaagcaggttcccacttccctcaatcagtgaatgaggaccctaaaccaaacccaaacaagaaactaatccatctatataattttatatacatatcataatcatatccatacatcacttaaatggaaaagctaccagtactatttgcatcccaccacatgttaatattctttttttatatatgagctttgcttttttccaaatatatggtttattttttttcccaaggtgatcaggattgtgatctttctttaaaaattgtatgtaaattcagcagattccattacctgattaacatatattagcattagcaagttttccaaggtattatttaaaatgcaaattcagcatattccattaacaacatggaagctcttactttctcataattatttaatactttggttctcttcttgacttagtgttcaccttttttataaggatcacaaacaaatttattatatcattgtccatatatttgtttttagaaattatcatcatattttatattaataaataaatgatgtgtgtattgatgtgaaataagtggaaaatgtatgaaataagactacccttctggccaaggacaaaatctaccaagaaattagctgttgatgaattcattcattcattcatccccttcctaccaagattacattagggtcttttaaaaaagtattttgtacccatgtcataattgtccttttctttctttttattttaaaccaaacagtgaaaccagtagtcatgactcatgtgttgaaaacttgaaaacgaccactctctacagatgaagatcggatacggaagaatgccaagattcgagtcaattaatcttcttatctaagaaagtaaagaatagatttttttttttcctttatttttttcttaaaaagaaattgactaggtgagtctcttctcttctttagtgtaattcttgcctgtgttttatttcatgacgcgtttcagggcaaacaactagtcaaattttgaccattcattcaagttactgaatcatcatcatactgttatagagtagacttggaatttttacgacatactcagacaacgtcgtactttcctgtcgtgaatcacgacccaaattatttagacctaaaacacatgagccatttggtgctttcatacgtaaacagaaacaatagtgaaatttccttagctttatcagcccacgactggagacagtcatattatatttattgtatatataatttataatgatgatgatggtgacgatcacgataatgaaccaaaccgataactaatcaaaaaatcccaagaactaggctaaagcatatagcctaacttaattaacaaagaaaataccacgagctctaattaaaatatacaaattgcttgcttgcgtagtggtcataacatggctttaccaactaaaaataaattgtttaattgttaaacacctaattgggcaaatttaatttcacgataccaaaaggaatccaatattttcttcttaagaaaccaattaggggcagcaatatatattatatagagaacttttttttttctttatatatatatatagtactgtgcttaacagagccagaccattcaatacaagcatatttaaatagatagagaggggccactctgaatctgaaccacatcagaatctcatctttactggatatttttacttgtaaagttatgaaagccactagtgaattttaagagtttgaacccaccaagttgtgataaatggacagtaccagtagggaaaggacctgttattttcagttatttttttttttttttcttctatcagctaccacaacataaacagccaaatcaaacaaaaagcgaatctaaacacagctagcacaaaacaccaagaacaggacataaacattatcttgagtctgtacaatgaacaaccaggatcaaattaagtaacctactttaattaatttacctcttttttttttttaaatgattctctctaaacccaatttgtcatttctggaataaaaatatataataacctcttttaactcatatgactgagttaatttccagcaactttctcaagcaacagtgatgaagctatcaccattggcgaaacttgacatcgattggaaagccgaatacctagctgccgatgaggatgatggtgtttccctaggattcgttgttggcaaagctagcttaagagaaagaggtgatgggtctacagctgatttcagattcaaattaaaatcagctatagttgtaccatgagggatggaatgcaaggctattgggcggacgagcttaggatcagctgtggtgttggtgctgttgttaatctctggatgtgtctggcctaatgacagattttcaattggagagggtgaaacggtagtatgcagagagaacctcccactaggattgaaaggctcaggattcagtggtggtaatggatgagaaagtgagtgacaagcattatcttgattatggtattgctcttcttccattggaattgccgttacctaatacaaaataaataaaagaaaaatatgtaaggatgaatttcttttgatatttttcttgtcctctaatttctctttggttgttgagaaaataaggcaagtgcaaagaaaagttgcgattttttttttgacaaaaaaaatattagatgctttgctcaacaaaagctaaatctattaattattaaaaaaataacttatatttaaatccatctgattgatttttaattcggatatttcctaaaaatgccaaaaacatacaacaacagatattcaaattcgaaaaaaagaaatcgacaataaaaatccaattactttgttacttgatttagttatgatctgtttatatcagagaaaggaaagtaaaaacaaaatatgccaaaataatatgtatctaaaaacataaaataaaattcaacacagaatcagcatttttttcctaatattaatatttccattatccctatgcaaaaaatacatatacattttaatcatccccagttgaacattttcattgtggcttgaaaatagtaattaatatagaaaaaacaggctaagagggttgaataattaccgtatcggtggtgatatcgaagaggctagatctacggcgtcggcgattatgattggtccggcgaagaaaatatttctgagcatggctagcaacctgcgtaggggttcgactcttcacgaagttcctggatattcctcgccaatctcctttcccaaccttctgtaatccaagcaagaacagcttgtgttcttcttccgtccatggaacacctatttcatcgttccaaaaaaaacttcaatcgcttattctttcgagaataataaatactgaaaatataattttcttctcaattagaaaaatagacatgcacagcctaaaactatacagattaatccagcagattaaaatcattcccaataaattaaccagtgattaaattaatattccacaaaaaagtcttcgagaatcaattatatctcaataaattggagattaaacgacattaagatctgagactgacctcgcttgcgctcacgctcacggttcccgccggagttgtggacgacgtcgttatcggaggcataacctggaccgccgtcgtcttttccggcgttattgttgttgttggccgcaacagtagcggcggcggcaacctcttgaggctgttcgtactgagagagattgttcaaactcacactcttcctcatggagtcaacaactacacgtacgccaaacagcatgaactcgccgacgccggaatcatcaggaacggccgcggaggatgagtcgttggaggaggtcggaaatgacatcttcgagggaatcggcgatgatctccagggccgtacgatcggagaagagagagaaagaaggaaaaaagaaaataaaccacgcgcgtgctttacaccactgtggaatgaagagggtgagaggtttggtgggagtagtatttatacggagagaagaaatgggttgaggaggttattgtccgaagatgatacgtgtcaatgaatcattagtcaatcggtttctattttgtatttcgtgctgtctatttaatatttataataaaataaaataaaatctctctcatcttcaattactctcaaatcaattactatttaattggattttttccatcggattttcctgctgtcactttttacacaaaacaaaattgaaaaaacaaaacaataaaaatatttccataaaacaaattatttcctttcgtttctcattcttagaaactttttgttacttaattatggagctgttaaataattttgagatttaaatttaaggtaaaaaaagggtaatgcatacttgaactatagttaaataaatataagtttctttgaggtttttttttttttttaaaaaaaaaaactttaaagaaaattttgaggtatactaaataatacctttttgtaaata

SEQ ID NO: 17056 - DNA, 3510 bp, Cannabis sativa
ctgatctacttatgatgacatagaaaactaggctgtggaaacaacaatatacacaaatcatgatcaacatggctcttattagtataattaaaagcaggcaaaataatagaataacaaaagaacatatttcctttttattatctaggaaattcggcagcataacggttgtattttgaataaacccaaaaatcataatctgcataattatttgtacaaaaatatatttggcactcagtgccccaaaatagtccagaaatatgtgtagattaagtttttaatttttcaaacaatttgcagatcataaaaagtagaatatgtctaatgttattcaacataaaaatcaagtccaataatgcaaattgagtccctatctctcccaagtcgttaaactttgtccaaaaaacgatcttaagctctcaagtcctgagctccaatttcttagtctaatcttaaatatcactctcacctataccatcaaatggctaaataattatcatcattacattctactttcaaaatcgagtctaacgacacataatatgactatattaagactttggagttttaaaacctcacctatgcgatgtaaattaattatcggtggcagtagaaattggtgtgctggaaatatagtcgaaaatagggatagtatatattaaaataaccacctcgacgagcagatcacacccatgccaacaatttgtcgaaacaatgcacaatatcgctagaaagtcgtcgaaaaggggtagagctacaaaaatttcaccgaaaaaagtagcgggctaggcgaaatggcttagtgaagttgttttcctcgacaagcttggtactgctttctgaatgggcaagtgcatctgatgtagcattatgctctttggggatttgcctgattgtgtagcctttgagctgacttagcacgtctttgatttatctcaagtaggccaccattttttcacctcgagttgtgtattcaccaaggacttgattcacaaccagttgagaatcgctaaatatgtccagttggatgagtctagtagtgaagacgtgcgactcgtcaaacaaacaccagaggtggctgaaaaatccgttcaaagtttgaacctccaaactttgacttgtgatcccgagctaacggcaacgaaaagggcagcgtcgcttgggggttgagtctagtggtgaagactctctactctagtattgaacaatcaattaccctttgaaatagtttactaaaaatctcctaattaaattttttttaaaggttttcaaagcagcttgctatccttgtattcgtccctactagacctacgaatttcaatatcattcagtcaaatgcgggaatcttggctatagtggctcacacaaagaatataaatatcttagcaccataggcaggttgtatatctcacgaaatattatctttaatgagagtgattttcctttcaaaatagactttctaagtacatattgtccaaaagaacaagtttttgttagtgtgccatcttggtcagcgtctttcctaatttctccagatatatgtctctcaatcaagtgacacttgcaactcctacttctcttgatcgcaggtatgcatctttaagtttgagtgaagcatctgacgtccatctcttgttacttcacctcaagtaaatggctaaacacattccccaattatttctcataataattttcaacttgatataggagttgttacatctaaattatctttctctttcaaaactaaaatttaagtttcatttaatataagctataacatcaacaataaaactttatacaaaattgctaaatttattaatgtttatgcttaaaaactatacccaaaaaagtacttagcggtaatttatcttgtgttctaaaaatttgaaatggtgataattttgtgaagaattgtagtaaataatttacttataagaaaaaatattgattgtttgtactattttggcaataaaaatgacgaaataatttgaatggataagaaagtgatatattttggttgacagaactcatgaaagaatgaaatggaggttcaagcatagagcatattcctcgaatatagaaacatatttaagcatctttagtcaaattccatcaaaatataaaacctaacaggtgaaccaactttttcccaatccaaaatcaggccacaaactctaagtagggatgaacatttggactgggtttgacccgaacccagccaacccgctcgagcccaatccgtgcaacttaaaaattggaagaaacacgtcggtaaacacgtcagtaggggtgagtgttgtgtggggttggcaatgaattgataaaaaaacttaaccaacccacaaagtgcgattaagtgaaaatcttaatcgcacggttaatttcatattccttaattttaaaccacattgtacctatatgcggtgcgaaatattgcagttaaccatggtaaaattactactttgtgctgctactaataatatataaagaaataagaattaaaagagaggcaatgtcataatcaataacatgaaacatgtatttatcttacactaaataatttttttaatcaatgataatgtataaaatattaatattatgtatatgatgcagcgtggatactacagttttttatatttgttttgcttcaccgcaacatatcgtgatgatagtgaaaaatttaaccataatcgcaccacgaatgaaattaaccagaccacattgtacggtgcaatgcagataatgtaggtttcatggttaagcatatattctactcacccttacccatcagtatcggacatgtccgactaaacccgttcattgttaccgggcaagtaggggtgatatttttacatatggtcaagtccgggtctaacccgtaccctcctgttgacctagttgaattatataacagtttttttttacttaaacctataaaataaaaaccctaacccctcccccctctcccaagtgaaaaccaaatgcagacccttagcaaaacctaataggctcgtcgctgctcagcaccccctctcaccaaaccggaccactacctctcccctgtgattcacccctccccctcctccctacaatttttagacgcatgcccccaccgaaactcaacatgctcaccactgctcaaccacaaaccccccccacttgcaactcctacttctcttgatcgcaggtatgcatctttaagtaggagttgcagggtctaatccgtatcctcctgttgaccccgttgaattatataactgttttttttacacttaaacctataaaataaaaaccctaacccctccccccctctcccaaagtgaaaaccaaatgcagaccctcagcaaaacctaatatgctcgtagctactcagcaccccctctcaccaaaccgaaccactacctctcccctgcgattcacccctccccctccctcctccctacaatttttaaacgaatgccctcaccaaaactcaacatgctcaccaccgctcaaccacacccccccccccac

SEQ ID NO: 17057 - DNA, 2427 bp, Cannabis sativa
aaaaaaaaaaaaaaaaatactcataagagcaaaacacctatcatcttcttcttcttctgtctcaatttcataaattcattagacccaaaagccaaagattctatttttatgaaacccgataaaaaaaacatttggagagagagatagagaggagaagaaagtggtggctgagacaattcaagaagagttccaaatcgtggtggtccgtgggcagagctgatgccctaacatgctccggcgagaccccaatctgagctacaggcttcagaactcatcactctcaaacgtcgtagacattcccattccatccacgctgaccattgctggactcaaagccaaatcgaagctgacttcgactcaccaagccaagaggagacactgtggaaagagaagagaagaggaggctaatggagttagggtccaagaaaaagaaagaggaagtagaaaagagaaagaaaaaaaagaatttaaattttttttattttatttttaaaattttaaaatattttaaattattttgccacgtgtacattgtatacaccatggcagttcactttgacacttaacaaatcaaaatgaatgaaagaagtacagatcaaaacgattatggatatttgagagtttaacaataactttttcaatctaagaatttaaccgcaaattacccttataaaaataaaaactaataattttattatcaatttttttattaatttaatatgtaaaacaataaaaaaaaatatataaataatttataatttaatgcattaaatatactaataaaataatacaaaatttacatacatactattataacacatgttaaataaactatatttaaacttttgaccacttatttgaatttttattagatatgcttttaattgtatattagttgtaaaaattaaagttaattgcattcagttagtttcttaatatagtgtctctaatttaattaaattcctatttactctctaattttatgtataaataaatatacattcaccattttctaaaaatctcaagttttacctcatgaaaatatcaaatcatattatcacatgggtagggaaaagtagttttcgaatcaaatatgtgatcaaatttgttttaattagaaaaaggaaacaaaaaaaacattgatacaaaatagaaacagaaatttaacagctaaacaagtatacaacaaaacaaaaacaaactgaaaattgaatgccaataatcaaacttaaaaaataaataaaaataaaagagggattgtttaaattatcaaatctagattgaagtgaatttcctcatgtatattcaccgatctatataatgttgcataaaatgataaaaaactctagagattcaatgacaaaaatcatgaatatcatatcatgtaattataagcaacaaagtaacttaataagaagaaaaacttgagcaaaatttaatatatatagaaatcacaagaactcattttggttggtcctcacagcaaatactgacctcaattaccagttacctttgccttttttcttcttcttttctttggtttctgttccggaataatactaaggcacttgttgtcatcgcctgcaattttgttgggatttggaaggcttgtcaatccatcttcacctattgtcacctccagatgttgttctttctcctgtgttcgaaatcattgctggttctccaatattcggattggatgcaggcgctccttttcaagccctgcatctatagatactgctgtttctgtctttggactggatgcagactccttttcgccgacatggataatatcactttgttcacgtccacttttactctttcgtctgcgtttcctagttttaccattatcgatgcctttgctctcagcaccagcaatttcaccaaggcctgcattgatagataatgtttcttctcgtgtcttaggagtggaagcagcctctttctcgcccaaatggataatatcactttcaagttttccatctacagttgcactttcaccacaccctgcatctataaacactgctgtttctgtctttggagtggatgcaggctccttttcgccagcatggataatatcgctttgttcacgtccactttcatgttttcttcttcgtttccttgttttacaattgatgcctttgctgtcaacaccggcatctacagttgcagtttcaccaaggcttgcttctatagataatgcttcttcttgtgtcttaggagtggatgcagcctctttctcgcccacgtggatgatatcacttttacattttgcatctacagttgcactttcaccacaacttgcatctataaacactgcttcttgtgtctttggagtggatgcaggttcctttttgccaacgtggataatatcattctgttcacgtccacttttaccaatgttcacatcgacaattgcactttcaa

SEQ ID NO: 17058 - DNA, 2583 bp, Cannabis sativa
acatgaccatgagaaaaaaatttgactaaaaaattatttcgagtgctaaaataaataaaagtgtatcaatgtatccattttaaggggtgtattgtagatcgttaagttttttatttttataaagatcattcttttttaattaaaagtgtcaggtatgtttcaatttatttttaatataataaagccatattttgttagttggaatgaatggaaatgtattgattttcgttttattcatttaaactttaaagggtttccttttagaagattcactacaaaaaataggagaaatagaaaactaaaaacctcctgcttcgccaattttttaatgtcattagaataattctttttagaaaactaaattatctgttaatagacaaattaaacaaaatttattacaagtagatataattcaaagagcaaaactatcgagaataggtttaccaaaccgtttacaataaaataaaagaagaccctaacaacaatctaaactaaggatctaataagtcaccagcgatcaagcatcaaagaagtatgaagtatactaggtttctaaaccaaatgaacttctgacaaagtccaactactaatgatcatcagccaatgatcttttgataataaaaatatgacataacaatcctattatgtaaatcataaataaggaaaaggactaattatattgtaatgctctataaaaaaaaaaatggagcacatacaaagatttgaaaatcccccaaatttgacgtccaaagagagaaaccaaaacgtccttaccaaagcaatttggattcattgatgcatgatacaccaataaactaataagaaacaaaatttacatctctcaccaggacaataataaaccgcattaatctaataaggaggtggataatcaccattattaaaaaaaatgacaataaaactaaacctaataataaaaatcaaaaatgtaaaaaaaaaaatattgttgcacaaatgtgtactcatcaaacacaattcatcacccaccgaatcgacactagaaattaaacagaaccaaaactctgcctcaaaaccccaccgcagtagcctcacaaaacacaccaagaccccactccctgtcgatctcacaacaaatctgcaaacccatcgaaagtgacaacccctaatcgactggccgcccacccatcaaccagatcggtacaaaaaccaaaaaccatgagacaccacaaagccgacgcaaacaccccttgcccaacacgaatccagcaaacctgtagactaccaacgagacaaagaaaagaaaaccatagacctaacctaacatcgagcaagagaatcggcctagagagtccataggtgttgaataagcaaccccgaccagagccatacccaaaccctgaaaagggtcgacgagccctggccagagaataaaagaaagcccacttagcggctgggctagattagagaggttttgagagagaaacaaaaattatataataaaagaaaaacacacgcgacaactagatatactttcttaattacttctattccagtaaaataattttgaactagtttagtagaattactatctttttttaaataaaataattaaataaataagatgaaatgttattttaatgcaaataataaaaagaaattatgtattaaatattttcattctcattcttgttaatttcaaccaaacatactccttaatttattaagattggaaaagatacataaagttatttattaatggacatatttagatttaatcttatttgaaggtgtgagcaaagaatatttaaaaatttatgatttgaaagaggaataatgatatatgcaccttttgattgaaaaaatatgataattgcacctaaatatgattattctactttgtttgttaaagagtaagtaccatttggaggttggaccactttgtatcttccagtcaaatttgtgtaaatggtatcccaaatccttgtggtactggtaactagagaattgtgatatttaaagatactggctgtccaatcacacgtaagacataaaaaacaaaacaagaacgaattgaatagtgtaataagaattagtataaatatgagtatgacatttttacacggcacgaaattagtacgagttcgaaaagtatgagtacgagtacgagtaggtatgaaaaaaattacaagcttgagcacgacacggcacgatactacaaattagcatgacatatcatgaagaatatgtcgtttagcacgacacggcgcgagaagcacacaaggcacgacatgtaaacacgaatagactaactcaaaaattacgacacgcaacaagacgaaaaacaaagtataacatattaaaaaaccttataatttattattaattataaataatatatgaatttatgaattataaataagttaaaataataataaaatttaaatataatagtgaatattataattttataattaaaactatgaggagatgaaaaattaaaattatatattaatttatttatatggtatgatataaaaatttgagtatttattaataaatatttaaattttaataatgttaataactaaaattataaagtaaaca

SEQ ID NO: 17059 - DNA, 4204 bp, Cannabis sativa
  modified_base (3886)..(3887): a, c, t, g, unknown or other
atgtcatgaataaatatgatagtatttttcttttgtgtttgtgtgtgtggcagtatgatacagtatattgagttgactgaagccagtttctgttgaaaatttatatatgataaataaatctacaactgaaaaaaaaaatctatataacataaaggtagaatcaattttgttaaatggagtagtatttttagttttatttgcttaaagagtgatcattgatcacacgtggggaagtagaaccgcagtcggcgggaatttattatcttaaagttaaaaagctttgtctctgctttgccataatgccatatgcccggtaatactaatacatacataattagtcagaaactaaaaccttatatataaataaacagaaagagaggaggacagagagagaggttgaaaagattggatccgaatagaacggacttcattcaattttgtgctctgtcatcgaattgtgttatgtgatatattttctccatattatctggcttccctttttctgtcctctgtggattccttatctattttttcacagagggaaagaaaaaggaggagggaattccccgttccttctccctttcattttttttaattctttttcttgacaaaaataaactcatcaatgctggatcatctttccatcccaggtatttatatttatttttgtgtgtgcatgtgtgcgtgatttaactttgtaatgagcctcttagaataattattgggttcaaagagtttatcatttttgtaaataatttatatatttatatatttaattttatttatcgtggggtttttgcttttcatatatggttatagaaaacgcttttgtaattgtttgtctattccataaagtgttattgcaacatttttatcacaatcaatcaacatatcaacttctgtcctctactcttttgaaataaaaatcctatttgatagtgataggaactctcatacatcactcgtcccataaacattgacatttgaatgtactcatttcatttgctaacttgtaaggaaaaagagaaaagagaaaaaagttcatgttactattgtaaaattatatattgtacatatcattatcttactactattctgtgtgttttccaggctttttccagggatggagatcaaggggatggagtatttatattagagtggcttctggggtggttatattttaaaaggaatttattcttttctattcttatgataaccaatttactcaggaaaacttcctagaaaggcatatcaattttaaggtatgtactcaatggttgtgatttgcttcctaggaaaatttactttaatgatttggctgattgcaaagcttagcttgctcctatttagttagttgtaactcccaggtgtccatgaccttttgttttgatactttttcttgatttagttgctgcaggtttattttagtatatcaactgttcttggtgtttttcttcttcttcgtcttcaaaatgggggcctgtgtttcgaaatcaaatagaaggatcgtagcaagtcgaaatggctgtagaagatctagtggaaaacgaaggggaataatctccacttgcattcctgatgtgccaatcagacgagttagtgatgctggaaatcgtgttagagattttgatgtaagtgagcttgttcatcttggttttaagaaaggtggtgctacaacaacccgcaagagatcagaggtctccaacatgaaaattcacctcgctcaacttcaatggaaccatgcccaagttgacccaaatggcggtataacaactctcttttgcatttctcaacattacccttttcttattacacattctactgttctgtttttttttttaaaaaaaaaaaagaacccttttgttttctgactatataatccaatttttatgcaggggtatgccaagaagaagcctggtttgactcggttagcattcttgattctgactcagatgatgacttcagtagtgttcatggaggtaactaaagtactttccatctcttttgttctgtttatgactttataaatgatatgtgatattaaactctgcttctttgtattgagatttggttgcttgggtttttagatggttttcctttagcggctaatccgattggaagcataccaaacactcaactggtccagtacgaaagtgcttcatgctatgtggattcagggtgtaagtatgaagaattttatgagagttacttgaaaatagatggagccaccactacacagtacaataatgacaagagtacttatcaaccattgtctagtagtccccaacaccctcagagaaaacaacaatccactttgatcatgctttcttacaagagaaaatccgctgatggaaatgaaaagactgaattttgtacgttcatttcattttgttggatatcactcataatagtaatacttaacccttgaagttaacaaaaatcgccctctttttcttcacaaaaaatctgtaccaaccaattcaggtgctgctgagaagctattatatcgtccaagagcaggactaagaataccatgttcaactggggataagccagtacctggatgctggtcagccatttcgccttctgtttttaagctccgcggggagaattattttaggtaactttcttttcttcctcttcttttgttgttgttgctgctgctttgttttcccattagagatgggaatgtgttaggctgaaaatgttttggcttatatgcagagataaacagaagcaatcggcttcaggctttagtccttacgtaccgtttggtgtagatttatttatatgtccacgaaagattaatcacattgctcagcaccttgagctcccttctgtcaaagccaatgacaaagtaccttccctactaattgttaatattcaggttcattctctctctctctatatatatatatgtgtgtgtatatgaatgtcgaatgtttgatatgatatgacaagtcttatttgatcaatctgaatttaaattcgttgtcatttttgcagcttccaacatatccaactaccatgttacttggagattgtaatggagaaggcatgagccttgtattatactttaaagtttctgagaattttgacaaagaaatctcttctacatttcaagacagcataagggtattgctttcttttccattttgcaatgtaatacatgtataaattgtccatgaatattgaccttttctgtttatttcaatagagatttcttgaggatgagacagagaaagtcaaaggatttgcaagggagtcaattgtgcctttcagggaaagacttaaaattttggctggagtggtgaatccagaggagctacagttgggttctgctgaaagaaaactaatcaatgcttataatgataagccagtactctcacgccctcaacatagtttttttaaggttaaaataataactcttgttgatgatgtacagacatgaatgaactcattcaacccatttaaaattttaaaatgctgattgtgttctttcagggaccaaattactttgagattgaccttgatatacataggttcagctatatctctaggaggggacttgaatcattccgagaccgtttgaagaatggtattcttgatttgggcttaactattcaggtaccaattttatgctagttgagctgattattacttaattaatagttcctcaatttgttacaagtataaagaaactgactggtttttatctataatatgttatgttttataggcacaaaaacaagaggagttgccagagaaagtgttatgctgtgtgcggttgaataagattgagtttataaatcatggccaaataccaacacttgtaactattgatgattgacttggagtttggactatatatatacatatatatatnnatatatatatttatatttatacatatagttaacggtaccatggggatggggatattgcttttgaaagtttacaattccggccaaactacaaagaaagttatatcaacgtagttgtcgttaaaaatgacacagaaaaaattagagaagaataattctttcggcattaaaaaaatatatatatgtccaacaaatcaacaattgttctacttcttggttcttttgaagtgttttgtatcatttatttatttttttttaatgacatttttttttctctttgttattgattctgtgaccatttatataatatgttaaaaatt

SEQ ID NO: 17060 - DNA, 4266 bp, Cannabis sativa
aactccaaaaatgagcttcccttcatttctgtaacaacaatctgtatctgggtcttcattagaatcaatcagttttgatttttttttcttcttacaaaacaaaaatggtgaacacccagatgctcaaattgattcttgttcttacttcattaacatctttggtattttttgttcttttcatctacttctactgtaaaagaacgaggagaaatgagaatgaagatatagagaaaacagagtataaaaatggagataagactcatgaggaagaggatgaagaagaagaagaagaagaggaagacttagtgacttttcaaggtggtcaggacttgacagtgggtgatatacttgatgctccaggagaagtgattggaaaatccaactatggtactttgtacaaggcttttcttcaaaacagtaagtcagttaggcttttgaggtttctgaggcctgtttgtacattaaggggtgaagattttgaccaaatgattcggtttttggggagtataaggcatccaaatttggtacctcttctgggattttatgctggaccaaggggtgagaagcttctggtttatcctttttaccggtgtggtaatctagctcaattcgtaaaaggtatttttttctttcttctttctttctttcttgtcctgtttttgtctttttgaggatattatgtggatcttttatttcttctggactaaaaaaaaaaaagaaaaaaaaaagaactaacctgaaagaaaatgcattgtttgatccatattttatagtttaagaacttggtgttcgaagttgaaaatggtaatatgaaaaggaaataatggaagaagggtaggttaggtagatagatacaatttaatcaaaatttgagctgaatactatctgctcagaaaatctatgctgacttcttttcttttcatttttttgttccttagatttttcattttcaattttatatttgtttgtacatgtttttttttttttttttttacttttccagtttttggtatggtaaaataagtgccatcttgcctggggaagagggtatttagtaatagtagagtctgtattattagtgagttgtgtattcagaagaagatggtaccttctttgtcagtatagtgtaatgtagctctcgttatttcttacacgttaaaacaactgttaccttcatttccttcctgatcataaatataactgtaactgtgtacctaccactgtcagtatgcattttcttgatccccaacacactgtactaattaatgaattttgtttcatgttcaaaaaaagcctttatctttacattttttaaacttgtttttgagccaagtctctttctttcatctactttatggtttattatatatattgtgtgctctaaatagaccaattctggcttcaatggcagactgcaataatgaggcacagaagtgggccataatttacaagatctcacttggtatagctaaagggttggattatcttcactctggctttcagaagccaatcattcatggcaatcttaagtcccaaaacatactattggaccgctatttccaaccccacatctcagattctggtttacatcttctcctgaatccaactactggccaagaaatgcttgaatccttagcctctcagggttacaaatcccctgagctcattaagatgaaggaagcttctgaagtgaatgatatttacagtcttggggtaatcttacttgaattggttacaggaaaagaaccagtcaatgagaacccaactacaccagatgaggatttttatttgccaaattatcttagaaaagcagttgttgggcacagagtcactgacttgttcaatccaaatatactaatcacaagcaccaatgttgatggtgatgatgaagtaccagttactgaagaaaagattctcaagttttttcaacttgctatgtcttgttgttcaccttcaccttcactcagaccaaccatcaaacaggttctatggaagttggaagagattggaaaatgaagatatgggttcttctggtgctggttctgagtctcttctccaaaatctgccatgaatgaaaggacatgaaaataacaactacacagaagctgatgttgacttgtatagatatgataaaaaagaacaaactggaagaggtcattcattcttcaatgctaaaaaaaaaaagtgaaaaaaggcataaaattttgagtacccaacaagggaactgagagattgttgatgttgatgtctagagaaaagaggtaaatacatccaaactcattcacttttgccaatccaacaaggatcacagaatacgttatttggttgattggttaatttgtttgatttggacttgaatcagccaatcaggatagtgagatagtaaagtccccctcataggtccccaaaactattactgcagttttggcttaagtgttgacacatgaagtttgataattgtattatttgcctggtatggaatctcaattgacataagctaatgatataattctatagcttttaaccatatttatttatttattttacttcattaatttttgttcaagtatgggtgtgtgtgtcctcatcatcagttccaatgtttctcatagaattctatgtacttagaagttgaagtaaatgttggagtgactccatatttccatgttaataataatatcaaacattgtcttttatttattcattcattatataaatttagtttcttgtttattccaagaaaacggcaacattaccatgtgagggtttgggcagttgagcttcaattccatttattttataatactcaaagcttacccctcctacattattgtgtattgactctttcatcaactttatttatttccatctccattagtagtttatacaaaactctatctatacatcttttaatgctttcttgaatttatataaattatatgtacataccaaaatatctagattgtattagaaaaactttctaatttttgttgctctttgttaatcttaagaatacctacaatataagtgtttattaatcatatcagattaattttgtttttatttagtactatatttgatatatattgacttgcatatacaatattttgatatatatcaaaatatttcatatattttgtataaacaataatactatacaatataatataatttaattcaacttactaaatgaatcttttcatgatgagtctcatcctgaactacgtggtagtacgaaattgatagagttggtgcatagctgctgaacagcagttcccaaccctatgtgctgccagttggctcatcctcatagcacaagaccttttttaaattttttttgtcacattttttctaagcaccacaaaaataaaagagcattgctattaggcaccagtggtacgtagtaccttctcgacatgtcgtgttgcgattggctagcgatacttcctattatattaaattatatggaacctgatactcagttagaccaatagcgatattgacacataagagggtgttaaacacttctggtgcccttgtccctgaagtctaagttgtattgcgctttctacggctaataataactttggtctcttgaccccattcttgctcggagcaataatcaaccaactaaccataaaatctttaagcaacgtggcaaaaggtgagagccacttcacattattgcaaataagtaatcaatgtatattcttcctaaacctctttattttttcattttttttcattgtttctcccttatttttttctatcgaactttttttttccttttttcttttttcagttttcacctttcttgggcagtgattcttcttgaagttgcatgataaattgtctagggcagaattcagcaccatatgggcacttcttttctttaagcaaagattggcactcttatttttatagccttttaattagaaaggtttcttatatagtaatatttatttagtgcccactataactatattagccaaaaataactctttaattaaatgaatggaagagttgacttggtcaacttagttatctgggaaaatttatagttaaatttgtgttgagctttaaaaaaaggagaaacttacacaatacacttaaacaagagcaagatgaataatttagttatgttcattgttcaatgtgaaggcttaatagacaaatcaaccaccacattgtttggtttttttaattagttttccgaggcacatttggaaagccaagagacaattgaaattgagtgcaattgaatgt

SEQ ID NO: 17061 - DNA, 6335 bp, Cannabis sativa
cctgcaaagtgaaataacgcatctgtaagcaataaaaagaccactaaataagtttattataacagttgactagtgaagcatctaaagctacaatcacctattctgttttcattatccgtctattcctacccttttcagtcccctcaaattaagttcaagtgtttgggtgaaaagctagcaaaattataaagtcagatacaagcgatcaatttgtcatagctcatagatgtgcacaaattgtcaaaaatatccagaaatataatttggtcaacactaaatttacttgaaagagaaaatgaaacaatttttatgtgaaaaaaaaaatcaattttaacagaagaagctcgtaatctttgagaaattgtgaaaatttctgtcttttgatttaatgtgcaaactaaatcttcttttatgaagaccaagagttgtaaaagtgaaaaacctacgaaaacagcaaatagataacctcttgaccttgggattatgtgtccttttcaattctacttccagaattcgaaatagcatcagtgaaagctttggcaaaggtgatacagctagctctcgaaaaaagatatggggaacagtaagaaagactcactggttggtatcaaaataactcccaaggtagtcttaaatagccaaaatcttctgtgagtttaaagggatcaatagtacaaatacattgatgccaaaggatccaacagtttataaagaacatcctaggaatgactaggcacatttatttgaaaccatgagaataatttatcttcagtgaatcaatcccatgtattttcaagattcagagttctctcaacaactttacctgaaaaatgtcggcgaataagaattttccaatcaactggggagtgtatcctatgatagtctccaggcttcaagtatattacacagtaaaaaagacctctcatcggactgcaatatatataacataaactttgaaatattgtattccactaaatttcattcaggaaaaagaaatcagtggtttcaccatccaaaggaaagactgaatgaaaggataaaccacattttaccgtgatagcacagggtcccagactttgggagaagccaatgaaattctccaccatgacttcttactcttactaacagaagttttttctggttcctcttcatcttcctccatttgcccttcggcaaccataggaaggaatgagcttgcaccaagaagagaggaaacggaataagaaaaccctttgacttgctcaatcatagccccgggtccttttaactctccaaaccttaagatagtaccatcaacaggactaacctatactccataagcagtcgtataaaatagttgtcagcagaagtaaattttataagttggaataatacgtaagtatgctgactaaatggctgaataccagttaccagacaatgtggatcagagtcaataggcctgcaaccttctttgagtgtgcgaataaagaaatctcgtaaggaagcatattcatccagaggcgaagctgcttcttctaagtctgaacacaaacaatatagttttaaaataattcttaaagtttaatctgtcaagcatgtattctagtccttcaatgaaacagcaagtacttagtttacatgagaaaactgaaaagtatatcacttaattagttaaaagaggtaaccatcatacttgagtgaaaagcccgtgcccaagctctataaatgtatgggcgtagccaaacaggtatttcctaaaataaatttctttaaataagtaaatgatatgaaaaggtaagtacaaaatccaattctgaaaacaaaaggcaatgtaagaagaccaagataaaaaaaaaataaaaaaaaatacaaaaaagttaatggtctggcaaagaagcaggagctaaaataacacctgtatgtaaaagtatttaagtataaacacgagctaagtcatgcacttaattcatgtattttatgtgtaacatatttccaagtttaagattaaaaatacccaaatctggttagctagtgaaaatgtttcatttcactcatctaaccattttaaccaaagtcaaaagactcgagtaaacatactcttatcaggttaaagtgtataaggaaaattgaactcactcagcttaaaatgagaagatacttaccacactagtcaaatatccccaacatctagacatggagcgcagaggtagaaatcttagaaaagtagcctaaagttggtaacagtttaaaaagtgcatgtcaaagtttagacattaaaaatagaaaaacacaacagttctgaagaaaaaaaaaagtgagatcagttatgtaatatcacctttaaatcaggttggaactcagattcaatcccttttccccgttcctcctcaacctatagttaggtaaacaaaatatttagcatttggacaaagtactataagcattccattttatctaacttacagagaaaagtccacctaagtaaacagaaagaaaaaaaaattgcagggacgagaagagattggtaaatagcaagaagaataacttttttggtgaataagaaaagtaggaaataggaataaattgcatctccaagaactaaggagtcatctgtaagtagacatattaaaactaggaaacatgcagctaaagccctctagtgtactactagctatagatggatcgaattctgccaacgcctttaatctagcagaaaaaattatgtataggagaacaaagacaagacagcataaagaaataagttagcatactatttcaattataagtggttcaaagttaaaactataaacatgtttcattgcttaaagaaacatacaactgcatatggccatgcattagtcaatctactcttcatccccctagactcaaaaagcttggggccactggaagtctcccgatagaactaccatgtccaagaaaaaaaaaaacaattctacacttccactgcatggatagaattgggttcaataactagaatactggctctcccaacagtaacggctcaagatataatttgttcaattttatcaaagtaaaagcacacaggaatgatgataccggttgattagacattatttcaaaggggtgaatattattaaaaattagcaagacatctccataatagggttctagggttctcctaaaataactttgttcctataatgtgtaagcccttgcaaataggtcccacagcactgtatcatatcataagagtataaaacatttagcttggctatgttctactctcctttgaagacctcatgaaaagttctttaataagaagaatctgattgattcttgcatacttgcctaccttcttgtcgtcatacattcgacgggcatgaagagcaccaagcataagtaaggtagccacagttgcaccaggcaccaaaaaagagtcacctgcacaaacaccatgaaatccacaatggttttatacaataacagaaaaatgacacaattcaatggcaagacttcttacttccaaccacataggggctaggttgggattcctcttactgctcgttgttataaattctttaattacttataccaaacaaaattgtattaataaaaaaaataaaaataaaaaaatagaggacaaggacttctaaaagacaaaaaagaaaaagcataaacacgaactcaaacaaagaaggaacagaaaaaaagctaaacgccaacatgaggcaaaggaattccagcttggcttttacagctcctcactgagataatacagtaattccaaacacgctttaaattcgattagttcaaaatttcctacctaaaaagcagctttctgaaacaaactgtaagtaaagcagttctcaagtaattggcctgaaattcaatcactttttttttttaattttgatatctagcttttagcttttgatccccttttagccagtataaacataatattcaagcagcatagtattacaaaaattggcccataatttgttttccaactctacctacacttgactatttagtctaatataattcaagagacaagtcttatacttcgtgtttattgagtattcaatttccaaaactttccacattatgcccatatgtatgagttttaattcttttcacttcacaaaagaagacgattacttctacaacaaagtgtgtcaataagtgttagaatttgggataagatgaatgaggttccatctcaaaatcaattggtaatgggaggagtagcctattcatctatgacaactctaataataaggtacaaaagaaatggaaaacacaagcaaaatgtaaactaataaactttcgaatttcgttttctcgcacaatcactattttttttttttttttgctgaaaatcgcacaatcactattgttttagtaattcttcatctaacattagtaaatgtaatcaaagtcatcgagtttttcttttttctttcatactttaaaacaattaagtttaaactccgaaaccagttaattacgtgaccaactgacctttagaactgccacttccgccattaaaagaagcttgggcttgagcaactgcttgacctcggagctttctaataaacgaagagaaatgacgacgctggttatcatggagggaactgaggtgagtagagttagggaagactggaactctgtgcgaaaccctaaatttcattgttccgagctcgcagcaatgaagctgtagctatacgttttctctcttctctcttctctcttctcttttctgctattcatcagcagaagaaactatagaggccagtcaaatgggttataaatcgtgaaaaaaaatactatgttcactcattacaaaatagaaaacataattttttctttttagatttctgtaaaaaatttaattgtaagatttttttgtcacatgccgctacaaaaatgttattgaaaattattaaaggtttagtaacaacatgagctttacaagatcaaaaacaaactgactttaaactaattgttattaaactgaaactcagagtaatactaataatatgtctatagaacatatatggacaaactctatattttcggatctagatgattaagaatatattacttaaagctttttaggagtttgttgctcatttaagattgtgttggtttagtgagagtttgcattaaaaatgttttattaagttgacacatatttatagtttgattttgtaaataaagtatggacttaaattttgagtactttgaatatattatttctattgaagtttaagtataaagttagaaagaataaagaactgatctcaattaaggaggaccagttagagataggtatgctaatattacatttgtatgtaatttttatgctacgtatccatgattgatctatgtcatttagttgtattgatatatgtgatcattgataggtttagccacgctaaatattgcgaaagctgctttgatcatatgttaatataatcaatggatgagattattttaaaatacctataattatgatagtaaacattaagcttacaaggttacacactattaggaaatatatgtagcccaaataggagattgttggactcaaatcttcaatatgggctcatatgtatattagtgtattgttatttaaagtttgaccaaaataaaataattgtgggtcattgggtattgtattgaagtgttatgtgttaaatgtgtagatatcttaagagatatttttaatttattgagagactaaattaaaaatccttaaaattataacctagccatgagttatatattagtagcggtcctcaagaaacaagagtcactttattattatcttctcccatcaagagagaaaactagagaacttaagtcttgtattattggaagattattacctaaaaccacaacaaagatcatctctacaagatggattaagaccatcagtatttatggattaaaatatgcttccactatttgcgttattcttcttaaatcaacaaaggtattctttagatttatatttatacacttttaataatatgcaatatatttatatgtgaaattgaatcttgttattgcatattttatgaatgataaaaaattctaacattataactcttacaaacttaaaattttaaatacttgtgccactatttatcctttatgttttgattataatttattttgtttatttattgggcaaaatattaaaggagaaaagactattggttaaagttgatttgttttgaaagcataatccaaaaccatgtattctttcagggattatttcacaaatacacaaaaacaataaaaaaaaattacaaaaatagagtttcacggaattttaaatatttttacgatttttttattttatt

SEQ ID NO: 17062 - DNA, 6539 bp, Cannabis sativa
gtgttattattattaaaataatgttttacgattattgtggctataataatttatcattaattttttacaatatttgtagatgctttttggatctgatgtcacggtggctgtgcaagatccgtcttttccggtaatgttgtttcagatgtttttgttttatttatatatttatgtattgggtggttttcattgctagcttctctttcacttaaattgctcattttttgttttaactctaattatttctggatcatctttagttctcaaatcaaataagtctttcttctaacggttgacatgtatcacgaaatacaatctgtgaaagtacattacgcacaaaatcatgtccctatatatatagtagtagaattattataggtttctgaaaacgtattatttactgttagtttttaaaattaaaataatatttttgcaagtataaataatgataagttatcaaggatgaacgaatgaaaaagaaaaataagtggtttagcaaagtccgtaataattcttacccgtcataatcatatcatatatattattatgacttatcaatttatgtggagttgaggcaaatgagcttggttggccatctggcccatacataatccattaaagggtatccaattaaaagggtataaatattaaaataattttattttattaatcctcttcagatatactttcaaaattaaaatgacatttttttcttcagaggagtgactcattttaattaaaatcatttcaataacagtcttgattcttcttgaaactagatagagaagacacaataaataatgaaataacttctgccatgtatgtatactttacccataaaaaaaaaaattactgtactctgaattaataatttttaaatttgacatgatatgatatgaatcctatgatataagtttatttattattttttttatatgatataagttattatctctgccgcgcgcggagagctttgtcatttgagctttgcttgtctaaactttgttttgatttggtaatcttgtttcttttttctttgaatgaattatctttgtttcttttaaacttactcgatatgatacaatacttgattgaaaatttcaaaaaagtcttatacgactttgccaacaactaatgtatgtctaaatcatcataacataatgtatgttaaccataaaatataatatattgagataattcttgtgttatactagttagatagtgctttgtttgtaatagtatattgaatgaatcttattagcttatttataatatatatgattaatatatattggcattattgacaggcatatatcgattcaagtgtgatatttgggcgaggtgggaattttgaagagaaaacagggcagtatgggaacatttcgtacatgaaatgctgtccagagaacaatttcttccccaacctatcaccatattacacacccaaaactgatgtcattttcttttgctccccaaacaatccaacgggtaacgctgcgacacgtcagcagctgaaacgacttgtggaatttgcaaaaaccaacggttccatcataatatacgactcgtcgtatgctgcttttatatccgacgacagccccagatccatctatgaaattcccggggcaaaagaggtccgtccatctctctccatatttattatatcagtaattagctactctttattattttagttcaaatagagacttctttctattattgttgctctaataatacttcttaatttaattattttataatttaaatttattaaatataaattaataacaaaataatagtacttcttattaaaatactattaaaaaattttaacaaaaaaaaataaagaactccttacgttgagagagttatttattttttattatgagagtctttgtttatagttggattttttttaaaatttcactcctattctagttaagacatctatttagagagcatggttagatatgtttattttaatttgtaaaatatttaactctctgatttgtttttttttttttaaaaaatgctaaaggacatccatgatatttaatactcttgtaaggcgcttagcagccttaaaaaatgtaatatcgctatttatttaacttaatattgaattttatttattttatttttaataaaaattataaaaaaaaactcaagacaccacctcacagcaatgcaagacatattggaatatcccataataatgcttttaattttttggtggcaataaaataactcttaactttattcttgtttgcaaatataaggtgttagttaggctaataaaaatatgaggcgtgtatatacacaatgacaatctcaattgacatttattcttaaaatttaacccacacttgattcatatttgcaaattgaagtgagatcaagagggtattactgcgaaaaacaaagatcataaggttaagaatatacaaactaaaacaaaagaagattttgccacaaattattacctatttaattattgaatatgtatgtatgtataggttgcaatagaggtttcttcattctcgaaatgtgctggtttcacgggtgttcggctgggttggacgattgtgccagaagagttaaaatactccaatgggtttcctgtcataaaggattttgatcgaattatgtgcacttgcttcaatggtgctgccagtgtttctcaggctggtggtctcgcatgcctttctcaagaaggttacaaggtaatattaataattaattaattgcatttccatatatattatattataattaattaattaattagttgcatgatataatattgtattaaaattggaacaggcaatgatggatgtggttaagtactacaaggaaaatgcaaaaataatagctgaaactatgagatcacttgggatgaaagtgtacggtggaaataatgcaccttacatttgggtacattttccagggcagacttcttgggatgttttcactgaaattcttaacaagacacacataatgaccattccaggtactggatttggtcctgctggtcaaggctatatcagactcagtgcttttggccatagacaaaccgtgcttgaagcctcccaaaggctaagaaatctttacaattaaatactatactagtactagtctatatacataatattattcttattgtcataaccactactctgtgtgtaagtggtcctgtacagtgtacatggctcaataagataagtttcccatatgcaattaatgtaataagatttttctattgaaaaattaaaattcatactatttttgctctctagctagaatatctccacctactccaataaagtactttaatatatttctatatattatcacatctcaaaagttcacagttcttctaataatgttgtaaaaaatattgtatgatcaaatcatttttcttttatcaagaaaatattttctattaatcataaagaacgaattacaaatcaagagaaattcctcacaaacacagcaattacaactgtcaagtaatatttaattattactgttactgttagttaggatctctattttttgtaactttaactgttttatattattagttagttaaaatgtacactcttgtatcatgtatttatagaactcattgttcattgtaaatattcaagattcagtttcactatattcttcttctttttcgttctctatctttctgttcaacatggtatcaagtgcattttttttgctttcgccattttcatccatgtgattgtgtctgctttcttcctcttcgttctgattctttgcttccatggctgctccaaacactcaagcattcaatcccgttgtctctgctgacaaagtttctgttaaacttgatgattctaactttctgctatggcgacctcagatcttgtctgcaatccgaggtcatcgtctacaagattacatctctgaatcctttcaacctccgtgcaaatatctcacataagaagatgaagttcttgatcaagtaaatcctcgatcactgagtggaaggtccatgatcaacttctgtattcatgactactgtcgtccatattcgatgttatcctcactcgaatagttagagctgaaacctctgctcaagtctggaaaactttgaaggtatattttataactcaaacttctgccaaaatagatctctatactactcaattacagaattgtaaggaaggatctctatttgtcaatgaatatcttcttcgaatcaaaactcttgttgataaacttggatctattggtcacaaaatctctactaaagttcatatacctgcaatctttaaaggattggcttctctctatgatacctttgttatctctgtcaattctcgaaatgacaattatactgttgctgaaatagagacattgttattgtctcaagaacacataatggagagtcataacaaggatctcgattctgttaatttagctactaatcgtggttttagaccaaaaccacaaagtactccacctttttccaataatccagatactaatacttctcatcaagggcgcggatcgtggaatgcatatgctgtctcgtccagatctgcacaatctcactctccatatcagaacaacagttccaatcaaggtcgtggagtttcttctccctcttttgctgcatctccaaatatgtccatgggagtcaaaccagtatgtcaactttgttccagaactggtcatcttccagctcgttgctaccaacgtttcaactttgattttcctggtgttggtgctgccaatgtcaccaaacaaacaactaacatagcaactgcagacacagtcacagatgaagcctggtgtccagactcaggagccacttctccttgtactcccaatgctgcaaatttctcttagaaacaaccctactttggtcaagagcaggtgcacatgggtgatggtgttggctttcctattcaaaacattggtaatactctcttctattcatcaaattccagcaaacctttgtttctagacagaatgttacatgtaccacacattaaaaaaaaataatctttgtgtctcaggttgctactgataataatgcttattttgagttttatcctgaccattgtctaatcaaagatcaggtttcaaaggagacattgctggaaggtcaacttaggcaaggtctcaatgtcatagatccctcacaactcaccaaatccaatcccattttcgctgtcaagtccaataaagtgtacactgttattaatgcaaatgtagcttatacttctacatctttgtgtaatctattttccttatagcacaaaaagttagctcatccctatgctagagttgtatctgccataatggcccaatgtaatatctctcaaggaaataaaagtgtcactaatttttgtgaagcttgttgtaaaggtaaaatccataaattcccctttcctagttctaccactgtgtacactaaaccccttcagctagttcacactgacattttggggccctctccatgctatcatcttgtggttataggtagtatattcactttattgatactttttctaggtacacttgggtgttccttctcaaagaaaaatcaaaagctctaccaacctttatcaactttagaattcaaatagaaaatgaactcaatcaacctatagtatctgtccaatctgattggggtgaatttcaagccttagaaccctacttaatcaaaaatggtatctcctataggctctcttaaccaactactcaccaacaaaataatgtagttgtaagaaaatacatacatttaattgaatctggcctcaatttgcttgctcaagcttctatgcccctttcttattgggatgaagctgcgagaacaacctgttatcccacacctatcatggccaatgacactcctcttaataaattgttccataagaaacctgactattccacacttaaagtatttggttgtgcttgctatccaaatactagaccatataataaacacaagttggaattttaatctgaaaaatgtacattcattggctatagtttgaaacacaaaggctataagtgtttagcttccccaggcagaatttttatttctaaagatgtcttgtttgatgaatttaattttcctttcactaatatccctattaataattctgttccttgctcttgtgtttctcctaatgcctcctccaccatcccaatctctactgaagcaccaccaccagcagcacctgtcttaccaaaccagcagcaagctcactcaagtgacagtttagatgagtcttctgttgttgccgactcatccccatcagcatctattgaacctgttaacaatgatggctccccacagatgtctgattctgcatcatcaagtgagcaccacacaattactattgtaccaagtgacaatgctgcttccacttctgctccaacttcaacagtgcagcatgctcctatgatcaacagtcacccaatggtaactcgtgccaaagttggtacctacaaacccaaagttatgttagcttcacaaactcctctcatattag

SEQ ID NO: 17063 - DNA, 3107 bp, Cannabis sativa
  modified_base (240)..(240): a, c, t, g, unknown or other
tttaatttttaattgtatcaattttaaataaaataaaaaatacctaacataaaatttagtatacgtgcctcgcacgtagttttttactagtatctatatacatctttaaaggagagatataaagtggtgacatctaaaatcactctaaatacttctatttattcattcattaattctctcattttttctatttttttattaaaatttaatttggctatttgttttctttttttttttttnaaaaaaaaaaaagaaaaatctatatcttctttatataaagtttggctatgtaacagaattcttgatttaaggcttatttatttaacgtgcccttttgttttaataaaaactaacatgagattaacatcttcgttaacttttaaattctcaatttatcttcatctataatttcatcgtccatatcatccacagaagacccgagtcgtgtttgggtttcctcatctaggttttattggtcgttcatattttttaagcaagcacttattatattttttccttgttttctcgatcaattcctggatttcctcatctaggtttcccagtcccatgattggttctcacacccgcatgtcctacccatgaaattccaacccaaaaagtagcgatcttgaatgttcccaaaagcttgatcaaaaaatgcgatcaatttgggtgcaaatgcacgacgtgcagtcgattatagccgcaacaatagttgtggctgaacgagaggtgatctctgaacgacgagtaagtgcaatggtggggacaaacagtaatgagcgtctttgtttagcttctatcgaaaatggtagttttctttactttcataaatattctgtaaattttttcagtggtgagctttagcttccttagaaaacggtcgttctctttactttataaatattcttgatatcgaatttcttgtgaaaatttgcttttgatatgggtatgatgatgcgattgcagtaatgatggatcgtacgtatttgaggatggagttggaaggattgcacaagagttatatgtagaagatacaatccttattaaggtttagtttatttctcttttctattgataaattttttattaagtttatcaaaaattgtacttttatgtttttcttgatagtttctctttttattgtcacctatttcattattgatttttaaactgtttcatttaagtttttagcttctttgtattaaatttttacagatacttgaagttctatttatgtcctccatgctaatagtttcttacatatttttttttttcaaatgcactaaaagaggcagaatttcaaaatgcaatttgaagtaatgagaagtatgttgaatttcctactctaaaacaacaatttgaagtattaattcttgttttagagtagaaaattcaacatacatctcattacttcagaaaagccatcagccattttgaaattctgtctcctttggttggtctaagatcaaccatgtcatgtgaggtcttaatgaagtacttacatgaaatatatgcaatgcaagacttttgagtctttggcactaccccaactctaaatgcattacttcaaattatttttctaagtatgatttatctaagagcgtgatataaggtgttggggtcatgacttatttatcatattttggaaaacccatatgctattttgagctctacttcagatgggtggtcctcttagatttgtctacgagaaatgtggtaaaagtgtagatttgattgaagttggaattgagagcacatcttcctcctctgattcactctcgcttctcctttgtcttaaaataaatttgattctcaaaatataaattaatataagaatattgttggtgactctttctattatctaacactaattgtatttaaagaaattagaaaatcattgtaagctcactttggtagtgacctatttagttgtttactcgttcaatttttcaataagatgagaacatatgaaattaatgagattctactatatgcaattaataaaaccaagcgaagaaaatgaagtcccttctcattgagaagactgtagttgaaggtggcatctttgtatttattctatatgtgattatcattaacaccatgtgtttaaatttttttatttctttagtcaactataatatttgctctaattagttgatattttttaacatttaatatatgaataatttaatataatttaaatgacaagtggcagtgtacgatttactatatttaatatttttaaataattaatataaaaaataagattttaaattataaaatataaaaatatatttaaaatatattaaatttgttaaaagtactttattttttcatgtagttagaaaataaagtgaaatattttataatatttataaattagttgacgattaagaatacaatctgtatatatttcataatagtttgttttataccgagtaagaattttatttagctaagtaggtaaaaattaatacatcactcacaattctcataatttatctatttcctgccacatttatgttattgatttattaatatattagaatttctttgatctgttattgtaggattttattcattacacttattggaattgtttctacaatcaatttgtcacctattttatttgctccagcgtttctatcatctaaggtaagtgttttttattattattattattcatgttcggttaattcgttcgttgtaaaaagattagaaaaacatatatatatattacacattatgcatttaattcgttgtatatatacacatatacgtgtatatttacatatatttttaatagcttaagattacaataataaaacataggtaaaaaaatataggtaaaagtcggtggcttttgaattctataaaagagaaggtctattgtataaatttggttcttactaattagagaacgacgatctcttccttccactttgaactcaaataattctctgtcactattgatttcccaaaaattgaattggaattggaatacagagaagttgagtcatcgctctttagttaatactagcaaaaagctacgtgcgaggcacgtatactaaatttatcacaaattaattaatcttataatctta

SEQ ID NO: 17064 - DNA, 5863 bp, Cannabis sativa
  modified_base (39)..(39): a, c, t, g, unknown or other
atataaaaatatgatatataattcaattcaatataatanaatacaatacgatctaatacggcgttccaaacgagcccttagttctcgtttatgtttaggactgtctttctattgctctatatatcaggttgaactaaagatcatcttttgccctaacctctctttttctccctgcacagttttctgccattttggactctatagatgattagcgctttacataattatcatggtatgacgaataatgaatttgaatttcgtaagcacagccatagcaaaagctatgtatcatgacaacaacaagtatgttaaatttgtatttaatttgagattttaggattttattagtttgtgaaattcggaacgtctttcacttgagttagcatttggaggcttctttatttttgctatggctagtaatagatacgattctcttcaatccattagcagcataggactaaatagaaagaattattcttattgaaactatgtcgtaaattttatttgaaagacaaaaagatgcgggaatatgtaaaattttcgactatacattcataaatgtacaattatttttctcaaaaacaaaatgaatgctcaaatgttttcaactattacaggtcaatttggatgatgttacattacatagtcaaggtatactaaaaaaagtctaaaataatctataatgtgttgttgtcttttcagtaattgggcttggttcatattaaccatatattttggaaacatgtgatatgatattactgtaacatacggcaatatcactagttaatggttcattgatagtactatagatattagtattctaattcaatgtggtgtagaatattataataaggtctttcgttatattgcttaggtccattcgaaatgaattggagtcgagggcttattatctggtgtagcttattaagccaaaactggttttgctgacacagtgacaagtaaatcccctaagcctgagcttcaatgtgaaactaaaaactagaaaaacaaaaggacaagccaaatgggtccaaaaccaaacggatcaacgctctcgccttagtggatttcatcagacaaaaaaagcaggcctagaaaagtttggtcaaaagatggtaaaaaggaattcaaagaggcacaaccctgtagccaatcataaaatctggtccatgcctgcagattttgtctcctaaatgctccttttcctcgaccctttcaattagggacacaaaatcacatccccagtgaaatttcgaacaagaattaccacaaaaagcaattaaaaataaagtctcccacaagaaaatagtgtcaaaaggcaaaggtgaaaacctcctctcgatccatttttttggataagtttcaacagtggatttacacaacaatggtaaaatataaatgaaaggtactgatccgcgtacatgcatgagagtcctttcacttaaacagaaaatgatcaaaaggttgcaaatccacgcctaaatatatctctatatatatgtagataacttaagaacaataacgatttataatctttttcttaacttcttgtcctcaccttgatcttttgttaccctttttcaaaacacagaaaagctgtttttgtgcccatcttgataattccggttacctgaaacataacatatgagtgcagtaagtaaggaaaggaatcaattaatcttgtaatcaaatatccatgccgacaataaggtaaggtataccttgtttttgagctaccaagagtgagctctagatcatcaactccacattcttcatggatcctctccccttgccatggcttaaccagccctgtcatgtgacctccaaatgcgaattcatcataaatgacctcagccattggaatatcagcattaagatcagaacctgcagcaatggcaggagagcatgtcccgctttgtccaggagtgcacatgcgggatccgccaccagccataacatcatccttagagccaaatgggttgggagcgacaagactgaatgtaggagaatgtggtcctccctgggggatccggatcccagaaaaccattctgggtcaacaatctgacgccctggacttggtggcatagaagatggctgaaaggaacagagctgcccaccccaggctgggcgggtcaaatttgcttcccagtctgtcttaattctgggtgttcgggcagttggggaactcaatggaggagtgacaggtgcactgatggaaccgccatgggaatatagatgagagagcttggaggaagaggcagatgaggatgccgatgagaggtttttcagccatgggatgagggaattaccatcaccatttgggttggcagcagcataggaagatgaagctgggctaggaaaggaagaggagccagggcttgggttgtaggaagcataggggcttggatggtaagatgaacatgggcttgttgccgcagatccacccactacatccatacgttcagcaggcttgcatccctgcatgtatgtatctcaagatgatcaatgacttgtttaacagtacataacctttcatttatctggcataacacatgtttaattgcttttctaccataattaacgtgaaaagtcatcatcaaataaacttgcaaatggtggaaaagcaaataaattttaaactgtttacagtcttggttatgtagtcaaggtgcaattttgggagagaatttcaacattttcaagccaaagaatatggaaacatgatattgggagagaattattaacaaaatcataatcattacattttgagactggaatcaaataagaaagtaggtagacacacacagcctctatatatgtaatatgtatgctaaatctttattcagaattttatagctgagatataatcaaaaagataacgtgtgacgtgctagtcaagactcctattaccatacgtgtgtaggtgtaagtgaaaaataaatcaactaaatacactcaaccacattgcactattcaccactgtgtagtttgccttaattagcacataaagatcataataaacatgacccaccaggtagttctttaatgcaacaaacgacaactgaactataaagtaagaatggcagcaggaacataataatggacagaaattccacaagcggagaagaaatcacgggagccatgccatgagataaaacggaaaacttggcaataaccgagaaagtaaaaggtttactcacaaaacataactctgtctcagtgaactgccaaaagtacccttcaaaatcctcgaaaatcccaaacacaaactaatcctattcaaaaattgaacaagggtatcttggtctcttcacctccaggttgggtctgtctgagactagaaagaaagtcacagcacagccaaagatgcagagaggaaagagatagaagaatcttgttgcttcacgcgtaaaagcgattgcaaacgtctaaaggtaaaagagagacccatgaaaaaaataaaaggaacagtcttcccctctcactagatctaattctaaagtacccttaccctcatatcataagaagaaaaaaacaaaagaaaagaaataaagtgccaaaaaaagcagaccagggctgggctggaatctaatttatgtaatcacctaaaagagcacataaagaaaaatgaagtaattcttgaaaagcctcagccatccccattcttgctactaacttgcgccgcttacaaaagcacactttagcaaacaaagccttctccggcagcccaagaattctaaataaacggtttcatatcggctataatattaaaggaaaaaaaaaaccattcttctaaatgccatgctataaacaaaagaaaaaaaaccattgtggagctaaattgagttaagagaaactatccagtttgattaagcagatagattaatggacgatctcataagcaaaagagcataagaacaatctgtaataataaacggcattattcttatatcgtaaacacaaactatagcatagatgatgggatatagaaaacagagaaatgagatttgttttaccttgcgataagtggtgccgtcgagctcgacggtccaaccggcttcgttgcacagggctttaaggacctcattgttatcacagtgcttgggaagcttgtagttaccgtacattctcagcccggagaagatcttcgccgctaatagctcttcgtcttctctccctcttcttgttgttctctctctccttccatgttggcagccgagtccccgacgtcatccccctctccttctctctctttgttccagtcgaaactaagcactataacaccaaaaattactttgaaagaaagtacgatttctgaaatggagctttttatacaaaattattcaactagattcgcttcaagcctaaattcaaaaccgaaaattcagctcttcttttcaaaaatatagaacccaaatagaaaaagacactaaaattcaaaggaacggaagaaattcagctagaatggaaatttgtaactgaagaatcgaagtgaaacttcgctctgcggagaatataatcttaattcatcgctgaatagaactaaccaggtgtaatgcaggaagataatcgggtctggttttactataaggatcagataattgattgttcaacaaaaaagaaaagaaaagaaaagaaaaatcccagcgatggagccgggagtggtatttactgatgaaatcccgggaaaatgagagaaagtgaaatgaaataaaagtaacgtgaaataaaaagtggcagagacgagctaattatgttgttggagaatcatgattgctatttgcccacatacctcggtaattttactattctgccactacttttttttctttatgacaaaaaagtaaaggataatgaaatttttgttttaatgtctttataataaggcaaaggttttttcttttcgtaattatactctatggcccaagtaagaaagcgaatacaaatataatctaataaatattttaatcaaatttcataaatactaattattttccttatattacattcgctagtatgttataggaattatttattcgatttgactgaaaagcttttcaacacagggcatagaaacttgaaattgattctaaaaatgaataaatcaatccacgttgtacaacccctaatgaaatgttttctgagcttgagcctcacttttagataagaatatccgttcagatattgatgtttccggcccaccattattaccatttttctcgagacaaatttaggcaaatgaagtaattataattaactacagctgtgacaagattgtctaaagaaagaaacataatccaagattatcattacttattttatttgaagaaaagaagaaaattgatgaaagtccaaaattttagattatggcaatagtatcccctcaaaaggaaatatgtattgataaatccaaaagcgtaacatttcgctgtagaaaaaacatgcttcgttgacctgaatcaaacaaagcaaaacgggcccacttaccacaataataacatgtaggggtatttatgactttttatctcataaagaaccgcactgtccaataccttaactgggcattatacggactcgactcccgatctgtgagactcagataatctgatctcgttttctaaccgtcactgtgacgtttgaaagacacgtgtccttattgtatacgttacttcgtaaccgtctctgtcttgctatgactatgactagttattagtactactaatttcatttctaacttctttttctctttatgtattttgctctaatccacttcataggagtgagaaaggaaatcaactcccacgtgccgcagatcggtgcacgtgtaagaacgggaccgggcttgaacttacaagttgggta

SEQ ID NO: 17065 - DNA, 4196 bp, Cannabis sativa
aactgcaccgcaccgcgtggtttggaaaaaaatacaaagtgcaatcgcattacaaagaatttcaaattgtattttttatacggtgtagtgtagtacaaataatttgtacaatgtgagcggtttgataaagaatcctaatttcaaataatcttaaatttcaagtaattcagctaacccaactcatataaagaaagactaaatatttcaagtaattcagctaacccaactcatataaagaaagactaaatatgatgaactatcatgatcattcataataagtatttcaatataaattaaatggtacaaaagaataagaaacacagcactctaactctaatccagcttctccaaatggcatattattagagaaagagatggatatggacttatcaatatcatcattacaaatccaaatccaattcatgtatatgttgagtactggtcaagtttctaaatgtagcattatcatttaaaaactagttccaatgatctcaactttcaagtttctttcccatttcattttcagtaaaaaataattattacattttaatcgaaacgaacgcaagccagcttaataggtttacaaaaagaaaaaaaaagaacccattatctagtttttgagttttgtggagccccaccaacctcggacgaagtaattgggcaaaacggtggaccccacacaaaacctcccttttaaagtgaagagaatagccaatgtggcatggggttgaaaagtcactatctgccatgtggcactgtgccagcgtggaaatcctacaagtgggttccagctggcaattagggggaataatatagagagctttgggagttgggtctacgttttaagagggttatttacttatttttggggtacggtcccagtattgtaggaccagacaagtcacagcgtattgagccaggaggagcaggtccaccacccaaagccagcctgtgagttttgtggaatggcggcagagacttgttggctacctttttcttactttctttctctccttttcccctctactctctttaagctcttctctctcttcatctttttgtttatttatgtcgtttttgacaactggctgcaccacaatacgacacgcattctcatccattgcttactcacacagctctctctctcttttgattcttgcccaataattcttctctttctcaaccctctcttttcaaattttgaattccttttcaccaaattgtccttcattattcttcatttcaaaaaacaaaataaataaatatatagagattttctatttactcttttttttaccagtttatttcatttgactgataagctacgaggaaaacaatgtttcgatgctacttaagttaaggaaactaatgctacctcaaatatgcgtgagaaataaatgcaagataagagtaccagccttgaaaggaaaataaatcaaataaaattaaaattttgttttaatgaatgtattttagtataacattagcatgcatgagtcaataatgtcataacttttaatgacaagatctatcgtaaccccagttgtagcattgataatttcacccttctccatacaaagtcaaatctattttgtgttttttttaccaatgtgaacctgagaagagtttctaataaagaaaccataaatctcaagggctaaattgtcatttcaaaacaagagcacaatcttagttataatttaacaaaggaagaaaaagaaaagtatatgatgattaaataaacaaaagagaatataaaaaacaaaaataccacttcattcaatataataacaaaaatcataacaataataattagaagtataattaatttaattgtggccagaaaaaaatatacttaaaaaactcaaaacagagcttcctcctttctcataatgataatataaataatataaacgcgtacaggttcatcagtcttcgcgttcccgccgcctgttttcttcttctgacttctctctctctcgctctcacttttctctctctctcttcttcttgttctacttctttctccctctaaaagttattgaagttgctcatcaaaggagccaaaactgtaacaaaacatagttctctaatggctaagtcaaagaataatgcaaaaaaactttcttacatctctgtcccatctcagatcatcaactctctatcatcttcgtctcttcaatctctccttctctcgcccaagaaatcatcaagaaacagtaggttattaagcttattgaacacttacagaagaccaaaattctggttttgctctctgtttttctttgcactttttggtatgttaaggttgggtttcaatcttgaccctttggttcctttttctccatacccgtgtattacaagtctaacccagggcataagctcaaatggggtttcaaagacagagaaaatggatgttgccgcaaatggtgacgagattgatgaaaaaggtttcttgaccaactttagtgcttcacagacattggcttcaaatgggttttcggagttagaggagggtaacgagttctggaaacagccagatggattagggtacaagccttgtttaacgttcacaagagagtataggagagtaagtgaaggtattgtaaacaacaggagaaagtacttgatggttgtggtttcgggtggattgaatcagcagaggaatcagattgtcgatgctgtgatcattgctaggattcttggagctgctttggtcgtccctgtcttacaagtcaatgtcatttggggagatgaaaggtaagaaagaatattacttccttctcatattctctttaaatgagtgaacaaaactggttgatttgttgtgctttctttgatccttttattgtattctatttatggctggttttgtttatatccttttaagggaacttccagttttgaagttagttgtttttaatcgtttttccccccttgttgaatgcagcgagttctctgatatattcgatttggaccacttcaagagagttttggccaacgacgtgcgtatagtctcgtcacttccatcgactcatatcatgacaagaccggtagaagagaaactaacaccccttcacgcttctcctaactggattaggtcccgatatcataaaagggtaagggagattttcttcttgtgttaagttgtgaaatagttcctcttcttccgttgttagtttgtaattaggcataaatgacccacaacatgttatgatttaccaattttagagtcttttcgtgggccttcccatttttgcttttcgcttactaatgtggtttttaaaccatttttgttgtcattcctgattggtggaaattttttttttctattttttgcagattagcagggatggagtcttacttttacgaagtttggattcaaaactctctaaggaacttccttctgatcttcagaaacttcgttgcaaggtactgttaaggaaatgtgattttgataatggtttttttattgacaaatttggacgagtgtataataaaagcatcttatctttgtttggtttgttttaggttgcatttcatgcattgaggtttgctccaccaatattggacctcggcaacaagctggcagagaggatgaggaacaaagggccgtaccttgctctgcaccttcggatggagaaggatgtgtgggtgaggactggttgccttcctggtttgagccctgaatacgatgagattgtgagcaatgagcggaaactacgaccagaactccttactgcccgatctaacatgacttaccatgatagaaagcttgcaggtctctgccctttgaatgcattggaagtgaccaggtaaaaattcactatgtctttgtgaatgttttgtgtgattaatcactgtctttcagtataatgcaccaacatatcttgttgatctaattaaccgttatgtatttgtttgatatttaggctgcttaaagctcttggagctccaagaaatgcaagaatatattgggctggtgggcaaccacttggtggaaaagaagctttgcttccattgacgaatgaatttcccaatttctacaacaaggaagatcttgccttgcctggagaacttgaaccatttgctaaaagagcttcggtcatggctgccattgactatattgtctctgagaatagtgatgtgttcatgccatctcatgggggaaacatgggccatgcgatacaggtatt

SEQ ID NO: 17066 - DNA, 3398 bp, Cannabis sativa
attgttttagaattcatattagggcgttaatccaacatacttggtagtaaatctagatcctggtaaaatattttccaacatagacatcttcttggagcacaccatttaaaaaggcattgttgatgtcgagttgccttatctcccaattcttcgaaacggctatggtgaggataactctgactgtcgaagccttaattactgggctgaaggtttcactgtaatctattccgggtctttggtgaaagcctttggccacgagacgagatttaagcctctgaacagatccgtcagcattgtattttattttatgaacccatttgttcccaaccaggttgtactttggagaatagggaacaagagtccatgttttgttcttttttagagcttagatttctgttcccattgcttcactccattcctttgagcttagagcttcttggagatttcttgtttcttcttttcgtggattccactgtgatgttccaagataagccttaggcttgaaaattccagctcctactcttgtaatcatagggtgagttggtcttgaaggcggctgaagttcttattcaagacttggttcatttgtcacctcctgttcacttggacttgtttcaaattcactgaaattaacattgtagtttcatcggcagcagatggatcagaactagtttcctcaaaattttcctgatcaggactcgagttggccgtggctggtgatgcttcaagagaaggtagagatgctgcttctgaagttgtttcacctgcattaagtgttttattttgagacatattaaaccaagtaatgttaggaagttgggaccagcttggttgataaacaacaacttgtttttcgggtgcataattattgaggaatccctttttaaatggaaattctgactcattgaaggtaacattcctcgagatatagacacgacctattgagcttaagcatttgtaacccttatgagagtcgctacagcctaggttgacacacttcagtgaatgaaattggaatttgtgggcttggtagggtcggatacatgaaaaacaagttgctccaaaaactttcaggaacttgtaattaggtttttttccatagagtgtctcgaagggtgatttatgtttaaggattggtgttggtaatctatttatgaggtaaactgatgtctgaaaagcatcaacccaaaattttagtggcatactagcttgtccaagaagggtcaatcccatttcaactatgtgcctgtgttttctttcggctctaccattttgactagaggtgtggggacatgagtgatggaagtaaattccatgtgttttgacacactcatagaaggctggatattcacctcctccgtctgttcttagtgctttaattttggtgtcaaacttgttttcagcaaacactttgaattgaacaaaagcttctagtgcatcagcctttgctttaaggggaaataactaggtgaatcagctgaaatcatccacaaagtgggtgtaatacctatagttggtgttggattgaacgggtgcaggtccccacaagtctgtgtggatcaattcaagaacttttgttgcacggttttgtgataaattgaaaggtaaagcgtgtgacttaccatattgacaagcatcgcaaaagtgaacattttcattactagaaatgattacattaagagaagacaagacacgttttaatactctcaatgaagggtgtcccaaccttctatgccaaacatcggcttttgaggtatcattgttactccaagacttagacaaaacagacacactagtaaacttaggactattattaaaagctgattgtaggttccgagaggatgttggtgaggtattcagctagtataagccatctctaagcctcccttgtagcatgaccttccttgttaccttgtccttcacaaaacaaacattgggatgaaattcaataaacacttcattatcagcagtcaactttgaaacactgataagatttttagcaatctcagggactaacaacacctcattaagtgctaaactcttctcattattagtttgtaaagaacttgaaccaatatgagagatataaatttgattaccatcaccaatagtaagcttttccttaccaccatattcagttttgtggtagagattagttgcagcagaggtaacatggttgctggccccagaatcagcataccaagtgtcactatcaactacctcaggtgatgcaacaaaagcagtatgattagtctgctgtgagccttgtgagtgagggtcctgacccatgtaccattcgccgtacctattgtagcaataggcagctgagtggccatacttgccacatacttggcaagtaggcttggagttgttggatcaacccctacctcgacctctgtatcctccaccacgacttggttgattgctggagcttccataattgccatgatggggagtaaactggcccctgcctttaccagtgccaggatttggagttttagcagcaagattggctgctggtcttggtgtatttccctgagtagcaacattattttttgagttttcaccattgacatgaagccattgaagcttgctgtcaaaacctagaagcatatcttgtaattactgccaaaaaatattaggtctagcttctatttgaacaataatagcaagatactcagcacccaaacctgagttaacattagccacaagatgactctcaggatatgggtcacctgcaaaggctatctgcccacatctttttctgccttaaatactcaaccatgggggtattacctttcatagttttctgtataagtgttcttttgttatccattttggcccttgagtgagctccaaaaaggttttccagtgcttgccacagtgtagcagacgaaacgcaccccatgagcaactggtcactaacaatccagtgctcatagtcagggtgtggtttctgcaggcaaaaattctaggggacatggccggtttccattgatgaaaccatcgagtttattccctcgaataatggtcgaaaccattgtctcccataaggtgaagttgtttctgtcaagcttaagggagaaaggttgatttagtgtattaaatggctgggtaaagttggtgctgtagctagatgagccattgttgttgtaggtagctcctgcattactcgaagcagggacaatggtgggatttggtgggtttgcagggggtggagtctgagagttccctgtcgacattggcgtaggcctttatggctctgataccaagaaagattttagaagaaaggaaattgtaaaactcagctcaattgattctaagcgagacgaattcatttatagagagaatgatacaatggagaccaattacaagatgccaagtggcacaatagaaag

SEQ ID NO: 17067 - DNA, 2543 bp, Cannabis sativa
caccaatgctcctcatgtggccatgattaactcacctctggcgacgagaagtggggctggtggtacctcgaaccgccctatttcgaaacttgggcaaacccgcaaatcgaggaggggaaagatggtgacctctcgagagctagctggtcgtggttctcaacgtgctgcctggattccgaagcacaaacctgcaaatcgtgaattgacaattgtttcgttggataatatggtggctacggacaataaggaaaaagaaaagcattatgaattaatgcctattttagagagatgcccaaatatatatacctttagatttaaatattgaaagagttcaaggtgttattgggccggtcaacatctctagtgggcctattgctatttgtaatagccttaatggtaatgagaaaatgcatcaggtgaaaagtggttttgtggaaggtgggtcgtcgatggtgcgggttggtaatgggccacatgttggtgggcctttggcttttagtgctcacgtggattatgtgccgtgtaatggtgtgggccataaggacacgaatttatttatagggtcttctgggcctaaccctttagctctgaagaagatggaactgattacgtctaatgttgggcctaatattatttctaaagaggctggtgggcatgaggattcatatcatgtgattaaggagctggaagatggagatgcaattgttgatggatctagtgttagagctcatactaaacaaggacaatctcttttttatggggctaaacgccttactgttggtcatgttaaggggcaagagtctcatgcgaggattgaggaagagaaggccctttctaatttttttcaaggccaagagaatttgttgcaagatctgaaaaaatttgggcgcttggatttgtatgagattcgacaattagggggtgacattggtgtccgacctacttctaagattaacgaaagaactactccgtttaagaaacgaaaattaaatgaagctactaattctctatgctcaagacctccaaaagtgctctgaatgcaccctgatgttgttcgtgatttcccgtgagactccacagagcaggataatgcttctaagattgcctttgaagaactctctgatgatatttccttttcaccgagtcacattaaaggtattatgaagaatccgatggttggcacttttttgattgaagattttgactcgagtgtctcggttcacccttgtacccctgtggaggagaatgtctcatctcctccacaagagccatgagaggcattgcttagaactgtagagggttagggcaaacctctacaattcgggagttgaagttcctgatcaggttatgctctcctgattttatctttctcaccgaaccaaaagttgatgctactccgctggtacgtactcttaattcacttcacttttactttaatattattgttccacctattggtgctgctggtggcattatcttgacctggaaggatggctttagttttgagtgtattgctagttcacgtaaccatatgtctcgtctggtttactcggacccccttctcatccttggcttctctcttgtgtgtatggccctccttattttcatgccaagaaaaacttttgggccgatttcatgaaaactggggataagtttggtggcccttggttgattttgagtgatactaactttgtgctaagtgagtccgagcgtgaagggtcctcaggaagggaccagtttatcccattcatctctaatctggttgattctcaaggcttttttaatttgcccatttagggggataggatgacgtgggataaccaccgttctggtaagaaccatgtcaaatatgctcttgacaaaggtcttgttaatggcacctggcttaacttgtttcctagggctgttctttgctcttcccagacgactaactctgaccatagacctctgtgtcttctcataggcggtttggatactaaattcctgtccagagccctccctgtaaggtcagtgatcaatagtaggtttcctattaaggattccagctgcctcctttgtggtttgggggaagaatcttttgagcacttgtttctctcttgtgatgtggcttttcacttgtggcggtcctctccttggggtttttaccctgtttgcaatacaagcattcatccttgggaccgggtgaaattcatctgggatctgaaacacaagggtattaatgtggaagatgtttttctttatgcttcgatcgtggctgacaccatctggcggacccgtaatgataaggttcacaataattgtccagttgatatgaagaaatgtattgactctatttgtacttcttttacagatttgtaatcttctcttttctctcctcctactccttactgcatagaggcctggtccccccctctcctcaggactggattaagctgaactgtgatatcagagtggggatggatagcatgtgttcggcagttttggctagggatcacctcgatcgggtgatccggattcatacagaccggttggatttttttgat

SEQ ID NO: 17068 - DNA, 2890 bp, Cannabis sativa
  modified_base (2778)..(2779): a, c, t, g, unknown or other
aagtaggtcattggtcttgggaggtccgccatcggctggtccatcctgttcgcgcttgcacatgagctgctgacgtttctgggccttctcccgctcggtcaacgaggtatcggcctgaatgatccgtatggaagcgaccaagtcagaagaagaagcgattggtttaggaacgggatcgggattagagagaggcgaacagtcggggcattcccatttgagagcctcccccatggtttcggggcgggaagagaggcaagcgacatgccatggagtggcgcaggtgtgacaatggagggtctcatcaggagaaggcttgatcttacagaccatgcaaaggccatcaccatcgcaggggagatcagccatgatggtggttgaggaggacagagaaagagagagtagtcagtactactgagttaaaaattgagcgagtgagaagtgtgagagaaaaggtaggattttaataggattaggaaactgtggggatttgtatgggcggcattttgaaaaatttcataaggtttccctcttttttttatttttagttttcccaaaaaaaaaaaacaatttatctgttattcccttatttgctccctttcttctctttatttctttaataattataatttataatctattccgtgcatctaacctattcacgttttttcttttttccatttatcaagatttttcctaattttcttccttaatggctaaagtttattcatgctctaagtttaaacataatttcattttttactccaaagtcagctgatgggcagtcaaaaaagggcaatatagtgggtcctggtgatgtccaggcccaccaatcattatgagtatattaagttggaattgttgtggcttgggaacccacggacccaacaattccttaaagacatttgttgtcaaaagaaacacaaatttgtattttttatgtgagaccttatgcaagaaagatgttgtggataaaattcaaaaacgtttgggttttgaagcttcttttaatgttgatgcctaaggtagatcaggtgggcttgctcttctttggaaagtggttgatgaggcccaactccttaggttctctcataaccatattgacattcgtatcagccttcctgggatacatccttggcgtttgaccgacttctatggagaaccgaatcgcaatctccgatcgagaacctggaatctcctcaggtctctctctgccgaaagcaactgccctggtgcgttatcggagaattaaacaacattgctaaccaggctgagaagagaggctgacatgcctacccttcttctctcattgaaggtttccaatctgctcttcacgattgccaactccatgacttggagcttcgaggttatccttacacatgggagcgtggaagaaacacaggcagtcttgtcgaaattaggcttgataaagctcttgtcactcgacaatggttagctcttgtcaaagcttgctgggaagagaatggtcatttgtctcttgttgaaaaaattaaagtctgtagtttggctcttgaaaactggggaaaaagcctcacatgtaactttaaaaagaggttggcgaagagcaaaagtgctatggcagctataaaacatgatgctaattcgttctcctatcaagaatatgctgcagagaagaataattactttgagatacttgcccaataggaaatatattggaagcaaagatcaaaataatattggctcaatgccggtgataaaaatagcaaatattttcatgcttccgcaagtgctcggaaaagaaacaaccaaatccaccaacttcaagattcaaatggcagttgggtacgatgggatactggcttggataaggtaatttcagattatttttcaagtcttttttctgctagtggtgttaatcatgacttggtggtaaatgggattagtggcattgttaataatattcaaaatgaggatctgccccagccggtaacagttgaagaaattaaaaatgccttattccaaatgcatcctgataaagcccctgggcctgatggaatgggacccgatttttttccaaaagctctgagatatcattggagcggatattgttgacttggttaccaacttcttcgatactggggttcttccaagtgatctcaatacaaccaacctcgtcttaattctaaaaaagaagaacattttgtctatgaatgacttgtggcctattgctctttgcaacgtgttgtataaaattgtctctaaagtattggcaaatcgaatgcggggtattactgaccagattatgtcaaccactcaaagtgcatttattcctggaagactaatctctgataatgtaatgattgcatttgaagttatgcactacctaaagcgcaagacaaatggaaaaaaaggcttcatggctattaagctcgacatgagtaaagcttatgaccgggttgagtggagttatctacaggccattatgagtcacatgggttttcatgataagtggatctatcttatgatgtcatgtcttacccctgttcgatataatgttatccatggaattcatgttgttggccctattactccaactcgaggtattcgccaaggggaccctttatctacttatctcttcataatttgtgttgaaggcttatcaatgcttatcaattctactgaatccaatcgcatcatccaaggctgtcgggttgccaaaggagccccctccatcacacacatacttttcgcagatgatagctatctcttttgtaacgtcctaatgctaaggcacgctanngtgctttttcaattattgtgcaatttttatctctttcaaaaaaatttctcgaaaaacgtgtcaaattaaaacttttgtattaaatactaaactttgtaatataataaaata

SEQ ID NO: 17069 - DNA, 2255 bp, Cannabis sativa
atacaagatctattttgtcatttaacaaaggagagagtctaattgataatttttataaaacacaaagtccaaaataatatttaccgaaatatttatgggaggtgggagtagaagaaagcctatatccaaacaaacacaagtaaagcacaaaacctccgtgactttcctaccgagtcagaaaaagagagagagagtttgtctataaatacccctttccttctcatactctgttattacatttacattcattcttctctctcttctcaaaaccccaaaccaaaatccccaaaagaagaagaagaagaagaagaagaaagattattcttcccaatccaattttctcgacaaagtttattatactcttgttttcttttctgccaaacactcttgaaagtttacttttttgggggaaaagaaaaaaaatgtctgatgcgttttgctccgattgcaagcgccagacagaggtggttttcgaccactcggctggggacaccgtttgttcagagtgtggacttgttcttgaatctcactccattgatgaaacctctgagtggcgtactttcgctaatgagtcgggagataacgaccctgtacgtgttggtggacccacgaaccctcttcttgctgatggtgggttgtctactgtgatcgctaagcctaacggcgctagcggtgagttcttgtcttcttctcttggtcggtggcagaatcgtgggtctaatccggatcggggtttgatccttgcgtttaagaccattgctaccatgtctgataggtaagaaggcggcggcggcggtgtgtgtgtggtttttgaacagaaaatattacaaaagtaaaaattttgaaattggaatggtttggtgttaaaagtaggttttgaattgtgtttgtgcgaagggtgaaaggcggtggaaatcttggaattggattttgggttttctattttatgatttgagtttggatcggatatgtggggtttcattgtttagcaggtttattagaacagaagattgtctagtccaatgcgtattgacatatttatagctgagaatttgaatgattttctaatatgcttaaattgaatgaataaggtcatttgaggaataatcataaagtatccaacacttgttagttagccctggcagagacatctaagtgttgcaaattggaagaacaatagggattatataagcaaaccaactgggaatgaattctgtcattttgttattttgttttgctggttagcccgtgtaatggattttgaaattctagtgcagtgtagtgctgtagcaaatgtgagtcatgtggtggtttggattttggtaagtttcttatgctatttttgcacttgtgtttgttatgtatggcagtggtgagaaattttgggacagttagttaatattttagaagttgagacttgggagctagttgtagtgatgcttgtcttaggctttaacacattgcatttattttgcttttctatacaatgaacataagaagtgtaccattagtctactgaggttcttcaaactagttgagtgaattcttagtgccagtttgaattagttatgaactctagaattggattttgttaagtttcttatgctacaatttgcatttgtgctcgttaggtatgaagatgctgggggaaattttctagatttttaatttcttttttgttgaatggtcggactttggagctagttgcagcatcccttttcttgggttttaaactatcaaatttatttttcctttccattctttattaccttatgatgattccatttgactttacttgggttcttcaaataatttgagtaatttttaggtggtagtttgaattggtttagaagtttagaattgggttgttccagtatgagtttcagcaataccaaaccaatttactggagttgatgacatcctgttctttttccttaattcagctaagaaagaaacgggtctagtgtgcttgaaaataataaggactatatatttgaaaacaccattttattatccttattattattatttttgcgtagcattacatagttgcttatgaaatgtattattcacatgtttatatacatggcatatggcgtataggtttctgtttcatcgatgtcttatagcatgcacaacacaaagaaactgatgtattaacacttcttgcaggttgggccttgtagcaaccatcaaggtatgctatttgctttggtctttgttacatatgcaactatatggaggattacattgtt

SEQ ID NO: 17070 - DNA, 8620 bp, Cannabis sativa
atataaacataaattcttcttaaacatgttgtgattattaattcacatcaaataaacaagctctacgaattcgtggtactgataataatacctaagaaagtagcagtggtgcatagaaattacaagattagatggaagggagttttcattaggagtggccacagatgcatagctcatgaggatattgccataatcgtagtttgcataaaatatagagacaataataaaaaacatgtaacttagattacaagtttgtatttacagtaaggttacgtataatatttccaatgtttttaaacaatgatgtaagctgcttgaaattaatgaggttgctaacgaaaatgtacaagcaacataaaaataacttgaacctctatgagttggtatgcatcaatgagaatttctgctgatgatttgatcaggatcaagaacaatgccatgggctactcctggtcggccgaagatacctctgtgatgagtaggggctaaaggttccatcggctcaatatttgcaggaattggagtttcatcagagtggccagagatgcagagggttccagactcatcttggtcccagtagacctctaccatattccctctaggattctctgtactttcggttccaggaattcccacaaacctagctcccactggtatctacattacatttcataactatagagtaagaaggcctcttatgtgtaccattaacataacaatggaaaactagcagtgagttaggcttttacctcaattgatattccagatgtcaaagtaagagtaacgagtctaccctcagctattgctgtttctagttctgcttgctttgcaatatttaagaaaacttcttcaagagttgtaagaccaagttgaatgtcaattataccaaattcacttgctctttcttgtagctccgtaaaaaaattctgtacgttaaaaatacaatgaaacaaaaaatcaaactaaaggaacaataagggaatttatttattatttcaacaaaaaatgcaggcaaaaagaataaaaattcagaaacataccggtaaaagcacctctctatcatgaggaatgacaaaggtcaaaaatgatttgttctcctcttttggaagaacgtttaaatgctgtcaaaacattcatcaagttagagatgaactatttattagtgaaagaaaagaaaaatcatgaatgattgatttagtcactctacatgcttaaagaactgcttcacagcatcatgatgagttgtatcaacaacatccctgttggtagtttggcgattgttgctaccagaaaagctcacattagcaataaaaccagtcccaaaacgggacttcaatctgattgaggttccaatgcagcgtagcctaccctttgccataatcccaatccgatcacttaaaatgtcagcttcttccattgaatgtgttgttaggactattgcacgccctttcttagcattttctataatatcccatacatgtcttcttgttattggatccatacccgttgtctacaaatcaaaatgaaaattacataagagagtattcaattgatttgactagcaaagaacacatagcaataaagacaacagtctcaactgcttacaggttcatctaatatgactagttttggatcaccaataagggctatagcaacactgagtcgacgtttcattcctccactataactgccagctcttattttggctgcctcagtgagtctcacctcctcaagtgatgcttgaatagcctgcatttcagaaaagcgctcaagtgaaaatgtggaatctaaagagacaattgcttaacaatggtattgcatgatagttagacatctttaactcttttactaaacatgcatgtgagaaaataatcactcaacacattataaattgtgttacatactgatttgattgaggatggggacaggcccttgatactagcaaagagattgaggtgttctttcccagaaagtgcatcccaaagaatatcaaactgtgaaaattgaaacagatacaatacaaatttagattagtcagttttctcaatactgctaaatactgaaaatgagatatacttatattcttgataagacattaacgagaaatcctgcacttacaatacaaaggaaacacgttatgggcaaggattacctgaggacaaactcctatcaattttcgaattttagacatgccagtggagcttcttacagatagcccatatatcaaagctgttaccatgccggttacaattgcaagcaagaaaaagacagcagtaagattacactcatatgttatgtttatggatgaacacatcagaaatcaacaaattaccatctccactagtcaccggagtgattccagtcaaacaattaattgctgtggtcttccctgctccattgggtccaagaagacaaaacaactgatcttttgcaaagttaacccacaggtcctaaacgttgatgaaatatttttagcttattgctatgataatttaattataacacagaaaaggaaacaaaacagcactaacagaggttcacatctcttatgcatgaacatattcttatgagatttttgtgtttttcctcctttatggcaaattgctaatcagaacttgttttgaataaataaatagtatattttgacgatggaatatccgtataggtagaaacaagcaccaaatctttatcaagtaggacgctacactaaataaatattgatagaaagtgccataaattatagctaatatataaagttttcatgactatcactaaccttgctaaaatccataatcaagcacatgtttttaccttcaaagcttggtaaggagaatttttcttgaatttacagcaaccaatgtttatggacccagggtatgtttttcccaatccacggatctgaacagcaatattggggtaattaacaccttccctagtgtgttgttttactaggttctcctcttcaatgacatcttcatcatctggggaaataagctcctgtggtggaagagagcctacacagctacaaatgccaccctctgtgaacagaaaatgagaagctattaagttcccagtatcaatcaacaaggaaatctcaagcataatataaacacaatttaccttccattttgtttccaccttttccaaaccaatatcctggttttaaaaaataaaacacagattttcttacaccatatacgttaggaataatgttatcaaagtagatcgccaacactaaccaaaggaagaaagtagccaccagccacttataaatatcatcctgccaaggaatgttgaattcaaaactttgagactaagaaagaggtaacagctaagaatttgcatagacaatgttgaactcaaaactttgagcaccaatatttctcatacaattgttatgacacactcgttgtcatttggtgcacattttgctcgtctactccagctaaccccaacatcttgagatgtggatgttgctccagcaagtaaggataaggcttgagccagaagatttggtgggaagaatgaccaaatgattctgacatgtttagatatgatagaagagtatggaaatccgaatgctgtaacaagctgcaatgagaaaatggtaaccgctgttaccattctaatgattacttctcttcttgagtctagaaaacactaacaagggaagcttacctgagttacaaagccaacaataaacacgaagaaaccagcagttgtagatgaagatgccttagtcatgaaggctgacaacaagaaggcgaagccaagctgcactccaaatttagacatggaaacaaatgttactgttaacaagaaattcttccgtgacagagagaataacaataacaagcacactatgaaccacataccacaggaaccaatcttaccatattgagttggaatagaaagaatacaagaaatacaacagcaaaactattgttcaagaagaattcaaactgaaacatcatgccaacaagaacaataacaagtgatgagagcaagacaagaatcccctcccatgtgagccatgacaaccagtaagcagaatcataaagacccatcatagtcatcgcctgcatgttaaatcaagaaagcagaattaaattctgagccatttcaagaaaaattctgtaaaaattttaactcctagaaatgaacacctgccgcagttttagttctttctcagtgagcaaagaactaatctgaagtacaaatccaaacatggcagttgcaaagaaaaatgttggtcctattgtatccattgcagagaagatttccttagcagggtgagaaaattccacaagattgacagcccagctaaagtttggaactaaacatgatgggggatatatgcacttctcagtacaatgcatcataaatattagaaagcatatagaacaatagtatgctaattctaatacctccaatgagagaccttgctatttcacgctctgcagcaatctgaagtgggatttgaaacttcaatgaggggtcttcataatatcctcgcttcctcacgtaagttgaattggtctgaatgccatagctaattacagtagcatttccctcctcaaaatgcaaagctcccggacaggtcataggtttattaaacagatattcatctacttcagctactgttctaaatgatttaacctgccaaacagagcagttttataaccactaacaatcaatccaaactactccttgtacatttttgcttataaaaaagttgtgcaactaaaaatcattgtaagaacaacgctatacttgtgtactgtatctgttgaggtggcgattatatttaattaaaaaatttagaaaagaaaaaataaaaaattccccagaaccgaatcacccaaaacgagtcaattagtcaaagacggaaatgccacgcggcaagtaaagtatagttaactttacatgcagagacacacttgatattaagtaaatcaaagattttctgtcttaaattaaattttctctccctttctttttctttttctttttctcggcaccaaacgaaacacgaggaaaagaggaattgtcgagcgaaaagtatcaaggtaagcaggcgttaactgtagcttaattaggagtgtaccttgttggaaggaatcggccttccgggattattaatcaaaatggctcggacaatttgccgaaccctagcgcttccattaccgctccagacgaagtcgagacaaggaagcttgacatagaacttgtcctcacacggggggattggaaaagagagctgaggttgaggattaggaacgctcctgaaagcggtggaggaagagaagcgagcctcgacagctttctggattgcgaagatgaggaagatgaagaagaaagaggcgaatatttggaggaaagtggccgtcttagtccgccatgaaagcaagaaattcttgttgacaagggacttgtactgttggaatagtaatggaaaaccgctctgtaaatccatcagatcagaccgtaaatttgaacaatcttgtttggtatggacatggagatgcgatggagttggaggctatgatttatcatttatgaagaagctgttgtttagctgttaggtactgttttgaaaaggcgcgcatttggttctttttgctaaaaggcacgactgtgcctaacttggtctcaattgatatttgattaactatcggttataaaagatactggtcggtgcccaatgcccaataacaatactcattcaaataataagggtattgataagtaaatcattaaagcatattcaatgtctaaataatttctgaaaagttagaatatagcttatttaacaaaaaaaaatatataaattttaatgtgccaaagaatgatgtaaatttagcacatagtaaattttatgtcaaatttggtacaatatttattatgatgtaaaatttacacaacaataaatttactacttttttatttatatttatatcatttctgttattttataagtatatttatctattacattatattatgaaacatttatattattttttattgtcttacatattaaaataataataaaattaattataaagttattagattttattttttttttaataaaatattaattagatattaaattttacattaaaattttataattgtacattgaagcacaaagtgaaaatttagtataaatttactacaaaatttctttttgtgtcaaatataacacaatttttacatctcctattaaaaatagacttattatgcttaaagttagagcactcgctctaatttctctaaaataaaaaataaagaaatttaaaaaatcgtactaaaatcatcttgcataaatgctttaaattcattcttaattttaaagtttttctaaaatttactattcatattttacatttatagaatattattcattactcaacctaaacatattttattaattatttttgtatggagatatatgtatagattaatattatatatttaaaattattgtttagaatttctttcaaaatacgtagcagctcaagagaaagtcaggtgatactaagactgacgttacaggacacgtcgctttaattattctcgaagtcctttatttcaaaagaataataacagattagtcatttctgtgagtattcagctggactgcgagcatccctcgtttgttcatctccgcaagtaaagtatatatggaggatggtacgggaggagtaatgaaagacgacgtgtcactcaaggaccaagatattgtgtatgcatttaatgtagcatgggaaagaacgttagacgtcttattcagaaaaatgtgtttaagggtttaagctcattattccctaatttcacgagcccccatacatcaatcgacaactgcataaataagtcgtcgagtcataaataagagataaatcacatcccaccaaacacctataaacagcctaaaacccatcataaaataggcaattatgccctaaattagatttgggaaactgtgtcaagtatggtgtaaacaaacacgataatagtggccttttaccaccattatgagtctataaatatcctaacgataaatagaaatggggttcagccaagaaaaagctatgtaacaaatactttcataaatacaatgactcgcagactaaggctcattaatgcctcaatcacataaaatttcctcttctaactttcattaaatacttcatacaactttaattattgattgtcgagaacctcagtcaacattttagtaatttcattgagagtgtaggaagtttgccggaaaaaaaaggaagtcataaacatcctcatagtataatcttaaaaactaaaaatacctcacgtccacaacaaccagatgacccaaagaatctagaggaggaagaggtgacatctagggtggacgctgaaggagaaggagacactaatgatccaaaatcttcaaaccatgaagagtacaaaaactacgataaagacaactatacgaaattggttgagctaaggcaaaaggctgctgatcgtgaagctgagttggtagagcaaaaggagcaaaataaaaggatgcaaaagatattgattgccatgaaaaaggcaatagaaaatgcaggtatccaagtggatccagttacattcccatcaatgcaagaagggactgaggagagccttctcagcctaaaggaggtcaaaaacaaaagaataaggagcctaatcccattaggtatcccctaaaaaatcctaccacgaaggggaatcctacggtcgtgcctgaaaagaacaaaaaaaccccaagatccacagaaagttcattctaatctcccaaaagggaaaggtccgcatgggggtagatttcccaaagggaaaactagcccccaggatcggggagatcgaaggagcatatccgtccatcaggagccaggaaaacaaaaaggccccgctaggaaagatccccatgtcgatctaagatacaaacacggggacctaagggcatcacttgattaaagaaagaaagctacaccagtttttgaaggcatccttaatgaaggaatcctggccgaacttgcaattctccagaaggatataacaagggtctcccagagacagaagggagatgactctgagtcggattgtgaggatcaggagccctatgcaagaaatatactagaggttgagctcccaaggaacttcgaaatgcctgaaatgactgtgtatactggtgacacggatccaagtgatcactagtccagatttaatagagccatgatggtcatgagggtcaacaacgacgctaaatacatgtgtttcccattaacatttgttggatctacaaaggagtggttaaaaaagttaaaactaggattggtagattgttggaataaattgcaaactaatgttagaaggcaatttgttacagccaaaaagataaaccttgaagttaatgccttgactaacgtcaaacaactaccaatggaaatctggaacaacttcattaagagattcaaagaggaggcttccaaaatcaagaaagtagatgacgaacaacaattagttttattacaagctggaatttggatgggaactcccttctgaaatgagttacaacaagaaggtgcatctgttgggttttatg

SEQ ID NO: 17071 - DNA, 2280 bp, Cannabis sativa
  modified_base (1422)..(1423): a, c, t, g, unknown or other
gatgaatggccaaatgagtaccagaggcagtatggaacaattgacttgtattggatagtgagagacggcggtctaatgcttctactttctcaactactacttacgaaagagagctttgaaagctgtaagattcaagtcttctgcattgctgaggaagataatgatgcagaggctctcaaggctgatgtgaagaagtttttgtatgatctaagaatgcaagccgaagtgatcgtcattaacatgaaatcatgggacggacaaacagagggcggtgctcaacaagacgaatctataggagcatataacggtgctcagcagagaattgctacttacatggaggacatgaaatcgagggcagaaaaagaagggacccaacttatggccgatgggaagccagtggtagtggatgaacatcaggtggagaagttcctttacacgacacttaagcttaattcgacgatactcagatactcgagaatggctgctgtcgtgctagtgagtttaccgcctcctccggtcaatcacccggcgtacctctacatggagtacatggatttgttggtggaaaatgtgcagaggcttctgattataagaggatacaggagagatgttgtaacactattcacatgatttacaacttggaaggtaagaaatacaatttgcattctgttcataatatgattttttcttgccactctaaaatatatctttttcttttttagttaaatgtttaattcattctttttcttttacaaacttgctgaagcagaattttgaatgtatgggtagtcttttttttgggtagaatctgaatatttttccctttttgggatctgtattttcaaattataaactctctggtacgccttagaatcaattcaatttaaccctttcatttgataagttttgcttttaatcttcttacgtttataaatcattgtgattagcaaaattagtatatattttattatttcagattttaggggattttataatttttttattaggcgcatttcatattcatgttcatctatcacatgtatgttttatgtaaatgtatatattttaatatctaataaattattttaattttgatttgacgattgaagatgttgccaaccggagctagtttgcacgttacgcacgtctacattttttttgtttttttgtttttttttttctaagaaaatggatttaaaacatttgaataagagaaatgctaaagtgtatcagtagtgtctaacattttcgctattggtctaattaaatatcggttccatatcatttaatataatagcttttaaaaaatatcgctagttaattgtaacgcgacatgtcgagaaggtgctaggtattatgtctttgttcaaacgtttatgtaagagtgtaaagtagagtatcatttattattattattattannattattattattattattaattggaaggtcttatgcccaacaattttgtggttgaaagatatgttttatgagtaataataatttttagttttttcttgagaaaaagaaaagaaaataacaaccgttcaaatatgtgatcaatacaaattgaatggctggatcaagtggtagtgtacgaggtacaaaaggtggcgactagtgtagtattgaaaagttttatacatttgatgtttacttttaattttagttgtattatttattttttttttttttgaatgggaaaaagatacccctaagaataagaaaagtcttacactttgaataatggttatgttctggcattgcttaaatgaatcctataaataagtttaaaaaaatcacgtcatgcatgcttatgaacatttgacaagcttggctggctttcacactaataataataataataggccgattatatagaacatcagctgggatttgaggtttttaacacctcaaaacattgtcatcattgaatgataaaaaaatgtgaatgtttggaatctgaggaaataagcatagtgaagtaaatgtaaaaacaaaggatcgatatgtaatttcgtgccattattatttctatttttcaagggaaaaaaaaaggtaaagtttttctttttctttaccctttctcttccatttgtttttttttttaatttgttttgttttgtttttccgatactagttactgtttattccatgaatttcatataatttaatccgttcaatttgaagcatcaatcgattagttgtaaataacacccttaataatagctaccatattagttagatcttacaacatattatgagagagagagagagag

SEQ ID NO: 17072 - DNA, 9227 bp, Cannabis sativa
ccacatctaccgaaaaaattaccagaacaactcaaactgtaaattaaaaaaatatatatatatataaagtagttctcctattattttatattattttaaaaaataaaaagtctagataacaaaatgaaaatctatcaataatttttactaaatacaaatccaatatttatttaatataggcaatagtatttttgaaaaaaaaaaatttcaatctggttagccatttaaattaattatttttttttggatagaacaaccatttaaattaattgaaggtattaatttgcaaacattagtgttccatcccatgtgattattgtcgctctgcttttccaaaacgacggcccacaacttcttacgctgcactcgaccgtgcttgatctcgccttaatacggacagagataacaagatagcgatggagaatccccattggagcgtaaagccacgctccatcattacgcgagtaggtctaatttctcttctgcttttatctaattccaactgagacaaaagagagagaaaccaggggaaaataattagagaagagagagatagagagagaaggcaaaagaggaaaggaagagagagaaaaggagagttaaagagagagaagaaaagaaggaagagctaggagagagagagagagagagagagagagagaggtatcgtctcacatggcctccatgcccttggggccgcaccatcaacctccacagccacaaccggacaacaatgaagctctgaagctcgttactcgacgcgcctccgaaatggacaccgataaggtactatttttgaacttacattctacaacacctcgttactttcgttttctgtgtttctctttctagatatgtgtatgtgtacgaataagtatgtttcggtgcttagatcgtctttgatccagctcaaaaccttgattttatgtttaatttgggagcgatctggatgtttttggttctctgatgtcggtttcagctagcctcaagtttttccgcgaaagtttccggcctggtcttcatcggcaagactttgtgttagatgttctttctaaatttgattattctatattagatgctctttctgttttgtctattctttgatttcataactttgtttttcaccaacttaattttctatatttatttgatatatttttctaattttcattaccaattttctgaccaagatctttcatcttcatattcaggttaagtacgttttctgagttcatttttttcctggtcgtttgccgaaaaaggatttgttgtaaaaaagtatttttaccgaaatgtgttgttataattttcttgataaccaaaccaaaacaaaattagaaagaaaatgagaaaattatgtgattcaacccagctcagctgaaattcatttttgttggaaaatctatttgtggatttccaatttttgaactccaaatagcgaacattaggagttactagttatttctccatttattttcgccaatattctgtcctcaatttagtcaatgttgacaattttagcttcgtaattttctattttgaaataattgcgttgatccttagttggtgcacttattgtctcgttgatctcaatccttgtcctagcacctttttttcttccatatcatactttgacgtgtatttggattcattgtttgcgctagctttgtaaatctatgtggcattgtgtgctttaactttctttgatggattgttcttcaaactagttttagtttgcttcaggatgttaaagttgttgattctttgtactctcttgtttggactgcaagtttgaagagcattaacttagattccaataaagagataattcatcaccataactctcaagaaagcactagaatattctactgatgctttcttgtgagctatggtcttcctgtttttcttgaacttaaatatgttttaaaatccgtcctcctttggctttatcgaaacttacatgtcatgataccaatttgtacacggtagttatgttagttcatttaatgttttgtcataatatttagtggatgtcaaattttccttttcagtgcctggtgtgtttttaacgggctcgtactttgtctttgtttagcttatatttggacgtttcaaaatagacaagaggtgttcgcagggtttcgccatataaagatgtagaagatttaaaatagaaagaagtttccaaagagtattgtgcttttatatgtttaaccctgtgaattgtccgaattgtccttacaaaaaaaaaaaaagaaaaaataaataatccatgtgaattgtatggaaaactattgttcaaattataattattacattaccacataaatatgatatgaatatgtttgctcacaaggctgttcattgaggcacaattgtcaatagatcaaactgctttccgttagatgctgcctaagaaagtgtatggggcactggcaattctgtaccttttgctgatgctaaaacctttttgttattacaaattgcaggatatgtcagcgtcatctactgttattgagggcaatgatcaggtaactggtcatatcatttcaacaaccattggcggcaagaatggtgaacccaaacgggtaagtagtagaagattcttgcttttcctctctctctctctctttatatatatacatgtatttatctatattcacctatttgtattctgaagtgtatttcttttgtgcttgtgacagacaattagttacatggctgaacgtgttgttggtacgggatcatttggaattgttttccaggtataaatatctgtctcattagaaaagaaacttgctagtattttttctacccttgtctaatctattagtattttttctacccttctctaatctattctatttcaggcaaaatgtctggaaactggagaaacagtggccataaagaaagttttgcaggacagacgatacaaaaatcgtgaactgcagttaatgcgtttgatggatcatccaaatgtggtttcactgaagcattgtttcttctccacaacaagtaaagatgagctttttctgaatttagtcatggaatacgtaccagaaaccatgtatagggttctgaagcactatagcagtatgaaccagaggatgccactcatatatgtgaaactttatacatatcaagtacgacattatctttctcagttccaattttgttggaaattatcaagaatgtaaattaataaaaactgaaacacaacttttcagattttcagaggcctggcttacatccatactgttcctggagtttgccatagggatgtgaaaccacagaaccttttggtatgtttctaggtgggttttgttcttttatataatggactgtttgtctaacctattatgctgcatatatactgcaggttgatcctcttactcaccaagttaagctttgtgattttggaagtgcaaaagttttggtatgcttaccttgttgttttccccttttatattactctatatatatgtataattatatataagaattgtaaagtgggcatgacatgagtctctcaatagttgtatcagtagaccaatctcgtgaacatagttacatatgcaataaaagggatgtcacgttggtgccatggacacagatatgacattaaattaaattttcaataatgattttatgtatcatggttgggactctgtaggtgaggggtgaagcaaatatatcatacatatgctctcgttactatcgagctccagaactgatcttcggtgcaacagaatacacaacatctattgatatttggtcagctgggtgtgtccttgctgagctccttctaggccaggttaggattttcctgttgattttattagttggaaaataatagaatatttatggcttctaatcttttaaactcttttacagcctctgtttccaggagagaataaagtggaccaacttgtagagataatcaaggttgactttcacagttttgtcaaaattactagattacttgattagaatcaagtgtgcttatattagacatttttatgcaggttcttggcactccaactcgagaagaaattcgatgcatgaatcctagctacacagattttaggttccctcagattaaagctcatccttggcacaaggtattacataatatgcatgcaagtgtgaatgttacgagtgtttgtgcaatggaaatattattgctctctgcttcctgaacatgtcgtcttgttttttttctcctatgttttgttgtctcaaaaagccaatattaattgttgtcttatatctcgctaacattacaactctcaccaaattcttcaaggtcttccacaaacggatgcctcctgaagcaattgaccttgcatcgcgacttttgcaatattctccgagtcttcgctgtactgctgtaagttttaatctttgatcttctagtgctgtatagtctagtctgtaactttgcagtctccatattatctcaagattctattggtttcatggcaacattagtttttcttttctgataaacatcccaacattagttgattaaactatgatgacccttctctttggctctaataacagttagaagcatgttctcatccgttctttgatgaacttcgtgaacccaatgctcgtctgccaaatggtcgcccattgccacctctattcaacttcaagcatgaagtgagtttttgtttgaacattgattattgttgttacttgtaaatttaagtaatatatgcatctatttagcatggcttgcaatcttacttggtgtttcctcttattgcctgaacttcgtattgcagttgtcagcagcttcgcctgaactcattaacaggcttatacccgaacatatacggcggcaggctagtcagaacttcccacacttggtaggtacttaaaaaaaatgtgatgatacaaaacatggaaatcatcactgtccttttctggtggtagatatatatatatgtgtatgggaagccaaaagggcctctgtgtggtctgtatatccgaaccaagagcattttgaccgatcagcagctgtttctcctcttcctctaaagatgtacacaaatacttgctgttgttcggcttaactttgggaaactgtcgacaaaatgtcatttagtattaaacatagtattttccttcatctgtaaattgttttgatcttaagaattcctgaagaaccctaccccccaaaaaatggcagagtataagaaggtgattctgttcattgtctatctatctaggtaagcaaatactgtttcgtcattgttttttttttaaatttatttccttcaagcttttaatttctttgctgtttgttgcaattcctttcaagaactataaattggtattgttttaaattcagctgtgtttctctcttgctcttctttaatttaatttggtctaatttttcgttctttaagccgctgcctcggcaaaaaattgtacattcctagagaaaaggaaaagaattgtttgcagcttaacattgagaagaaaaaaataataacagaaattggaattagaatttcctcgcattctaggcgtggagatcaaatttctgattaataaaatttgattaaaaatgggaatgttatgactgaaattataataattaaatgcaccatttttattctccaataagtaatgttgcgctcttcatagtttcggtatgaagtgcaattctgaataaaactacaaaatcctccaacgaaaaatggaggaagaacaattgatgtgaccaagaaattatattgttttcctttttttttcaaaagaaaaaaaataatatttattgctatccctttaacaattagagggaattatagccaagaaattaacaaaaatgtagagacatttgcaaccttgcaacctctcaatgagccctacttggtcacttcgtgtatagcattagccagatatccaacatttccagtcgtaacacccgccatgctgtataccaagagaaaagttcaattttagatataagtatatgaattcatttctctagtaataaaaataattaaaaacaacacaaaattaccttatacggccattgcgagtcatatagatgtgatattcattggtcaaacggtccacctgttcaggtgtcatcccactgtagcagaacatgccaatctgtttgccaccatcaaaataattcttaattgcgtcaagagacaaatacaattacaaacaaattatttcctacaacaatccatcatacctgattggttatatgctcccacgataaaggcgagcccaacttctcaaggttttctcttaaagcagttcgcattccaatgatgcggtcggccatgccctatagattatacatagtattatgagaaattactagatggttgaaaaataaaagtggatgttttttgactaatgagaggatttaataattcagagacaaaaaaagaaaatggatgataactattcatgtagtgaaaagggtaaagctttttaagcatatcaagtaccactgaggcactgactaatcaggtttatgctcatagagttctctcgtacaacactctggtatgaaatttagtgaaatgaacgctaaactactccagaaagagattaagatatacgaagaaagaatgaataaatgtatcaatacattaccttgacttctttgagccacaatttcttcaagtctggatcatcaagaatgattgagactacgagtgctccatgcacaggcgggttactatacatgggtctagcaagctgctgcaattggctttttacagccacggcttgcttttcatcgtcacatagtaaactacaagtttagtgaaaaaaaatagaaataaaaaattagatacttaaacaagcatgagcagtcctccaagactaaagacaataataccctaaagtattcattcaaaatttagtactgaaaatctaacccagttgattgtctaatcttggttctttctttttgtacccaataataacaacatacgacattaagcaaaaagttgacattccaaaatgtagtagggtggcctaagcgtatgccgaggccactattggttgcctaaaactaattttctatgaattattttctctaattttaagcagctatttaaaaaaatactgtataatgtaaacttatttagaagtggacagtactaataatgtgaacatttattatacagagatgaaagtctaattatatttcagtaaacatttttgaagaaagctgaaacactggagtttgaacaagtgtttcagctgctctttggagaaacccgaaataaaatgcaaacaatgtaaaacttaaccattttagctattttaaccacaaagatgaatatggaacttcagaaatataatgtagttatcttgcaacgtatttatatacatacctaaggcatcctactctctgaccatagagacccatattttttgcatatgactgggcaaggccgagaagatggccatcttcaaggaaaatcctgatggactttgcatctctctctgggtcaccactagcaaaaccttgatatgccatgtcaaaaaaggggaaatgaccttttacctgaaatcattaacttgtcaagggaatagtgaaacaattcaagggtacaatatggagaaaaggaaatcaaaagattttaccttgaactgatatgagatttctctccattgttcttctgtaggatccactcctgttgggttgtgagcacaagcatgaagtagaaagaatgaaccatttggagcattctatatcacaaagaaacgtttatataaaattagctgatagaagaaacatgggtttaacttggaaacggtagcagttcaaccaaccaataccttaatgtcatccatcagtccagcaaagtctaaccccttagattctgggtgatagtaatggaaagtcctctcaggaacctgggcatctctccaaatgttatgatggctgtaaattattagaaccataaatcagaaataaatccaaatgttcaaatgttattaaaagataagagcatcagtggtaatttttaaatacaactcacttggaccatgttggaattggtatatagatttgggaatcaggatgaaaccgtttctggaagtctgcaaaaatcctgcatgcacctgttccagagagagattgcacagcagctatccttttgtctttgatgaactcagagttctctccataggccagctttagtgtctcttccaccatcttcatgctccctcccattggaagatactccctaacagcaagaaattaatgaagtgagcacattatatcagctaaattacaactgaacattaaccaaaagaaaaatcaacaataacagttctcagttgtaactattaagtatccactcaagccaacacactcttgtggaaagggagttctacgtacttgacgaggaagtttttgttgctttcttactctgccaaaaatttggcacagtttaaatcctagatagaaaatcccccaaacataaagcacagtggctaagcggccccaccttttcatttgaaacataatagttgattcatttagaggaaacagagcccgaatcttgtacttaacgaatcatgtaaattactgatcaagatgatgtacttttacttttcttatataattgacatttttttatatatgtatataaattttataagatttaactgaatgatagagttctgtaggaaggaatattagtataattcccgtaaacacatgcaaaatcagatagctccatctaatgttcacactatacaaatagttagcagacttcagccttctgtcacacacaagaaaaaaagaaagttggcaaagttctgccttctgtcatgatccgcacatttagaatctaatcagtaaacttttgcagttttattcttgcatatttgttattcgaaaccttatgcaagatacatgtatacaatatatatatcatcatcatacgtatgcacgaatgaatataaaatggaatactagatacaaaaagaaaccacaacggacagcaatctctagagaacattttttcaaacacattgtcaaaggaaagaaaaaataaaagtacgcacttatcaatccaagtaaagtatgcatagttgaatgtgacaaaagaataaaagcatgtagcggccaagaaagatgagggaccactgtaaaagttgtaagtagtaccaagaaaagccaaaacagaacatttttcatgggaaaggtatacattacacaaaactaa

SEQ ID NO: 17073 - DNA, 5594 bp, Cannabis sativa
tggtttgataaagaattagtttttcttaaaaaaaaaaaaaaattattgttgatttattggttaattatcgtaatttaaatgtttttatacatgaaaaatacaatttaatttaagatcttgaaaaatgtttagttgatttgccgagaaatggaatcaatacttgtcctagttcaaagcaatggacattgggatgagagcaatcagtatattgattttgaagctactgggatatgcatccaaaaaatttgaaaatatacaaaattagtggacagactgttgaaagaacataactacaatagaaagtcaagtaccctacaaatgcagttttagatacagtctagatatttagctttaaagatcacggatgatgaaagtctggagttttacttgcagttaaaattaagagaaaaggacatgaaaaaacatcatttgtaaatatggtccctaacacaaatacaacatcacaaatatatttttttacgaaggttgatgcaaggcttgaagtccacatgcttgaatatggtacccagttagggggaacaccaacacatcaacaaaaagaaaacaaaatagaagataatgatgcatttgactttgttgactatgcacaaataattattgtagaaaagatggctcaactaacaagacaaacaaatgatcgacaagaaattaacgataaagaagcatttgttatcacagataaaacaacatctagaaattgagaaagggcaaatgtacaaggatgaggaaattttgaagaacgtcctcagctactttgcaataaaacaacaattttaatacaaggtgaaaaatctagcacaaaggaatttcaaattgagtgtttggacaaagattgcaaatggtcactaaaagcatcaaggaatggggcaacatagaatttcatagtaaggaaatacaataaaaaaacacatttgctcactaagcatcagatttgggatcaaaggcaagcttcaacaaagataataggggactgtgttaaatacaagtttttgaacataaaaacaatagctacaccagcatatattagatttgagatgaatgacaattatgcgttacaaatgaattacatgaaggcatggaggagtagagaacatgctttaaacatagttagaggaaataagtcttataggttgctgcctagttatttttatatgcttcaaaaaataaacccaagatctgtagtgcacattaaaacttaagaaaacaacaactttttgttttgcctcatgacactaaacgctttagtgaaagcatggaaaaaatgcagacctataatagtagtagatgaagcttttttgaaagctacatatggggggacactactaacagctagtgcacaagatgcaacaagtaaaatattcccactagctttttgtgtggcagattcataaaatgatatctcatggaaattgttctttaaaaaattaatagtcacatttggtgttagacaagaacagtgtgttatatctaatagacatgaaagtacaatcaaggtagctcaacaaatcttccctgaagtgtaacatggatattgtgtgtatcacatactcaacaacctaaagataacattcaagaaaagtgcaaggttctttgaaaagccattttctcgtgcagcaaaggtatacactgctaaaaaatttgaatatcacaggaaagagcttgttgctttagacaaacaggtttaaccatatctacaaaagattagatatgagaaatggtcaagattatattctaaaaacaaaagatacaataccatgacatcaaatacaccaaacctaacaactagaaaactaccaataacaacactaatggaagctttgaggactttaatccaagaatggacatgcaaaaacagaaaaaaatggcagaaggaacattcacaaaattaactccagctgcagagatcaagatgaagggcaactagattctttcatgcttcagctactatctgtagaaggagaaaccaaattcggtctcttctagacaccaaaggaaagatgtgggaggacaaaaagaaaatttcaagtattattagtcaatattttagtgacttgtactcttctaataatactgaaattccttcagaaatcaatgatttgtttgttaaaaaattagacacggctgcaaatgatttcctggttaaaattccttcttgtgaagaaattcgtgaaatagtatttagtatccatcctctaaacgctccaagtctagatggcttacctggatgtttttttttttttttttgaaagtatgggatgtggttggaaacaatgtctgcgcaaaggggaagtacgccctcgacttaattacaccttctagtgtctaattccaaaattagacaacccaaggaaaatggaacaattcaggccttttagcccttgcaattttccatataagatcatagcaaagatcctggctaaatagactaagactgttcatggaaggctcgatattctcgtttcaatctgcgtttatactggggcgatggatagcagattcttctattttaacacaagaaattgctcatgaaatttgccagaagaaaggcaaagggggtcttatggcaatcaaacttgatatgcataaggcctacgacaagatggaatgaaattttctacaaaaggttcttaagggaaatggtttccatgataaaagttgtggtctcataatatcttgtgtgaaaaatgtgacttattcgcttctcttcaatggatcccctctcaaaaagattgtgccgcaaagagggttgagacatggggatccattatctcctttcctcttccttctttgccaagaaattctgtcaaaaattattcaaaaccaagaaatgaaaggcagtttccatggcattcagattgctagatcagcccccccgatctcgcaccttatgtttacaggtgatacgatcttatttgctcgagtaaataatggagaggcaaaacatcttctatactgtttgactatacatgagaagtggtctgcccaagaatgtagcaaaacgaaatccaatgttctctcctcaaacaacatgtcagttgggaggagaaataaaattttggaatctcctttaatcaatcaatctcaaggagaagaaagacacaatgggaacccttttgttttcaaaaggcacaagatggaagattacagaaagttgaaagaaaaaatgatgaaaagaatggaaggatggaagatgaagctactgtcttatgctagaagattaactctcatcaagtctgtggcgttttcagtaccgatttattcgatgtctacaaaaaaagtgcctatttctatttgccgagaaatggatgcgatgatttgttagtattggtggcgatgtaatgtggacaaaaggaagtttcttgtgctgaaatcctaggacaaaatttctcaactaaagctttcaggggattagaagatttgaggatatgaatagagcacttcttgtaaagttggcctggtgtattgcgaaaggagacgataaaccctggcttaaatgccttcttaataaatactgtaagtttgaaagtttttcggaagtaagtaaaaaggatagtgattcattttttatggaagtgtcttctagaggttcgtagtgttttagctaaggattcgatttcgttggtggtggatggtagatcaatcaacctttggaaacaaccatagatccctttgatgaagtttatcgattttaagaacctaatggacagtcttaggaccaatagattcactactaaaactgttgcagacttatcaaatggtttttcttggaataaagaagtagttcttcaattttttggagaaaatttaggtaaccacattctaggaatctcgagactaccatatcctcataaagatcagattgtgtggaagaacaaagaagatgggagtttctcaattaagagtgcatattgtgttgatcaaagcttaaggtttgtacccaagaatgatgtttgcaaatagttgtggcattctaacattcatcctagaatagccattctagtttggagatttttaaatgaagctattccaattaaaagtaaacttcattttgtactagaaaaagagtgctcattgtgtggttctgctgttgaaagtagcttgcatctctttatagattgtagcttggctaaaggcttgtggttctcgagtatctttcctataaagatagataacattcctggggacaacatgatacaattcttaaagaatcttgctgcaaatttcccaaatcttaacagaaaggaggttttgacttatgctggttgtatgttcaatcagattcggaatcaaagaaataacctttgatggaaaagaattctagcaagtatcgatttggttcggatgagagtaaagcaggtttatcacgattatgctacctttagcagtaattgtgcagaaacaattgatctaaatactagtttgaaaaggaaaaggacagaggtagaggctaatctgagtaacaaagtggttaatcaggtcatctgcactaatgcattgtggcataaaggagcagctggtttggcaactgtggtgaaacagagcgaatggttgttgggccttcaaatctcagcaatctttaattgagtctgtcatggaagctgaaatttgtgcaattcatatggctctttcgtgggccgctaaaaatgaatggaaagaagttcatattctttcagattgttggcaggtaatccaccttggccaaacaccaatgtccttcagattggaagtctcttggcatttcattatctatcttagatcttattaaacagtttgatatttgtagtttcttcttcattaagtatagttgtaacttgtttgcggatggtcttgctaaaagtgctagggttgctagccaatcaacaggcacagtccaaggggagagaattccttctgtgattcccatttatcttgctaattaatgaacttcggtgttcttccaaaaaaaaaaaaatgcagtacgtacattgtttcaagtcgtcgaccatctccaccaccccatcattggtcatggtcaccacgacaacatcttcgttcgaagtcagatcgaccctaccatcgtccagtacaactttgataacttgatatcttcggctcggccactacaattacactgatgaaaaggaacgaatccgataacagtgtcaaaacaaataaaatgcataatattcatcgtatacttatatatatattagcactatgttctcgccagatcggaaatctttagacttgctattcgaaatttgttgaattactttgcagatgttataatgaagagacaattgtatactttttatagcaatacaatggttagaaaagctgctattagttttatatagtatgtatatatcattcagttttattttaaatggatatatcgttttagttttaaaatatctagtaggctctttatatttacgattggggttttttctattttgggttaatattattttaaataaacatttatactgttcaaagcaaaaataaacatttatattctttattaatttcaaatttactattttcaaagtttattatttacaaaaatacggtagaaaaactcccccagatgc

SEQ ID NO: 17074 - DNA, 3999 bp, Cannabis sativa
taaataactataatgtacatgactatgagaaaaaatttaactaaaaaattatttcagatgctaaaataaataggagtgcatcaatatatctataatatatctattttaaggggtgcattgtggaattttctaaaaaattttaatgtgtagtttaaagacctcaaattcttttactcagccatgcccaataaccaattggggaagaatgtgataaacacgtagagattacagaatccaaccaattaaaaaacgccacgtcattgtttgcaccgacgtgtacttcgtcccggagtttttacagcaagagaattaaaatgatcacgaccgggtagatgagattaagttcatattgaccaaaatgccactgaacgatctacatcgactgagccattttctacaaagaaactcaaactaccgaaaaggctattttggtaatctacttatccaatatacaaacagaaacggtgtcaaatattaagaggaaagaaaaaaagatgctgaggaaagaatgctctgactatatagaaatgaaatttcgatctgatcagtgatcaacaaaaatggcctgacaaaaattgtttcaacttcaattttcaagggttccgttctctccgatcttctgtaatctctacctgcttttctctgcgttttcgccatggccgctccctttttctcaacgcctttccagccttacgtctaccaggtacaccttttgtttttctttgatttttatgctattcgtctggctttcgggcttcgacaccgaaatcatgttgatttctacatgtatgtttttttttttgtctttactcatttttaatttgcctcgaaagaatattggagctgtagatttccccgtagggtgtaattctcatgtcaatttagggttttggcgcatgttggttcgtgtttgggctttagattttgcgataagggacaacttttttaattaattaagctttagttgttgttctgtgtcgagtgtcactgtgatgcatagttgtagctttcacaattccgttattttcccgtagagtttaaatcgatcttgccctcttgatttattgtatttggttttggtaatttctacttgttactggcacattgtggagtccggttttgtttgtgaagccccttttgttctaagttgaatttgtaattggttgtacagtctattatgagtttgttatatgcattaataatgggctaattttttgtagagtccacaagatgctgtgatacctttccaaattttaggtggtgaagctcaggtggttcaggtatatgcttaatcatcctgaattttgttgaatcataccttcatttctttggaaatttaccttttcccccttctatattattttctcacggttgttggcttgcctttactcagataatgctgaagcctgaagaaaaggttgttgcaaagcctggtaagcaagttttgctacactttatatgtgctcatctttttatgtattggcttatatctctttttttggacaatgctagcttctcttttaatgttattcattcgaaaccttgaaaatattacttagatgccatgcctgtggtttccatggttgtatgcctacaatacctctcacaaaattgtcaataaatgtagtgaaacactaacttaatttatgacaatgtttatgtacagagattagacaaagaaattttttaattttaatttaagaccctaaagtacttgccaccagctgtctttggagtgttttgtcactcttctagagtcccatcaccgtaaatgtatattttacttcccaggtttttattgtaatcttataatatgtttgtctttcaactattacatgtttattatctgattacacacacaactaatcgatgaattgtttgtaggttcaatgtgttacatgtctggatcaattgaaatggaaaatgtcttactccccgaaaatgaagtgggcatgtggcattggctttttggcaagagcgtcactagtgtagttttccgtaataatggtcaaagtgatggttttgttggaattgctgctccctctcttgcccgaattctaccggtttgtgttcttagaaaaattataaattctaaacattaaacaagtcaattgactcaactctctctagtatttttatctttctaaattatcctctctttttttttgtcagattgatttggcagtatttggtggagagattttgtgccaggtagtgccaaattgttcatttagattgttaattttgttctacttttagttttccatggtactttagtgcttaaatacaccgttttaacatacattttttatcgctcattctctgattcatcataacctaaaattttataatagttttgtttgaaaatttgtaggcagatgtatttctatgctctgtcaatgatgtgaaagtaagcaatacacttgatcaaagagcacgtaacattgctagtgcagaggtgagtcctgtataggagtgttgattttttattttattttttggttaaaaagtattaacaataattttttttcccttcacttaattattattattatattttgttccctgggttgccgtagtgttagtttatctaactcgcatgtatgttgatattatttaggtatttttaagacaaaagatatctggtcaagggcttgcgtttatacttgcgggtggatctggtatgcactttttatcctacatgttgagtgaattgtagttaaggtcttttatgaatttgtgcactatatattgtttgtagtttttttcctctgttcttttgggtctcaaataacaggcctaaactagcaatttactttgtaaagttttactggctccaatatattgattaaccagctttaattaatttatggagaagacttcttaactcctctttttattccccttctattcctttccagaggctgtacattgttgaagatatagctataggttacaattatgtttgtgattataattatttctcaaactacttaaaaacttagatcataaggaaagtggttttgtttttgttagttgtacagaaaaatcttgaggttggtgaggtacttgctgttgacgtgtcttgcattgtcgccttgaatactactgtcaatgtccaaattaaatacaatggtccaatgagaaaagcaatgtttggggtaagtattttcccccttaactcataatagcttccatcattttgatttctgccttaactagtggtggttcttgtttcacgagtgattcccaaaataagtagtacgctattcgttgtatgtttattgattatatatttatccttttcttttttgtattagtaataattttttcgagctagaagtccaactgttaagtctgacacagacataacaatttagactcaccaaggtgtaagagcccttttgtatttgtgtattgggagtatgattgacctattgcatgattagattttagttaagaaatgcattaacattccatgctgggtgcatttgtcctttttacatcttcataggccaatgtcgtaaacaaaggcaactgaaattcgctcctggttttttttatgtgtctgtccttgggtaagatcacattagggccatctaagcatttacacaaagaacaaagaacgaacaataaactgacaagaaatagaaaacaaactttagtgtgtttagcacatatgtactatacctcaagccttaatctaaataacttctctttttgctcttgtaaattttaatgagcaaggttgccccatgagatgctaaggttaataatacaagagcaagtgtcaacctcattagagagaagtgattagaagatctttacacaacttacatgttatatctggatcctctgtatagtttttttccccacctttatggtgtgctgatttccagaagctcttggttcaaattaattctaagctgctgcagtttaaattctgtgttccctaacccattgtggttaaaaaactgcagggcgaaaatctagttacag

SEQ ID NO: 17075 - DNA, 2785 bp, Cannabis sativa
  modified_base (269)..(299): a, c, t, g, unknown or other
  modified_base (707)..(708): a, c, t, g, unknown or other
tttttttctggtttttttttttcggggggggcgcctcccgcagtcgccccccctcgctacaatgtgggtccgcccatgactgttaattaatattagatgtccaattgtgatcggatcggattggatattatttttgaatatatccgattagatcggatcggatcagatcagatgttggatgaggtgtccaaaaatttaatacatccaacatctaatcgaactaattagtattttcatttagtttcgatgagtaattagattttatattnnnnnnnnnnnnnnnnnnnnnnnnnnnnnnnaattaacattaaaattttactcctattttttttagattggatagattcaatctaatccaatgcatattggacctaaaatattagatggatctgatccgataacaaaaaaataagtcttaaatattggataaatccaaattaaaccaataaatatatatgaaatacatccaaccactacaaaaaaatcttatttttagttacaacaaaacttgtaactaaaataataaaaaaaaaagttgtgactaattaaaaatcataattcttatgttgtgactaaaaagtatgtggctaaaagtattagtcacaaaaattacaatttattgtgactaaatgtgtttttagtcacaataattgttgtgactgaaactaaatcactgacaacttgtagctaaatactatattttagtnncaagtaattttttgttgtgactaaaactcatatttagtcacaaaaaatttatattgtgactaaaaaattgtcattataaaagtaactatttttgtatccaatccaacatcttatgaatgttggatcaattagatgactaaaaattaattggatcgaatcggatggttaaaatctaatatccaatatatataattggatcagatctaaataaacttaaatctgatgagtgttacggtgttatagataatctagctaatatggacctaaaaatttctgccataattaaaaacacactcaaatggccgtcgccttaattttttgttttgcatgctaaaattcatcaaattcattagaaagaggaaatattattggtaaggcatatcacctaaattaagagctcacttagccaacacgccagcgcaaacaacataaactatcaagactgaaattaaagaagcaaagcatgcaaaagcatataattgccatctcggggcccttctcatctcaatggccttcaccagcaccatgcaatccgagcaaaaattcacaaaaattgaaacacaaatttaaacttccattagatatatgttctagtgaattggcatgatgaggcctgcaagtattttattaagaaaaaaaacataaatcaaatttttatttatcaaagaaatttctgacttaacctttatttttactaaattatgttggatgacgattctaaattagattataatttttatttaaacagtgctgcatttggtaatttacttatcgtcttcttagagaaaaaaaataaataaaagaagagatactgatgtcttgtgtcgtttacctcataaattgtgtcgtttttaaattagtacaagtggagtagttgtttcgttttttaaatattgtcgtttgttaatgtcatcgttttcgaatttcattgtcgttttatactttaatgtcgtatttcaagttttgtgtcggtgtcaatacactattgtgtcgttttacttaacactgtcgggctagtaggtagcaagagaaggaaaagtggtgataagacgcatttgcccctcctgaacggtatttgcgttctagtgtacacgttcccgcgctatatgaccagtcccccaacatgttctcacgtttctccttcttcctctctcagaattcaattcaaaacattctcacctcgttctttctctcgcttatgcttttcaatcgaaacgccatagaatctgctttcaaaacatgtcgttttcggattccgattcctcttctcatggcggagccaacgagtacaaaatcttccgtcaaacgagccgcgacagtaagtgttctttttatgtgtgtttggttccccagaaagtgcatagggcacatgatctagaaactttcatttttaaaatgttcgaactattctccataaaagcgacattgaaaggaattaagacagaattaaattgatggaatgcttgatattttcaatagggtctccctagatgattaaatttgggaattccatttcatttaatgattgtaggattgttgcatgaaatgctgggatcaacgaaaacaggggactcgaaagcttggaaggtctgttcagattagtgtttttatttttaccaatttcaagtttttctgactgtttttttatcatcaggtacttattatggataaagttaccgtaaaagtcatgtctcattcgtgtaaaatggctgatatcacagaccaaggaatttcatgtaggcctaaatatgatgttcatttcttcttccatttcctattttttgaaatattgagaacaaccatttgatcatgagattgatcgttcacattctggaatgaatacatttgtcatgaaagcctataactttggatattttactgcagtggtggaagacctatttaggaggagggagccattgccgtccatggatgctatttatttcatgcagccattaaaagagaagtacagtattcttttagtcattttcataattgaattgtactcctgtaattttaatatgaggtgcatggatcagtaattaatcagtgtaaatgtaaatgtaaacagacgcctctc

SEQ ID NO: 17076 - DNA, 6013 bp, Cannabis sativa
ctctctctctctctctctagcaaccatagacccaggatccatccctaatttctttgctaattctagctaaaaactcaagcagtaattagaagctttggaatggagaagttaaggacctccgtttagctcatgaattgtcccttcaggtcgatcgacacgcttgaatctagaaacgaggtaagattagtataaagtatatgtgtatgtatataaatgcattctagctattttgttatacactaccaacactagtatagttgtaatatggagtgcattggtacaatgtgtaatgtttgagggtatatcacggtgtgaccaacactagtacaaggtgagtacatagtgcatgtggtacctcatccagtggtacccgggagtacggttcagctgtaccaacactagtacgagagaagtacttcagtgcatgtggtatagagatcgtacttccgttaagaacattcttgaccattcgataagtcttgtaaataggcatatgagggcctaaatataagttgatattacattgtatattttatgcatatcttactgagtctgttgactcactagtgagctaccatgtgcaagcaaagtaaaggctaaggtggaggagccgttattttggggcctaacaatgattgtacatgttccgacagtttagccatggagggtttcaatttctggagcattttggggtcattttcaaagtcaatgtgacatgatgtagaaatgtattttagtttgtaaaaataaccttttgaatcgggatcccgacttttgtaaaaataattatatatataaagatatatggtatttaaagttaaagttttaatctaatgtaatttaaaataaagtcgtggtaatgtgtctggtagttgagtgctacacaaggcatctctcgaaaaattagaactttcacacttagccaatttttttgtaattctcgtgagaaatataattttgaagtagacatagctccattacaattacgaaaaaagggagtgaactattataaattttgtgtgtctttctaaattatttacttaaacttattattcatcccgtcaatttagcgagctggtggtgtccactttttaccgtcaacaactaaaatcttattatatagttaagacttgatagctaataaatgtattatgaatacaacaaattacttacacatgaataatgtgggacaaacacacataaatattaagaatttacttatgtatataaatattagcaaacaataataatttaaaaaacatggacttttagttttttagtttttttttttgttataaagaaacaaacacatatgtttttttaattaaatttcaatcacacattaatccatttaccaaaatgtttaaatttagtaactattagtataatattttttaggtgataaacataagcttttcatttgaaaagagataataatgagtacgataatctcgaattatttatactaggatagttgaatgttcatgaatcttttattttttaattgaaaaagtgaaaatatcttctataaaactatttttactttttaattttaaaaataataatcaaaattttagaaattttaaaaataaaaaaatcactttcagaaaaaaaaaaaattaaaacatatatattttttcaattatagtctctttaaattttcattcatcaatactttgggcccaacccctcaccaagaccgagactccgaacacctaccacaaccaaaaagacctgaaccttggatcgcagacgtcgaaccccagcctcaaattcaaactccggattttgccccggacctgaacctccttacccagacctagacccaaacctaaacccaaaccccgaactaagacgaggagctggaccccgaactcgcactgggacccagacctagacccagatcctgacctcaaccccagcccaagacccaaacccaaacctaaacccaaaccctggagtcgaacttggaccgtgaccccggagtcctgtacccgaccctagacccggacttgaaccctggcctggtcccaaaccctaacccggatctgaactagaacctcgaccctagacccaaaattaaaacctggagctaaatcccaaactcgacctttaacccagatctagacccaaaccctgacccggaccttgcccaggatcttaagccaaaccctaacactagaccctagactcaaacttggactttgacccccgacctgatgctagactctgacccaaactctgacccgaacttaataaataaaaaaaataaaaaataaaaaataaaatttacataacacttttgtttttttaattgaaaaatcaaagtagttaccaaatatatttttgctaagaattttattttatttttgtaatttgaaaaattaaggaaaaaaaaaagagtattactaaaagctattatatatttttttaaaggaaaatgctatcatatttaattaagtttgagaacgttaatatttataaatttgagagaaattctaaagagtacccatggtgtctagtatttttgttgtgatgtgtaaaattgctattagtacaatttaatatcgagttccacttattttactttaataaagattatagagaattactaatcaattacaaaacgtcaccttataccttatagtagtattagacacctgatgttcaaaataatgctctaaatttaaatatacatttacattaaaaaaacccaaaaattgaaaggagatgcggtccttgcatgtaaatatagttgagtgagtttgttagtcagttagttattctaactaactcttgtaacagttttctggtttgcttatctttcttgttcaattctgttatctcatctcatgtgtatataaactcattcagtattcataataaagataagttctggttttatgttttgtactgctctgtttctctctctttagttttctttgctctgttcttcaaaggtttcatactctgaaactttacatggtatcagacgccgtcgactaacgtcaacaatggagtctacctcctccgatcctattcaggccaccagaacttcagctcctgccaggcccaaccagttgcaatccaactggaatcccttctctaattctttaacctctgttctcactgtaaagcttaatcgtactaactttctctcatggaaatctcaggtgatccctaccgtcatcggacacgatctggatgagatcttgcttgctggaaatcctcctgtacaacatcttctcacaggcgaaccaaatccagaatatcaacagtggaaacgaaaggatcaactccttctgtcatggcttcgatcgtccatgaccgaaggtgttcttgcatctgttgcaagtttctcatcctctcatactgtgtggcgtgctcttgaacagaagttctcgagtcaatccaaagcacgcctccttcagctcaagaaccagttttccacagttcgaaaaggcggacaatccatctcggactacgtcgacaaggttcaggccattgccgattctcttgcagtggctggatctccgattctggatcaagatctcatcctacaactactcaacggtctaggaccggagtatgatcctgtcgtatcagggatcaccacccgtagtgacactctcacttttgaagaagtccaggcactgttactctcgcacgaaagtcgtcttgagcaccatagctccctcactgatcaggctatgaaacttcaagccaacatcgcatttactggtgcaagaaacaatgcctatcgtccccctcagttcttcaagaatggtgccaaaccaccaaacaggagtcacaactcctctggtcgacccctctgtcagctttgtcttcgatatggccacacggcaccgtgtgtcattacaggtttgacaaaacctggatcacccccaaaccaggagcttcgacaaattctcagaacacaactcccagggcattcatatctgagtatgaaatggagtatgatccccaagcctatgctacatctttcatccctgacttcggtgatgactctggctggtttgtagacacgggggctacaaatcatgtcaccaatgacattgctcaccttgaatcagcaactccctacccaggatctgaaggacttgcagtcggagatggtaagaagcttttaatttccaatattggtttagcttctttatctggccacaatttcaattctattaaactaaattcagttcttcatgtccctcaaattacaaagaatttagtgagtgtttctcaactaaccaatgacaattttgtgtttcttgaatttcacaaatcatgctgctttgtcaaggacaagcaaacagggcaagtattactcaaggggactcttaaagatggtctctatgtgctagaggaatgctccaagaattctgacaaggaaggcaacccatgttgtgtgtttagtggtcaatctcccactgtcatgagttgtaccagtcatttacaatttcccaatgtaaccaatgacatcaattgtaatacaactcatatcaataaagataactcttttcattcaccttcctttacccctactgttttccagtcgagtaccaatcttgacatcaatatctggcatcacaaacttggccatccatctcatactatcctaaataaaatacttaccaatataccacacaaagaaaccacacaacaactttccttttgccatgcctgccaacttggcaaaagtcacaagcaaccattctctagcactgattcaagagcctcacaaccccttgagcttatacatactgatctatggggaccatctcatatcaactccaaagatggatatatctactacattcattttgttgatgactatagtaggtatacctggatttatccactcacacaaaagtctcaggccctggacacatttgtcaagttcaaagctatggttgagaaacagttcaatctacctataaagaaagtccaggctgactggggaggagaatatagacccttctcacggtttctaagtgatcaaggaatacactttcaacatccatgtcccaagactagtgaacaaaatgggcgagctgaaacattcatcttatatgttcttctagaaattgtgactattttgaaacattcataatatattattttcttttaccaaattcataatgtattattgacatttcatataacttaaatgtaatcttatggtagatatatagctaaaaaattagacagctagctacttgaattgtgcttaggaagtcaccttgaatgaaagtgttgttgaaatatacataatttaaaaatctaaactggcatttatattcattaaatattattggtagattattaaattgatctataataagagtataattttaaaaattatgtaattatttatgaattaaatgttgatgtaatattaagtattaatttatgtataaatatataattaattaagtaaaaaaaatcttcaattaattcagtttgaatacaaatctaaacttttttatttttctttattttttttgtttgaaatgggaacttttggtacttaagtactattccacacttttgagtaaacataagctgtaaacatgttaatatattatttcattttagattccaattcataaaataagatttgagagaagtaaacatgctgtgctgagataaagcatgtgaaaaaaacatataagcgacacatgtttctttttatataatttttatctctcatcaatatatctatgtaaatcaatagaataatggatgattttgttattttgtgacctttttgtctttttcaccaagtttatatatgtttttttttttctttcctcctactttttattccttcatgtatatctctattttattttcaatcttatattatatactaatatattgttacgtggtatgctatgttttatattaagtatattatattatgagttcggaagaaaataaatgaatcaaaaataaataatatttaatttaaagatatttaaataataaatttaaa

SEQ ID NO: 17077 - DNA, 4728 bp, Cannabis sativa
gtacacaccataactcctataacactaggaattttaaattaagatgtgtaacacatttttatacacttaatataggtgataattgtggagattatacattgtaacaagtaactccatcatatatcataaaattatgacaagtaatatagattttcatatacacacttattagtgggttgtatattaatagtgctcaatattatgttgtttattatattgttattagtataataaaatattaaatttacatatttttacttaataagccatttttttctagggctataactctcctaagttaatggtgggttataatttcggattacaaattatatgacattaaaaaaaataagattattagcataatttgagataaaaagattatggggtatagcatatgtttattgtcattccaatcataaaaactcaaatttctcaataataataatgaaacaaaaatcacacaagatacttaatattttacatgggcttttacagtagcctctattcaaacatttaaccaacaaaataaaccttaaaactatcaaagtacacaatagccaatattcaacaaactagtacaaagttaaaacttaatttagaacatagaaaacttacaaacatattacaataatatgaaacagtaataagttacagaaattttgttattactacttgactgcaaccatttttgtttcaagtttctcttcctgctcggaaaattgtgtacctaaaccgaaatgattcattagtaaccaagtaaaagtgagaagctctccacccatgctgggttgttgagcatgaacgatgggtgtacaattaatggcggcgtaaaacatgaactctaaccatacaagattcataattttcaagcgatcttgttggtcgaaattcaagagctgttgtgcaagtatgcatgcatcaaagaagacagatttggttttcatgcctctcacagctgctggtctaacttttgcttttgtagttttcattttgtttaaggcctcatcatgatttgatgttgagtgtttgttgaaaaatctcttggcctctgcacaagtatcttggaaaacaacatgccaattacctaaaactggagacaacattttaggctgtgtgataagcaagtaaaacatatagtctgaaagaatcttacacttgtcttttttcttgtccttgttgggataacaaatctcagtagctatgtgccaaagaagaaggctttctatgtattggaattctcctatgctccattttagtttaacatagctatcattagtatcagttttcaggagagctgaatcacctctttgttgacttatctccattgcttctctgaaactcattgcttcctttgattttattttcaaattcaagaaaataaaatcttgtagatcatttgtgacagagagtgaagatgagtacctcataacttgaattccttcaataatttgcccagcattaaacttttcaaaaacattatacaccaatggacaatcctttaagcaatagtttatcatatcatactggaacaccacccttgaccatctttttctttttaagagtatagaaggaacatactttgtccaactctccttgaggagatcatgggtccagtccgaacagaggagcataatgaaagatacgaattctaaggcaatggctccaccaagtaacacacaagtaagagtgatttcaaggcttccaaacttgtgattgtcagtaaaaaaaacaaatgttgtggctgcaccaaataggaaaagaaacccgatacagcgaaaaaccaagcctactttgtcatggagtactaatacttttgtgtggagaaccttgaacatgaaactcagctcatactctattactctggaagcccactttctatccaacgtcagaaaataatttttgcttgattcttgatcttggggtgttaaaaagaagccaacaatgagccctttgaacctttcgaatagaaatcgagcagccttgagttgtttcatctcgtctgaaagctctggactaaattgtattctaactagttctggataagaacgattttctttagtagtaatagtagtagcagcagtaacttctccttgaactgataacttgaccgatgaagaatgaaacaacgaagcctcttcgtaatcaagcccagggtctggctttggcaatgaagttctcccgaaattgcttaagcttgcaagataaagtgctctaattctctcagagtacttgataattcccacaaacaaaacaaggatagtgggaagacatagagaatttgttggaaatgctttgtataaactataagtagctgcaacaaactgtacgatgagtccaaaaatgtggcgaagccagaactcattatcctcaagagcaaaagaggtaatggtatcaggaccaccaagatgaaccaaaagaaatgaagcccaaaatgcatggatttcttgcttgttgggattaacaccaccacatgattctttctcaccttggctttgggtaattaatcctattgcgaaagcagcaacccagtcagctagcaagtaggccgtccagattattgtgtgcaggattgaactcttacacgtttgcctgaaacgtcctaaggttattaacaagaattgtataaggaggctcaccattatagaccctctaaggttccacacatcccacagtttttgcactttatcgagtgtacttcccatcctcatgcctctctttgattcaacaacttcaaaatacctatccctttttttattaacaaatcaatatgcatgcatcatccactctaagcaagaatatactcaaatggaccccagacgaccttggacctagcgctaggtccgagtcatctaggtctgggtccagggttcaatttcggatcttggttcgggtctaggtttcgcaacgggtcttggtccaagtttgggtcttagttcgggtctgggtctgccggtccgggattcgagtccggttccagggtctgggatttggggttcgagtctagactttggacccagaatttcagctaagagtaggggtgttttggtacgtttatttaactcaatgtaaagatcagattacaaaaatataagtgcaaatcgccccattaaaaaaaatagtttccaacacaatgaattggtcggtttatactacgttttattcaactcaatgtaaaaatcaagttacaaaaatttaagtactaaacaattaaattcttaattttatctactgacaataattttcttaagaagatctgaaattaatttgaaagcaataaaagactaagcaaataacaataatcaaagttttgagcaatcaaaataattgtatcaattttctatggtgtaataaaaattttaatccatatttccatttcatatgatatatctatattcttattagaatatatataatctaaattatatgtaaaaatcctacacttctataataaattacatatataatttgcattaagcatagaaatcctaattgctacacaaactatacaggtacgttcatccaatatcgaaatctatgtctattttactattgcataatcaatactcacctttcaaattttgcattgaaatcatgaacaaatagttggtgatcaagtaattataagtattaaacataaatgaaataggtgcacaaaaaaaatttgagaagaactaaaattgcattaaaaccataaagaaatataaaacaatatacattaacaccctaattagaaatttagctactaattggcattgtgaacaactgaattaaactaaatagaaacatgaaattaaaagaagaagaaaagagctcatcaataaacaataatggtagtctctctagtcccttactacctccaatttggtatcccacaagtctcaaaattcaaaagctctcctctcccttcgaaattagggtttaaaaacccttataagcacctaatccagtgggttgtggcattttctagtgaatgtcgcgaccttcctcctttgtcaatttaaatgtagcgagtcgcagtattgtctaatgaatgtcgggccggggtaaacattttttgggtagggaagtctcttcgcgtgtcttcgcactatgcctcaacattggggtgcctgcctaatttctttgattctcaatcattttgtccaatttttccacaagagtgtcctaatattaaatttccatgccaagcgctactccaaccaacatcttcagatcttcaactttaagggcctcaattgcactgaagcttttaaattattcctcaaactgttcctttggcgcactagcaacaaaattataataattattactaaacttgaaaatattaataaactaaagcttaaaatagtacaaaacaaaactacaactaattaaaacactttgaaaacatacttaaaaataacaaaatttagaacctaacagttttataacaagactgattacattttttgtatttatttgtgctaaaaaaatttaagttggttatgttgaaaaaaatttataaaaaattattataattttaaacaataaaaaaagtcaatttatcatttaataaaacagttcaataaataatttttaaaaaacacaaaattcaaaataatattaatctttatttaaaatgttttgatatcaaatgtcacatgaagtccatttccaaaaaaaaaaaaaaaaacctcaaatttatcaatgactataaatatattgacagcaatatatatatatata

SEQ ID NO: 17078 - DNA, 6426 bp, Cannabis sativa
cataataaacctggaaataatttgatcaaagaagtaaaatatagtttaccaagtgacgggtttcacagataaaataaaattaaaaatacttggggtttgtcaatatttgattcttctacattgcccaagataaaaaatgcataacaatctctcaaccaatataccaaagtaggcaaaagtaccacttcgatggatggatgttagaatccaatcatgaataaacatacaactaactttccccacgtataaactgtatgtacatgtaggcgatggattttatcagtaatggcggggaagaaggattcacaacgtccccgccaaccatatgtcaacctatatctctctaccacctaatcatgtcccaacattgttacacgcactaacctacctaaacgtgggagagggtctaaactgtcatttttacaatctacatatggggctgccggtgactgcttgctacgtttattactgtctgtgcttggatgcttatactccattagcctcttcacaactctccaagcgaactcgagagtcattattatcggacacggtttgaaactttctttgccactcgattcttccagttgctctgcattaggagaaggtcagtagaaaatcatccaaaagaaaaatgcatatgaaaccaccattgggattagggtacagaaataaaaatgtgttcaacaccagagagtagatttaccagaggctcatcgtctgaaagttcgtcgtcagcagcaacagaactttgaggccctttatcgggtatttttgactttgggagactatttgtctcctgattatcttcagaatctgatttctcttcttccctctcttgctgattatcatcggaatctgttctctcatcttcagaatctgatctctccatctctttagtcttctctgcttgattatcttcggaatctgtattctcttctttagcctgttcttcttgattatcttctgattctgttttttcttcctctttggactgcccttcttgattatcttccgaatccgatttgtcttcctctttagactgctcttcttgattatcttcagaatctgttttttcttcctctttagcctgctctacttgattatcttcagaatctgttttctcttcatctttagtctgctctacttgattatcttcagaatctgttttctcgtcctcttcagcttgcactacttgattatcttcagaatctgttttctcttcctctttagcctgctcccctgaggcatcacttgagtcatgttcatggtcctcttctgaatgttgcttctcttcatcactattctggctcatgtccatatcttcagcaaccttttctcccgtatcaggtttctcttcatcagactccttaacaattgggctcctcttcttaccttttaactgttttcttttgggcactggcttcacttcaatatcagattctctctcctcagacatgttttcatccatcttttcatcatgctccccttcagaaccacctaggaataagaaagaaataatgaaaaatagaaccagaaaaaaggaaagggaaagtgaaagtttagataaaacaacattttccatgtggcagttgattagttttccacatcccaacacgaaatgaagtttaaacagatcacacatgatcaaatacataatctgtaaatgaaagacacttgtacctgagttcatttcatcctcaacttcagatgtcctgctcggttcaagatttgacacatctgaactctctttgtcttcagtttccaaatgattaccttttgacgcacccttttttccatgcttcaaagctttttttgttctttttcccttagctctataaagatgaaacatcatccatgttataaatacgaaattatgtaaaaagtacagcaaaacaagagcgtccagcatctactcacatcttggttgttctcttcttcggacgtaaagcatcaatatttttagtcttcccaggcgatctgcaagacataagtgacaaacaagatgacattaaaaaaacaactgtaatcaatactttatgtgtctatcagaagaaactaattttatcaatactgcaccaaagaaccattacaaaatatcttcagcaccaactacaggatagagtgaatagttgtgcattagaaagagaaacttacatgtcttttgaaggggaggcttttgatgaatttgatttctgtagattatgaaaagtaccagtgtaaggataatgtcatgatttctagtcctaccattaaagaaaataaaagaagagaaatcagaaatgctacaatcagaatcatagacctttgtaggcttgcggccattgtcaacaagttcccagcgctctctctccagacgaagtacttctacatctccatcatcatataatatcttccatgttacatttaaagatgagataaattagaaaaatcatgagaaaataggctcctgacgtagtgtctagtaatcttcaaaaagagatatgggaagcaagaacgtgtagcttaccacatgcttctttttcgtagtatcaaatgacttcacagtgccttcataaaatctgcaagtgtaacagtaaatatttaattaaagtttaaatcaatacattgtggttaagaaatggaaataaaactaacaaaacaactcttttaccaaaacgtaatccattagtattatatgaaagagcaaaagttcacaaattccaatgggaaaaattaataaataagacagcaggttcatttgatgaaaacaaaagctacaccattgcacaagaaggtcgaaatgtacaagtttacaaaattaattggccttagaccccttgagaaataccataactacaacttatctctgaaaagtagccagatgtaaaactaaaaattgctaacaattagcaatttgatcagatttatattactcctacaactactttgacttcaccaactgaacagaatttaagcaaataataaacagaaatcaaattcatcaaaagcctccccttcaacttttgtttatcaaaagagaacttactccttatccaaaggccaccacacttttattctgcagccaatcaagtcttcaatatcctttccaccttccttagtcttgcacttcaaacaaaataataataaataagtaaatatgttgaggagtgacatagttgtagaattaaacttgatgagggaacaactcaagaaattaagcaatgagcaaagcctaagtgtaagcacattcatgcacacatacacctaagtcatgctcgctagtatttatagacttgctaaaccatgttgtatacactttcctaggtgctgaaatgaattagaaacacagacagagagagagggggcgttcactagcaagtgcaccagaacaactatccataatgattctcacacaacatgcagctaagaatgctaaaactgggggcaaataaagttgaaatatacgagatttagtaaccagttacagatcttataaacttctcaattctcataatatacacttaatccaagaagactaaaaagtatttactcttataaacgttggcatgttgacctataagttttaaaatgaataggaataataaccatgacttgagggcatactgctaggtacaagttagaatcagtacattgtgaacaggttcataagtagcatatagatgcatattacttgcacatccgttagcaatcagcctatctccatgacatcagcattttattaattattattacatgataatgcatgtcaggttggagatcatatcaaatgttacatttaacaagagataattgatgttggtatggaagaggtatacctttgccaaaactgaaacgctttttcgtttccgcttcttgacagtccctgaagaaaactgggcatcattatttgtgccaatcctgtcagtttccatctgcaggaacaaagaaagagtaattgttatctgcaattaacagcattaaagaagcattaataagataagcaacctacctcacggtcgctagtttccccaacctcatttgtctcatcattactccagcccaaacctcttcctttaagttttgatgaagaaacattcttttgaaagcgtggtgttgatatatctgacttgttgtttctagccaatgttctctgcatgcacatttagtgttttggatcagaaagggtctcgggttcaatatcaacatatggaaattagtagacacttactttaagtgaatcatccctgttatctgcagatgagacctttaaagtgctgcttggtgacctgaaggcactttgcccagatgatgatcttcttcgttttggaactggaactggtgtctcatcactagcttttcttttttcattctgtttatgttgtatatcaggggtcgatatcttgctgggagaacgttcgtgaccattgcttgattcaaatttattagattttcccaagttatccaagtttatttccctcaccatttttaagacatcaacttgattttcagcaatccctgattcaggcaacgtagacttggcctttttagattttttggccttcgcacccttagatcgtaagtgtttgattattttccccaaaggtacttcatttccatctccttcaccttctttaagattctcatcttcagcagtttctgaaacaagctgtagcaaaaaaacaagaataaaagtaaataagggaaaagaaatacatcacaagttagtcaacactgcaagacatcataagcagaatattaataataagcttgaaatgctgttagtgtaacatactgtttcactggtttccagcttaagcgattcaaagtgtttcaaggaactttcatcaaccagccacgtttgctcttctctggcctgtcatacacatgcaaatcattaatctggtttgatttcattgaaaaagcacaagagaatttgtagaggagatttacatgtactgcaacatctaaactcatcaaaggtatggatcaaacgattttcattaaccatgacttctaggagtaatcataccatatgtataataccaattgcctcaatctatcaacattttttacaatacagaaaactaaatataatgagaatattactaaccacggaatcatccccttctttcttttcgtatggtttatacatcattggaggcagggggacagatgtggtcgagtcttgggtatcatattcctttggggctaagcgcttggtaattgacaatcccaggtcacaaattgcatgtgaattctaataaaatcaattcaaacaaaaaaaaattaaaaagtatacatttaaaaaagcataagctcacagttttacaatctattctacaattttaaatttcgtttatctttacacttttttcatggttgggtggtggcagtttagccgattgtgctcatagtaactggaaataacaatcactatggatgtgagatctctattaccaacctttgactttgctgtatcgactatatcttcagatcgtttgatactttgaaatatagagattgttgcaagaatggtttctttcaacatgtcgttactcgcttcagatttaacatcttcatctctatgcaccagcatagaaataatcaagtacaactgcctgaaaattacaaaaccaaaattcgtaacttatgttggatgatacgatataacacatttcagtactgtcaagtcttagctaagtaaattttcaacattatacgtagcctacattatgagatgatatcgtaaatgaaaaaacaaatttgaaaacgatctacctgtataataattcataagctttgacatccttgcattcgtcaatatttggacatgaatgatgagcaagcacatgaaccaagtatgcgagaatgtattcgggataagcagtcaaggaatttgcatcactctggatagagagttgtcgtgccttcgtttggtgatacatttggataatgtctgccaggttctgcttctcctgtaaattcaatgaggaacaaaactcaaccacgaaggcactggcatgaataatctacttcaaaccaagcaagaatagagcaaatacctcctggaactctgacggtgtggatccaaaaatattaaacaacaacgcacaagcatattttccatccaaaatccgatcctttatgtactgatgaactttacttaaaaacaggctcttagcttcggggaaattaatctatgaaccaaaataaaacaaataagtacctgtgtccagcttgttatttgtaaatacaagaaaaagccagcaaaggagctatctaaatcataaaatgacaactaaatcacagtactaagaaaaatcttcagggccacacctcagatatcctcaaggttaagtggaacacatcaagagggattttatgatcccagaactttgacagacgaaggattgcctttgcagcggcaagtcgaaaatgggccttgtc

SEQ ID NO: 17079 - DNA, 5338 bp, Cannabis sativa
tgctttatttagctattggaacttaattttacattttgtatagtgcacagtgcaaaatgggggtttgggtttgtattttcggattgaattgtctaacccgtttattaaacgggttgtgtttgggttgatacgactaacacgaaactaaactgatccatatgacttatttaaagttaatttaggattttaagagatcataaacatgttgaataataaatatgtcatataaatatgttaaaaaagttcattagtatattaatggattgaagtgtttaaacaatatctatttataaaagattggttatgcttgaaacatattgctttatttaggtattggagcttgattgtacaaggattgagattgattatataactgaaaagtaaagtaatttggttatgaactttgctctttgattagtcaagttaattttcactattgattgttgtataggctttctgtggagaaaaatcctggaaacaaaatgcttggtcgccgggaggttgtggatgggaaggtatttttatttatccataaaattctatgaattctttttcattgtcaagctaatggatttgaaatgtggtcttttctttgtaggctggaaagtatgtttggcaaacttataaggaggtttatgattgtgtgataaaacttggaaatgccatgcgcagttgtggtttcggagaagtaagtttttgatttttcttaatatatgtatgtgaaagggaaaatttgttgttcaagtttgttgaacacactaaaaatctgttccttcttcattgcagggagacaaatgtggtatctatggtgccaattgttctgaatggattatgagcatgcaggtacattcttctttaccgatcaattgcctttcgtttactttcttttggtcactgatcgtggcgagtcaaattaaacaagcatgaagagaacctctatctcatgtgtagttttgctgatagtctgtttctcacacaatgttaccattataaaatatcctgaagatattaaagttaatgattcttctatgtttttgaatgcctattgtttttctgaacaaacttcttattagtgtagggaattgattatattttacatgattttctgtgaaacatattatatacatctacaatacttgcatgtttatccatgtttctaggtatacttttgccttacataactgcaatactaatgcaggcttgcaatgctcatggactctattgtgttccattgtatgacaccttaggtatgcttttctcttctttagcacttagtcagccaatgtcaaatgcaactaaggttccttgactgtttatttcgaatgtcattttgaatttttttatctaacttgtgagcattttttaggtgctaatgcgattgagttcgtcataaaacatgccgaggttacaattgcttttgcagaagagaaaaagcttcctgaggtacacttgttgaaatatttatactagaaccaactaaaagtattaatgaagatatgcttatttaggaactgatgaactcaattgcttcataaatggaagcaattcgagagttaaatcctaaaacagcttttggttgccatttcaaattgtctcatgcatatatttgttttcccccttttcagctgttgaaaacacttcctaacaccacagactatttaaaaagtaagtcatatgcattttctagattcctttttctatgaatctttgtgtaagaaagtgccaagtaacattacttatgtctcttgttgtagcacttgtgagctttgggaaggtcacaccggaacaaagggaatctgttgaaaagtttggattgaagatctattcctgggaagagttcttgcaattggtaggctattttattttgcttacccatttttcatgtatagttagtacttactactaatgattgataaaacaattatgttagaaaaatggaagaaagaactcttttgagcttgctgcatgttatgaatatagtaggaatcaagattattgatccaattttttatcggtttctaacagggtgattgtaaagatttcgatcttccagtgaaaaagaaaactgatatatgcactataatgtatactagtggaactactggtgacccaaagggagtactgatatccaatgagagcatcatttctcttttggctggggtgaggcgattgcttgagagtgtaaatgaaaaggtaggtccacatttttggctggaaaaaatggtaaaatgattatgataacaccactttgttttgaattatactgattttcttttttcaatctatttttttcttcatagttgaccgagaaagatgtatttctttcatatcttccccttgcacatatcttcgatcgggtgattgaggagttatttattttgcatggtgcctcaatcgggttctggcgtggcgtaagtgccctaactcataacttgtctctaaccaaatagaacttaaatctagtagttgatcatctgttatattatcaggatgtcaaattattacttgaagacattggggagctaaaaccaactattttctgtgccgttccccgtgtgctggatagagtctatgctggtaatcatcctcataattgatgtacttatgatttttactttttcaatctttgatgggtgtaaactttggcaatcttggtggaagtgttttactattgcttcatgcataatttgttgcaacaaagcactgatagaaatttatgtatattcaatgccgtttcgttatgaaacctctgttttagatttccatcttcatttgttgtattcaaattactgtccaaatttccaggtttgacgcagaagatttctgctgggggattcttaaagaagactctcttcaatttcgcatactcacggtaagtgcagtgttccgaaatttccttgcaaagaaatgattaatatgtttcacagtaaggggttcattcttagaacaaaattatttaaaaaaaaaaaaaaaaggaagaagcatacttctactttattgttgtttctagcataaagctttcatttttcttatgagttcttgatcatttttgcttaattgctgcagcaagtataataacatgcgaaaggggcttaaacacggggatgcagctccattatgtgacaaaattgtatttagtaaggtgaaggagatacttttcgtttctcaactgtaattcgcttgatagaaatctttacaaccaattcctgaaacttgttagttttactgatgctttcaggtgaagcaaggtttgggaggtaatgtgcggcttattctgtctggagctgcgcctctagctcctcatgttgaagcttacttacgagttgtgacatgtgctcatgttttgcaaggatatggtatcatatcttttgaacattctgtgtttttcctttggcctatcttgaacatagtttcctctatacatgttagtactcgaagaagagtcacatatcggtgtcaatctgtgcagggctaactgaaacttgtgcggggacatttgtctcgataccaaatgaactaccaatgctcggtacagttggtcctccagtacccaatgttgatgtatgtctggaatcagttccggaaatgggatatgatgcccttgcagaagtaccgcgtggagaagtatgtgtgaagggaagcaccttattctctgggtactacaaacgtgaagacttaaccaaggaggtcatgattgatgggtggttccatacaggtttttcccatcttttaattcttaatgaaacatggcttaaaatccttgttcaatttgtctcatatgcatctttgcattaggtgatgttggtgagtggcaagcagatggaagcttgaaaatcattgaccgtaagaaaaatattttcaaactttctcaaggagaatatgtggcagttgagaacttagagaacatttatggtcttgtttctgacattgactcagtaagtttatcttaaattttctttgttatttcctttgatatactcagatgcaccaataatgattagagatgctttggtagtaaaattaggagtgcgaactaccttgtaaccttttattgtgacagacatgtacattttcactctcctctttacccataatgtagtagaaaatatggttttctcgagctttcacattaggctagttagaatttttacctccgaagtttgacatgtcgttagaaaattcctcccaaaccattgaaattgtttgatcaagaatttccatctaattccgttcaattttatttacggacgccgaacatgcgatcgtccatataccaaatcgtgctctctgaacttccgtccatgtgaagtgctcattttagagggtacaatttggtacatgtcaaaattcgaggaataaaatcctaattagctttcacattattcttatttttcactgaatggatctgtgttttagctggaagttgacattagtttaacttctcattcttcgttttgttaatgccagatatgggtttacgggaacagcttcgagtccttcctcgttgctgtgattaacccgaaccagcaagcacttgaacgttgggccggagagaataatatatctggtgacttcaagtccatttgtgaaaatccaagagcaaaggaatacattttgggagagctcaataagattggcaaagagaaaaaggttcacattctattttagtctgaaacttaatgtgtcatttgtcgtcacttagggagcttttcctaatattagatgtttgtttgttttgcagttgaaaggttttgagttcataagagctgttcaccttgacccagaggcatttgacatagaacgtgaccttattactccaacatataagaaaaagagaccccagttgctcaaatactaccaggtaaatcgaaattctctttcgaaaatcgaggctcattttttaacgttgctcgtgataaaggaccgaacctaggttaagacgggctatgcgtggctgccagcgcctagggttcacctaatccaaatatatatatattttttaaatacatattctttagtagtttttaaaaattctctttgccctttttatgtggcaaatgtaaattgacctgtcattcaaacaatatcaaaattaaaatttgattgtagtgttaagaagaaaaatgagattagccaatctaaactattttttaatgtggcccgtaataaaggctagaattaaggcgagttagacttgtgcataggttcatccagttcaaaaatattttattttttaaaatatacatatttttttgggtaagtcgaaaaataccctttttattaatcaattaatcaaatttgcctctaattttatatttatttgaaacatacctctttt

SEQ ID NO: 17080 - DNA, 4800 bp, Cannabis sativa
tatctgtttcgacatctagaagatttttttaatcaaacttttgtttgcgtacattgtagtgttttaagttcactagtaaaattttgagaaaatttcgaatagtttacattgccgaaaataaaattgaaatagttatttaatgcacgtataagaaataatagttgcgggtgtataaactattcgaatcttattttcgacactgtaagctatttgatcatgaaaagaagaaaaagttagattataaggctttcctagacgtatcaaaacgtcttttttaggaggtgtactgtagaattactctaagtttctataggctagattcttcacatttcctttccttgtgaattagattgtttataattgttgtgttaagattaactatgatgaatgtttgcttttgtgatttgtttcagggccgtgttagtactcgagaggtttttgctttgtcgaattctgatttagtccctggaaaatatgaaggtaaataggattcacattcatttactctcttgtttctttgtactttcatatattaattgtttctgagcagttcatagtatcattctagtagatctcgatttccatttactttgattgagacaatgttgatttttcttaggctccaatcttttagctagtgatcatgaatactgaatgtttatttatctttctgttttcggtttgtgcttatagggggtttgaagctatgggagggttcacttgatctggttaaagctcttcgttctgaggttggaaatgaacatttaactcttaccgggaagcgagtgttagaggtgggcattctaatttacagtgattgtattttcgtatacaatgtttcaaatgcaatttggtatcaaaatctgatatgattgctgtaacttcttctattataagtgttcatgtctcctctcaaagtaatcatctagaaaacatttgtttgtttgccaatgtatttttagaactgagatatctattttcaagcttaattcggacttttgaatcttaaaccatctgtctgttacttgattcagattctagagagttattgataggatcacatagttcattcttatatatcaactcttcaatgatttgagtgtgcaaatgagtgactgaagtacctcaagaatagacttgtcaatatgtgatttagtgagtgattaccttaagagtagtaatcagttttgattatttgaatgtcctagcccaggagggcacaccagctttatcttttgtcttaggttaaggtttcagattaatacatgtttcggttgattgatttgatacctatagtttaagcctgaatcaaggctaacagatcaattttaacactgttgataatgttaaactacatttggaaatgagaactacattgaggctttatttgaaccaaatcaactgcttagttctctattcatcgagttgttcgggtaatagcgaataatcatcactgaaaggagtaatagtcgagttgaaccagtgactaacagagaagacctcatgtcgtatataaaaaagaaatgaatcaagaaagtcatcgcttttgcccgcattcattcaatcttctaagacttatatttcttttgttaatttttcagcttggatgtggtcatggactccctggaatctttgcatgcctcgaggtgaattttcattcttggcttctaattcagtatcctaaatcagatgttttacacttcttcttttactgaatcagggtgcagctgccgttcatttccaagactttaacgccgaggtcctaaaatgcttaacaattcccaatgtaaatgcgaatcttcagaagaaaatccaaaactcgaaaacaggtgtaacagatagtgaggcagcaacagaagttcgtttctttgctggcgactggagtgaaattgataaacttcttccttatgtacgcgacagtaagaaggaactcgattgtagcacagaaaattgttctgttgatggttatgatactattttaatggcagaaacagtctactctgtcactgttttccaaagactttatgaacttataaaaaaggtagttctttatcgaattagtcttacctttttcttggtcttcatgatcttctcaacctctatttgctctagctaaaaaccctttaaaatgcagtgcatgagctatccacacggcgtggtatatatggcagcgaagaagcattattttggagtcggtggaggaacacgacagtttttatcaatggtggagaaagatggtgagttaatctaggcagatactttcagatttactgagaaactatttagtgttaaattgttctagttcagttcttgaaagaattaaaacataagcatttcattgatatcaaagagaaaatgacactcttcttagattagaaataatctaacaaaagaattcagacacaaatattaaaatcccaccagaatgcttttattaatcacgaaagaattacacaaaatgactcttcgagaggctttttctccttttctaacctttcaatcaagagggctagatttctctcaattctaaactctttccaacataactgaaaccgagttctaatttcctaattaaaagctactaacccaaaataaaccgaacaacttagccaaaagacaactaaaacaaagaataaaacttaataaactactgtaataaaactcatgcttggtcttgatggctttatcagaaaattatgaggttccaaactcttataaacaggttggtatctctcccagaaattaatctactttctttcctcttgtaagataggactagccttaactaaaagtaatataacagtattctaactaaggaactaagctgaactactaacttgtgactcatatatttactcagattaggattgttatttttgtgcatttggaaggttattacaacagactaataagcagttaagctcatgaatgctgctatttccatgatatgtataaaattcccattaatgaataatgttcttgatatttctattcttctttcttattagctttacaattagattcatgaaatctttgctagttactaaatggctattaaaatatgtcctgcaggccttatggcttatagcttggtttccgaagttacagatggctcgtctaatgtcagagaggtttggaagctttcatttaagtaggttttcgaatttcaattattacgctactaaaatgcagtcgttatgtcctttcgcttttattgattttgtaccgaaagaatgaatcagacttaaagtagcattatactatgtggagagaacatgtagaagatgctttggtaattggataacctcaattaaagttctcattcacaacattttgattctctgaattacttgatgttgctaactatataaataggtgagagtgaacatttataatttctcttcaaatccctgaatgagttatttgcttgttatttagtttgtaatgattaccataaagttgaagtatgacgacttcgaatttctgagcccgaatttctgagcatattgttcttcaaatttatttaacataacatgttttaggctgatggggcagatatgtttctcattgtggttcaccttcatatttttctcgtgatcttatatcataccgtgcaagtcttagcggtcctagagaatttgctcggtatgatctctagtttgttataattcacatcattttgaatttttcgaatcacttcatttttccagcattttgatatcaatttcggttgaaggtttctgagtttatacttgctatttagttttgtatgattattacaaagttgaattatgtttctcaccgtggttcaccttcataattcttttcgtgttctatatcataccgagcaagttttagatttgccctaacaaaaactcagaaactatcaaccgaaattaataataggaggacaccgggcaaatctaaaacttgctcggtatgatatagaacacgaaaagaattatgaaggtgaaccacgatgagaaacatacttcaactttctaataataatgcaaaactaaatagcaaacaaaaactcagaaactttcaaccgagactaatgataggaggaagtgagctagtttgttgctttgatcaagcttctaacttttgtgatttcgacatggaaagttaataggttgaagggcattattagacatagatgattacatacacaaatgcacaattcttcaaaatctgttgaaaacattgaaattttttagaactgatgacagtagtagcatgaatcacagaagtatagagaacaaagatagattagtattaagcaaagctaatcgtaaactcggtgtgtgtgtgtgtagatgtttacagaatccatggaaagcttagatcattcattaatcttttctacacttataatacttttcacaccctcttcctggaggattagattgctgaggaagacaatttcctgctctgctataagattctcctccttgaccgcctctacaaaccggttgatctcgtcttaaagccccgggtaagatgtatctcttctcttctagaatccttctacttatgtcggactccataaacatctcaccttcttcatggcactctgctatggagccattgcagggcatgtaagtagtgtagcattcggctaacaacacgacacgggtcgtgctgcaaccgaaatataaaaggccaataattagaagggagttgtagaattggagagaaaccatgttcttctctttgagatttcttctatggttttccatgtttgagtctagttgtgaagcactttatattaagtctttctttcccatgattttt

SEQ ID NO: 17081 - DNA, 3828 bp, Cannabis sativa
cgtgtaagcctaaataaaaaaaacaatcgttaaaccaagaatcgttaaacaagaagaattgccgttagataggcacttttaaaatataaagatatacatacattacacaacttagaattcaaactcataatcccacacacacaccctcccaactcccaagcccctatgaacacttgaggctcaagtggtagaaagttagagtcgtactattcctcttaatatgcactattagacaaaaatgctacaacaaaattggatttgtcaacaaagaattgattagttcataatgagactctttttattaattaacatatttttagtacgtcttaatttcaagaatacaaattaaactctattcttattattattccttatattaatttcaagcaatttttcccttagtgaatgtgatttggctcgtactaaatatcccaaaattcaggcatatatatgccttgggaagggaacgaattacatttcccgagagtgaaaagatcagaagaatgaaagaaagaatagtgcttcgagtaaatgaggaataaaaatcacttgaggctagttcaagtggccataggtgggtgggtgtgttggaggtcttggattcgagtctcgaattaaacataattgtaatatataaacggttaaataaaaaaaaaaaaatgaggaataagtaatatgtcattaaaagttatatgacatgagcatgctattaataagaaaagaaaggccaaacttgatgggagatacatttctatcgacatccttcttttcttcctttggatgagaatgcttagaaattgatcaaacacatttctttattgaaaaaacaacaacaacaattcaaacattaatcttagcatacatatttatcattatctataataaattattaaagagttggggtgatattttgtctaatagccttgaaaaagagcaacaattgatgatgatgaggaaggttttgtttaacaacatgaacttgtttaaagtgattaacccattgatgaagatgaggaaattctttgggatcaaacaatttcacaccaactatctcttcaattacatcataccactcaacaatcatgcctccaagagcaatgtccaatattccaatctcttctcctccaaagaacttattattggtattattattaatcttttcaacacaaaactcttcaattcttctcaacatttcaacactctctttctttgctttctcttgctcttctccaaaagttctaaataccatccaaattgatggcccctacataacattacaatatacaattaaagaatgggaaaaattattacaaattttatgggattttatattatttgtgcaaaaatatagcatttttttttaaaaaaaaattatgaaaaatattcaataaaaagctgataaatatgataaccagttactttttacatgataaattgtacaaattcaaaacttaagaattttaatagaaatataagccatagaaaaattttattttaaaagcattatatttctttactcaccctataaaaagtcataaaatctataattaattaattttctataaaataaataaagaaagaaattatctagaaaattaacaagaatatgtgtaccttaagttcaacaaaatgaacccaaaaacgaattattgctctttcataagggtctttagggagcaagctagggctttgaggccatgtctcttcgatgtactcgataatcaccatggactcacatatgggttttccgccatgaacaagcactggaatcttcttatgaactggattgtattgtaagagtaactcactcttgttgggaagatcttctactatgaattcatagggtatcccttttaaattaagagcccataaaaccctagcactgaaaggactagcccaatgtccatgtaacttcaccacatcataatcattaccacccatgatatgatctttaatttgcacaaaaactagctataatgaactcaagtttatgtaaactatatgtagctataataatacccaagactataaattatttatatttatgtatacatttgttttggtcattaatttgattaagaaataaatgatgtttccattaaaaatatatttatatgtgagtttgaattcaaaggttttttattgttaatacattatagtagtacatcttttcattatttttattatttctatgataggtagttttatttaatatatagaagtacacatgttagcttaaattaaaaactaatacaaccaaatgtgcacatgaacatgataatcaaccattaaatattataaattaactttctaagtacaaaaaattcattatcagtttgtttggtatactcgtgttatattatattgtattaatgagttatgtcaaatcttttaaaaaaattaataataaacacaaggtgtggatcgaaagcccgctaaggatatggttctgataccatgttgagaatcatgaggttccatttcaaaaccaattgacaatgagtggagtagcccatgttcttttatatagctcaatacttttatatttaatccatgtgggacaatattctccaatatattcgatagtgcaatactctcaactaaattttaaatcagaatcttggctcccaaccaaaaaaaattattgaaaatatatgaagacaatgtaactaggaagtgatagattttttttttttttttttttttatatgatgcatgtccaccagttgaaattagtaatgaaaatgatgaaccattatgttcgcatctacttcttttgtgtggtaggaaggctcagtaatagtttgaactaaaggttgtagctcgtaaaacttttcatggttgcagatatttgacattattggcttggactcatgaacacctgtacttgattgggtaggtaggctgaatctgaatatttcatgaagttttcattctttattaaaaacagtattgtgtggaggcgatggagaattggcacgtggaagaggagagtgaaagatggggcaatgcaggagaaagccacgtggcagtcagcttgagccgaaacccccgatgaaaggtagcccccattccctgacccaaaccaaaaaaagaacaccttttctctctctctatatggcgggaacttgaagaaaaatacagaagaagaagaagaaggaagaagaagaaaggaaggagccattggaggttttgggtagagatataatgtgtttggtaatgagttatctggacgcacacaccttagcactctctctcctcgtctctccactttggaatgcactagcttccaccaattgcctttgggcccctaaggttcttcttctctctcttcactttgttttccaaaactttcttcatatttatttagtctattaatattatgtggaattaatccttatattatttttttgaaaaattactataaatattattttgttttaatttttttttttaaatttacgatttggattttaaagtagtttttgtagtatgtgagttgctatagggatttgagttgtaatttaggttgctcaattagttgcaatagtgatttttatgtagaattctgtaaaaatgcaaaaaaaaaacagttttaaagtgtaaaagtaaaaaaaaaaaaaaaaaaaccctatatttaatctgtgagttcggtgtttttttaagtgagttatttttatgttattagcaatatcatatatatatatgcagtatgcataaactttatgcgaatgatataatagcatagtaaataaaaataaataacataattataaaatatatagaaatatttattttaataattaataaaaaatacaataaaatata

SEQ ID NO: 17082 - DNA, 4006 bp, Cannabis sativa
gttattgaataaattaaatcaacttttgctcaaaaaaaaaaaaaaaaaaaaaaacctgtgcattttcaatttataacatttctccgtgcccctcctaacaattttacgtatttattctttatattttatcctaggttgacctcaacgtaagagaaaaaaaacagtgtatgaaacagagctgttctttacggtgcatatatttgagaaccataatggatcttgtatgatctctttttactttctagaagataccaaggtgcctctaaagagagtaatcaaaactccatttccacacctacaagaaaacatgttagattttgaacaatttctttaccgaatataggcacgatagtcacaaagtaatattaatttgcattatggaaatgatttataaatccagtaattactttacaaactgaagaatacacattatgaagaaagaaatttgtgaacattagtcaatcaggacagtcatcatctacaatctttgcaccagatcttactcgtctatatgctctcaccctgttcgcttgtacacttgaaagtttaaccttcacactatttcttctcctctcaacttctgtaacaaaattcctgccaaaggttggtttagtccccaaagttatttcatctcgctctttccttttttgcttttgatgtaagctttgggttggctggtttaccctgcaaaggcggccaaagtagtacatcggatcaacatagcaacatgatgatgacacaatgcctttcatgttggttggctgaacaagctttataaacttctctatctcatgaaatgatgagtgatcagagtaaccaacggtataaatgtatttatgaagcctgatgggagattctgaacttccatttggcttattcatctggacactttcatttccagcccatttacttttgttgtaccgagtagttagtagagaaccaaaaagatggtcctttctatctgaaggtttcaccatccatggaagaccagatggcatgatcccaatagttggtcgcattgaattcaaaccttctaaagtttcaatgctaaagctgtaacgaggaacagctcgaactctagtaagggaagtcttagtagtaaatatctcatcaaaccctagaagatgcatggtttgcaagcgttctggccatacccaaatctgggaacaagagaacaagaaacagagtgaacacttgtaactttaattaacaactctaacaaatgaatacttcagaccgaaaatttaacaagtacaggcatattttcattgcaaggccccttaatctactaagtactgtactaacacgatacatgtataaaacaggatgcccaaaagaggaaacactgctgcaagtcaaacttcaagcaagagaaaaagaaaagtacataaattaatttgagaaaattcaaattttgtttgtctttctgcaaatgttgttcacatagccgtgacaatgaatgaattaatagtagctatgttcattgagtgactcatacaaacctttatcttaagcacccgtgaaatgtgaagcaaaagatcttctttccccaaagaatcaatcccaatgatgatatcatggtccggatgagaagcgattatatcaacaacctataagtgcatgcccattactacaattggtaagaaggggcttgtaattctgatcacaatactctatttattttgcaggtcaccatgggcttatgacactaaagcccaatctaatttttcattattggtacaacaagaaatcagacacgaatacatttcaataaatgtgctttaacaattccaggaatcaactccatatgatacactatatttgaaatattatggcaagcttatcactatcagcaaaacttaaaatgagcaaaccaagaaactagctaaaatgttaaaccttcagttcttaaggtgcaaataaaggatttagctctggttaggaccttatggatgcgaaatctgccaacctacatatagtaccatttgaaaagacacacctgctgagcagcaacttctcgcggtgggaaatcatatgatgggttgcagtatgtattatccaagtaaagaatgtcaaccgcagcatcattgagagcattgagaagcatgctccttcccatcttagccctgtcactagttgcttcccatctaaaatcaccagtatacagcaaacatccaaagtctccacgaaacaaaaacataacagcacctgcttatataaacatgtttagtgtccatgaagctcaattcatacatattctcaacaaattgtttgaggactttaatcaaacaggttctgtgcaatccaatttgatcgtataaagaataccaggacaatggtgagcgtcgatggccataaactggataacattcttggaaccgctggaaggcgaaacaagagaaatggaatgccatgaaccgattcggataatgcgaagcagagagaggtcgaactcgggaaatttgaaggggaagagcttagcggtgaggcgggagcagaaaactggaccctttgcccacgaagaagaaaggcctttggtgtgatcggaatggaggtgagtgaggaagtaggcctggctctctccagtccaccggtccactgatatcagacccttttccatgactgacgcggaaaactgattcagaatgccatggaaggagatttcaattttgaactttggggagagaccatttcccttcttttttggcgccgaaatgtttataaagcgatggataattctttttattttttcttttttgtattgattttgtttgtaaatattattttttatgttttaatttttatacacttaaccttttattttttatttttgtgacaaaactcctttatattttaattttaatacacttaatctctttatcttttttttttgtggcaaaaccccccttatattttaggggcataaagatgaggtgttcctttatgcctccattgtgatagatatgatatggcgggtccggaatgacaaagtacataataacaggttggataatgtgaatcaatgtattgactatatttctcactcttatgcagattacaaagattctcttatccctatttctttcccgagccccccaagactaattggaaacagtcctcccaagattggatcaaattaaattgtgatgttaagattaaaggggagcatatgtgcattgcagttgttgctcgcaaccacctgagcaaggtggtgtgggtggttctagccaaactagagttttttgatgctctttgtggtgaagctgctgcggtttgcctgacgcttgaggtagctaaggacaaagatcatcggtttatcctggtagaaagcgattcaaagatagtgttcaatacgctcaatggcctcgaaccccgatggaaaattgataactatgctttattttgtaaaagaatcgttacttcttttattttctgcttattttgttttacggctagaacttgtaactttttggcacataacgtggctaaatagacttttacccataatcacaatggtcatattaatgttgctaccatttctatgaacatttgttaagaggtctaaattactaattttttaaagggcaatatttttgttaatggggctatagccccacattgataataataggtccgtccctgagtacactttacatataatatctataatatagtaaatatccaattctattttaattagaatccaaattcaaatataaatatctaatacctaaataacaaataccagttacatcttttattttaattattatcttttcaattaaacaatgatccaacaattcatttaaataataattaaaagataattaaattaatttaatttaaattattttaactaataaaatacttaaactaaattaatcatgagcttttatatatcaccatacacgtgtaaattggacctacacgtgtgggccatattttaagatccaaaattgatttttcaattttgccataaataagatttattatttattctaccaat

SEQ ID NO: 17083 - DNA, 3981 bp, Cannabis sativa
atttttaatggccagaaaattaaagggcatgatttagtacatagtaaagtttaagaagcacaaatcttaattagctaaaattttattatctttatttataatttttcctttggtttctaatattttaatcgtttggtattatttatttatttatttatttaatatgaaagcaaactcttattttttttttctatagttacaaaagaatccaaaaaaaaaaaatggcatgggaacgaaatccgagggaaatttcgtaggtacggaaagaggaagagtccatgtaacatgtcagttttcgtcattatgtacagaaagtggggtcattcaatatggaatttggatgattggggttcgcgaatttggagggtaaaaactaaaataataaattagatgttgaatgtcaggttgatatagtattattagtggaataacaagtttaaccgacggaacccaggtccaggtaggttggttgtgttgtgttgtgttgtgttgtagtatttaaattcaagtactgtcaaagagaaccacttctaactggttgtacctcaacactctcttgttttattgttccttctctaaatctcaattattgttcctttattctctccacacatatttttctatattttattctatctaccataccagtaccgatctaacacttgcagagatttctcaatttcattttccaggtctgtctgcatctcctttttttttttccttttctctctcgatattgtttcgctttctaatctctctctgttttttctatgctctttgggttcgtttgtttcatgcagataaaatcataacaactttgattcgtgttttgtttggattactattttttttttctttctttctattgattgttattctgctgattttaggggagaattcctctaacagaaaaagctttccatttggaaatatagctccataaacaaatcagatataataaaaatattttggtcttgggattcctggctccatttctgggagagaaagaattccaagaaattgagtgaacacatccatttcttggtggatgtaaaataagatttgggagaaaatgggtgtggaaaggattctgtcagcaatgatggatggccaagtgggaggagagtctttagtcgattccatcaagattgcagttttaccaattgctaaagttttcacagtatgcttcttgggttttctaatggcatccaagtatgtcaacattttgccagccaatgggaggaaacttcttaatggggtaagcgtaattttgctgtgcaattccctctcctttatcagttttggttatataattcatgtacaagatcgaataagcaagaatactattcttctatattgatgtaattttgagaggaacttgctgaaatgaatctttgagttacacacggaagcccataagggtagcaatgacatagtacaaaagattgttttccaaagcaaaccatgattgtcttgtcatttggcatataaatatttcttgtgctaatttttcttatggtttgcaaatgccatccaaaataaatctttaagaaacctaattttgttgctgagttattgaacttctgagataagaaagctttttttgtagttacttgaatacatttgttttgtagatttctctatttctctttaatttgtaattagttagttcagttactgactgttgttttggttgcagttggttttttcacttttgctgccgtgtttaatattttctcaacttgggcaagccgtaactttgcagaaaatgctggagtggtaagaatatataaatatatatttaataaataataatagaaatgtgtgactagtcagtcattgattagcatttatctttgtgtaggtggtttatcccagcaaatgttgttctgggttcaatatcaggctcaataataggttatattgtagccaccattgttcgtccaccataccctttctttaagcttactgttgtacaaattggaattggtaagatgcttatgatttttcatgccacaagcttgagtttgcattcttcattttaaaattcttttaatcagagaagtatgaatttggtctttagagaagcaagtagtatcattataaactgtcattttgctactttgtgcttgtgtgcgctggtttaacttggaatttaccttaaaatgtatgcagggaacattggaaatgtgccacttgttttaattgcagctttatgtagggacaagtccaatccttttggtgattcaaacacatgtagtacgtctgggactgcatatatttcatttggccagtgggtgggttttattgacttggttacaagggctcattgattattatccttattgtatgtgtaataagtcacatgtgtttctttatgtactgatgcattttctttgttcatgtgattttaggttggtgcaattatcttatatacatatgtattcagcatgttggcaccccctcctgagggttcctttgacattgacgaagcaaatctacctataaaaggcccctctaaggaagatggcagcagtcctgagcaggttccactgcttacacatgaggaggctttacaaactaattccaatgcttcaaaaggaattacggtgagaactattttcttgtatctggtcatgcttttctattgccttttagtcttgaacaattttttatattgagtttctttctttcctagaaagaaatagcttataaaagtgtttccaagttgacaaaatgatttttttcttagttagaatcaaattctcaaccttgcaaaaacaattgctgaaatccctccaagaaatctttattaaattgctggaaacaatatacgcactcgagaagcttgtctctcctattccaatctttcaagaggattggtctctccacgatagttcactcttatctaattcaagatacccttacaaaaagagccccaacttctatttattggcataatcccatctaggatcctatttgatcaagacaagtcagcgacaaactaaataaaactgcctgctagataaaagaatgaaatagccaaaaagaatacaaaaaaaaaaaaaaaaaaaaatacatagtactgtgtctacttgggaagtttatatacaaaacgtattggaggcttatcaatacctccaaaaaccttcaccttgtcctcaaggtggaaagtaggcaactgttcaatgatggtgtggaagtcttccaagtagcttcgaattcgggtagcgatttccatttgatgaggacttccattgtagatgggtctgaagccttgggacgctgctgtaagacagctcatgatagcacctgaagctccaaatctgactcgagctgtggaagaagagttggtgaagaatggctatcacaaatggctcggcagtgctgcgacacatgaaacacagggtgaatggtgaccctgttgagaaattgaagcttctaggtaacttttccaatttgttgaattgcagaatagggacaataaaatcaagctggtaatttttcattggtgcatcttgccaatgagttctggcgatacggccggagcttgaagtacaattcgttgccactagaaattcagcatggtggtgcttagggtcagctcgtttcttctttttttgttgggcacaaagcaaatgtatgcagtggtcatcaagcattgcatcgggagactccaaaaaattgtccactactgaaaccatggcaatccctcttttatgtggtaacagtagtggaggatcttgaccgtagagggctttgaaaggggagcagttaagataggactgatatagagtatcatagcaaaactcagactgtgcaagccacttgtaccattccttggggttctcataagtgaaacatcacaagtaagtctctatggatctattaagggctttagtttggccaaaaattttgcacacccgttcattcttcattgaatccccatttctcgtagtcacaccataaataatagtagaa

SEQ ID NO: 17084 - DNA, 8631 bp, Cannabis sativa
  modified_base (1681)..(1681): a, c, t, g, unknown or other
  modified_base (8253)..(8258): a, c, t, g, unknown or other
taacaatctcaatagttcaatgagaatttttaacgaccaaaaaagttcaagaaacatgatttgatacatgtcaaagttcgggggaaaaaattactaattagccataaatctgctatcatagtaagaagcattataattaaaattgtattataaaatatcatagtaaaaaaataacgaaatgaaactctcaaattttcatcaattaattaactacatttgctctttcttttaatttattaatctttttttactaattaggatttttgccctgaactttaacatgtatcaaattatgccctttgaacttttaagatcatttaaaatgccccctgaactattgagattgttgaatttaatgacttttatctaatttcattcaattttactatttcaatgattgtttatgtactaaaacatgctctccaaaatttgatatctaccaaatcatgcctctcaaactttgacatatgtactaaatcatgccccttgaattttcatccatattagacttttttactaaaattagaaaaaagtccttaaacgtgtgttatttttagaattaataaatggatagttattttgggtactgacatacttacaaaaattacgacctcagagattattaccgctgatttttaaagttagggacttatctacaccaaacataagtttattcgtaaatgtctcttaataaattgatgagaagatggattttatttacttcaaacattggcaatatttatgcccatttctcttttacatttaacattattggtacaaaattgaagttgaacacaacttttcaccctcagacggatagtgtaacactctactggtttacgtgtaatattgtgattttaacttaattgtgcagctcgttgctaatcaacgaatttttaagaaaatcatgattatttaaaattttatttaattacaaataaataccaaaataataacatatatataatcaggatcccatttacaaaatatttacaaaagtttcatagtgcatagtacaaaaattatcacctagcgactaaacaaaatacactcagctgttctaaagaccgtacgctccaagtctaatcgcccgacatgtacaatattcatccgctcgctctcacggctgctccacccaagtcttgcccttacctacacatgcaatcaataactgtgagttgacagactcagtaagaaaagtataatcataaacataaatatatattcagactgcaaccaggcgcccatgcacctaatcacaatctacagtcaggaacgttctcgacaaagtatgactaactacgaatctagtctatactcagtactctagtcgtactgatgtggtagcagttagttcatactatctgatagcctagcatatatctgttggcatctctatgcaactctatgtacacctcactgatgctctgatatgcgaatttgatggctatagatttgcctagctaacatatatttgttggtatctcggtgaaattctatgtacacctcactgataccctgatatatgttattctgacgacaactaacatgcatacataaatgcaactattatactaatcttacctcatttccaaattcagatttgccagtcaacctgaatagaactgtcgctcgacgatttatgggctcctaaatcacaatattcataaaactgatgagngacacgctaaatcacttttcgggacttaaacttgaaactaaaggttttcttatcgatggataacatgacaataccctaaatatcgcaacaacaggaaaaactagggttcccaaaactgtcccaactggcagaccggtttcccaaccagaagtacgattcagtggggttcctggagaccaactggaatttcggttcctacaggtacgtctcactaaatcggtcgacctgttcagtccaggaaatacccaaaaccacctacacacctcaactcgatcccaaacttacaataactttcagaacacctatttgtaccataataaacataattcatacaataaaaccaaccaacaatatctatatcaaaatttaccattaaagagcaaagcttgagttcataaactcaaaccttgctcaatcaccaccacaaccaacaaaaataacttagaacagcttaaataaccttaatataacatcaaaacacaaaatcaagtaactcttaaaaccacagaaccctaaatcacaaaaacatgcaatagaacctatcttgaacttaggaaaacaaaggaaagagagctaagggatttcccttaagttgatacactaaaaattcagctaacaatctctgaattgaagttgaaaaagaccaaaattcttgctgccttcaagagggtgagagagagagagctaaggagagagagctaaagagagagaaagtgagttatgtgatttctaattttggataaaatgagacattaacttaatgttgagtttatctaactagaataggagaataataatcagatttacttaacataaataactcactaagggacaaaaacccaaaatagcaaaaagactattttgcccttgcctaaaccataaggcatccttaccacctaggggtaatttggtcatttccaaaatcttgagtatttttgatattcttaatgtctaactatattgccccgttattatcaaaatactaaaatgtgattttattggccaaacgtcccgttccaatgttgccaagcagaaaacatgaaaaatgtaaattttcatatatagcataaataatacaccctaatttcaaataaatttctacacattcataaatcataattaataatctagttcataattaacaagcggtctttacagatagaaagtctgagaggacaatacaaatactagaagattttattgcgaacctatgttatggatggcttcctacaagatgctatatggtaagaaatgtcgttccccaattcactaggacaagaccgggaaaggaagtatttaggtcccaagttagtttagaggactaatgggacaatagacaagatcaaggctcggatgcttgctttgcaaagcaggcaaaaactttattctgatcctaagcgtaaagacattgaatttcaagtgagagaacatgttttcctgcaagttcatcaatgaagggtgtaaagcactttgggaagaagggcaagttaagccctaggttcataaggttgggcgggtagcatatcagctagccttaccaccaacattatcagctgtacataaagtatttcatattttgaagttgagaaaatatgtgtttgacctgactcatgtcttgagttatgaagccctataactacagtcatatttgttatatgaggaacaattagtttaaatcctcgataggaaggaaaaggttcttcagaataagaccatagctttggtcaaagtactctagaggaatagcaatgtggaggaagccacctaagagttagagtctagcatgagggttcaatatccaaaaatttttaagttagattttaaggacaaaatccttttaacgggaggataattgtaatgaccgcatgattagattatgaattagtaggacaattaacattaattattgataattatgattatgcatgatatttgttttgggtctcatttttagaaaatgagcattagtattataatttcttaattttggatattttattaaactctattatttatgctaaatgtgaaattcacaatttttataatttttgctcagtgacgatggaaaatacgacggatggtcgctagagtcacatagattattagtttagacctttgttgaaggggacaattatatattgatatttggagtatcaagattaggcgggattatagttttggaacattttaccaccaaacctataagttgcttaagtgtgaagtaaggggcaaaattagaattttgccatttagtaagactttatcttttagtggattttagtaaaattttatttcagattattgctttaaggataagattaaattcttttatttaattaatgagtaaaaaagttaaattagaagaaaaaaaaactaatttcttatccctttctctctctttctcttgacctctctagaaaccacaccaaactagacttagtttaatctcgttatgctctcctagcttcatttgaagaggaattggagtaccaagagccgaggttaggctctagctccaatcttttaagtttggaaagttttcttttgagtcttagctttcaaatttgtgaattaggggctgtttgaatatggttttgtttgaggatgttttctacaacttagtagtattgtttaatgcttgttcaagaactcaaacttgagtcaacaatggtgatttttgaattcctgcatattttaaggttttgttgtttggaactggttcattatgttgttattaggtgatctagagcttgtgttaaagtttggggtcgatttgggattgttttaaggctttgttgttttcttcaacaaaaaatggcagggcttttctatggaaacggtctaccatttttacaagcagagaacccaaaaaaatagcttgccatttttacaaaaacggcctgccgtttttcaaacagttttccctgaaagttatttttctcgtgttttctcgatatttaggcattgccatactatttatcgatcgaaaaacttttagttttgaattaagaatcccataaaggtcttaaaaagttgtttacatggtttacgtgattgtgacattgggcctccgttcaatgcataattttttattcaggtcgactgacacacttgaattcaaaaataagataagattagcatagaatatatatgtacatgtgtatgtgtattatatggatgctatttaagtgattcatatgttaccaacactagtacggccgtggaactgaatgcattgatatattatatgatgttgaaagggtacaattcgatgttactaacactactgacactagtacaatagcgatttttagtgcatgtggtacaaagatcgtacttttattaaggatgttcttaatcatctaataaaccttatggatgggtgtatgggctcttgaatacaagtcgatattatattatgtgttgtatgcttttcttactaagtttgtcgactcacaaatactgtttttgtgtgtaggtaatggaaaggctaaggctgagcagcagtgattctagagctcaaggatgattgtacatgtctaaatagtttgacctagagagttcggtctcgagacgtcttgggctttattttgtagttgttgtgtcatattttgtaaaagtgtattttaaatatatttataaattttagaagaggaatcccaactttttgtatgaatatatatgtatatttataaaagtttaaacaaaaaatttaaatttgacacgtttttaagaaactctttggttagcaaatgtgagcacaataattagaaagtcactattgtatgcctaaacagtaaggtgttacaataagagatttagacaagtggggtgttctaaaggacttactagtgatttgaatttgaagaccaacaccatccccaacatgaatttgttcatatctaatatattcttgcctttgttgcagattattctcaaaggagatacaatgatttgtagcacccaaattcagatgccaagcaggattaacaacaatgtttccaatagcaatcatagcctacatagaagtgggactttatcgacattatcaacaccaatccctaggaattctatttcgaaccgcttataatattttgaaaaaacatgactaactcgaccacaaatttggcaagttggacgagtagtaaattggcctgggaatggagcactattcagagtattggtgttgatggtaggcctgggacctataggataaagattccaagtctgttgacgagaagagcctagaataaatgagctacgatttggatggagcaggagtaaatcctgaagattaagtatcaaatgaaccatatctggatatgtaagcaccacgattatcagcaaaattgacaaagggatcagaatcaagatcgtggctatgcttctaaagtcaatgctcttgagcaagaagtaactattcaatttccacaatagtatatttctcatggcgagagttgattgagatgataaaaatgtcataatcttgagggagaccattaaagatggtagcaacatgctctttagcagagagatgtggctactgaaccgaacttatcaacaagtttcttaatgcagatgagataatcattattagtcatcgatcatataacatttaatcttgtttaagcaaaagatggtattcaggatgaatcatactagattgtgcatcacgcttagagagaaacttcattggcggagtgtagctggaagagatgtaattagagagatcataatcacgaatagcagctaacatctgaggacgccaaagaagaaagttgttgttgtcgaacttggcagagcatttgtgaaaaattaatagagagatctgcaccagtcgttggagtagagccagccatggacgtagtagaagcaaaactcatgattgattatcagagacaaacgacaagagaaaaaaaatttggaaaaaaagaaaaagagcaacaattactttgatatcatgttaaaaaaggattaaaagtaaaaaatttaatctatgttattcaataataaaaggattataaaatatataaatagttaggatcacttacaacttacaatcatagttgtatttaactagtaatagagagagaaattgtgttatgggaggtaaattgtgaaaaaattagtttagaagaaactaattttaatacttaatatataatttttttttgttgcattaatttattatacataaatatataaaaacaaaaatttaatggaggactacaaccccatagtctccatgtgcctccgtcattgtacttaattatacaaaaaaataaaaataaataaataactaactgaaacgtgtcacagtataaatttaacttaaaaatatattttgaacataattttagtcaaattcactttcagtattacataatatattaataaaaacagattttaatattagctcgaaaaaaaaaacagattttaatattaattttacaaaaagtaatattaacaacgattttagaaaaaaccatacaaaccatcgtacgatcacatcaatagcatcttaagaagtattatacaaacaaactatattacaaattaatgtgtcttttgttttcatgtaataaaagtcggatagaactaagctcattaattatgaattatttcacattggaataattatccatattattggaaataactatcattatgtccgcctgggaatttattgaaataaaccccaaaccacaaaaaaaactattatatataagcattaataaaagtatcattttttttcacacccaaatgattttaatggagagcttcacacaaaattatcaaattaatgaaacaaaattattgaaaataaaaaaaatggaagagcttattaaggtaaaagaagaacttaaagaagccaaagaaaaagccacgcaatcatggctcgactcacgtcccttaatcgacgagctcgaacggctcaagcaagtcctcgcacgtgctgaaaaacgacacaaaaacatgtactccaacgaccaaaacgacactctagtcttcgacctccaatcacagctggagtccatcaaccagagaataaagtcaaagaagaaagaagaggtcaacgccaccatgatggtcaacgaaatgaagtactgtagggacttggatcggctacgtgatgagatggaggagctcaagctcagcacggccaagaaacgacaatcaaagctgaagctgaaacgagcttcgcggctcaggaagcaaagacttcgctcgttacacctggcgcttgcggcttcacgggaagaagccgaggcttacggtgcatccgcagccgaaacgactcagtatatggatttatataactcggctgtcagtgtcgttcggctcagccacgaagagtatcaaggcttgcgaaagagatttgaggagagcgactctattgccacgtggcgtgtttctgttgcggaaggagagaagctggcggctgagtcgaggcgtgacttggctttggctaagttgaaagaagtgaaagctgggaaattaagattgatgatgagagagagaaataatgttgatattaatccaaggcgtgatgataataataataataatannnnnnataataataataataatagggtttcttccatggcagccattgccaaagatgaccgaagacctgtacgactgagaagatcgaaggccaaaaacaagaagaaagtggttcatgccaataaaaagaaaaaatcatccatttttctacaaattaaattgtgttttgtacgaaacatatttaaaaaattgtttggataaattttgtgaatattttcatatttgtaacattttatcaggtatatataatagcaaaaaaaaaaaaaaaatacatatgctaaaaggtgatctaataattaatttggcatatagtataatttttttaattaaatttgacataatatttttttttttttgacaaagtgattaaaatcactcat

SEQ ID NO: 17085 - DNA, 3644 bp, Cannabis sativa
ttaaattctgttattatattttctgcaactcattaattcatttctggtgtgttgattattgtttgtttgctggctgaggttgttgtctatcacaacaaatcttgttaaagctatatattaaagaaaaagaatatcaagttccaaagtaaaatcacttcatgccttctgttttggactcgagattttgcccaggtggattgctttgaaagttagctgttggcatagttctcattttcttttgaggcctagaacttggcattgaagatttttcaactgaatcatcaccaatattagacccaaccaaactgataggaacagagggatagtctatctcaaataaacttaaatcatatatggcaacattaaattcagaattcccttcatatttaaagtttataacaaagccactctttatggcataatgctttgcaaaagttgaccaacccttctctaaccaaatatggttgtcttcttttgccaactccattttccatttcgaaccacatggaggcttaaccaacacccaatcaaatagagcttcaccatgtttccttgtaaatatgtcaggaatgagctgcaaaataaaaagaatatgcctcagaggctcagactaagtatgtaaataaatctatgattttccaaattcaacttagtttataataagggatacccacacatgagcatggggtgttaagcaatatcacaaacaagtacgttcttaggtagcaagcaaccctttttctttttctttttttgaaaggggaagtaaccattttttctaaaaagaataaaaggcatgagaaagaacgggtccagatactaaaacccttttgaccaataacacaaacaagatacgttcttaggtaacaagtaacccttttcccagaaaagaacaaaaggcatgagatgagaccttctgtacataaaaaagatatacatttaacatgtggttacttggggtctgatcattagaggctaaaatgtgagaatcccaaacagaaaaattaaatctttagtgggaaaaaacacaaaaatatagttatagttatagatgatccttacaagcttgctgttttgaagagtctcttcatcgactatcttgagaaaatgaccggcaccaagggttccacgaaacatgttacagcctacaatgctatttggttaaaggttagatatattaatatatttatgtactttagaatttagatcatgaaccagagacaaatgcacagcgaaaaacccaagagagagaaagagtaaatcccaaagtttcttttcttttttagagagcttaaagcttttatagaagataataataataataataataataataataataatggttggagaaatgctagaagcgaccagtggtgacaaacaagcactttcttacatctcaatatcgctactggtctaattaagtatcgggtcccacatttaaaaaaaaaaaaaaatatcgggtctcatatagtttaatataatagcttttaaggagtatcgctagcaaatcccaagacgacacattttaagaacgctaagcaccactgatgcccaataacaatgttctaatggttgagttgaatcacattgttcgatgaagtgatcttaagtttttttttcttttcttcgagtctttagattaaaaaataaaacaagaagtaaatattttggtattggtattcgccgtgcaagcagtgaactaaattttatgtctagtgcagtgttaaatttaaagtttataataaagtttgttcatttttttttgccaaatttaacctaatatttacatcttgtattagagatggtctaatagtttaggattctaggtttaagtgataaattgcttttaagagtattgtgatgggtatcattaattgtaggggtgtccataaatcgatccaatctaataacaaccgaccgccaaatattagatatttaattgtgatcggatcagatcggatgttatttttaaatatccaacatggatcggatcggatgttggatgaggtatccaaaaatcgaatacatccaacatccaatcgaactaattagtatttttatttaattttgatgagtaattaaattttatattattataagtaaaatatatatataaaaaaataaacattaaaattttactcttttttttagattggatggttccaatccaatacaaactggacctaacatgttgaatggatccgatctgatccaaaaaatattaagtctaaaatattagatagacccaaattaaactaatagatatatacataatacagataaaaccaatccaatccgacatctaatggatgttagatcgataggatgactgaaattaattggatcggcttggatagtaaactataacatccaatatataattggatcagacttgggtaggcctaaaaatattagatgtggtccaatgaacacccttagttaattgttaagaagaatgttatgcctatattccaatcagcaattaaaagttgacacgtttatcacaactggaatatgaaccagctcaagttacatattattaaatacacttaattgactcgcctcggggagtatagttaatagaaatactcaaactcgcagctatatagacaatagcaaaacgtgagtaataactattgactgatgagatcagcgagataaataggtctatcttgggataaacataatatacaataagattgtttagaacaggtaagtatgtgtttgcagctcattaacccccatacttatgagtatgtgtttgcagttcattgatccatatactcgtgagtatgtttaaggaataaaaacaacttcaacatttactcaccttactcttaacatgttgaagtaatcatctcgcttatacctcagtcaaacagttaaggaaggctacgaaatgcatcataactcaacacttagtattttttccacaaagacgtttaagaaaaatatcacttaaatggcgagaacaattgagcatagtcagcataaccgtctatagatagagacaaatagcagttaaatagttatttataattattctatgagcatgaaaatgaaacgtgggaaacatccacgttttataagcagctacgaatgattatatcccaaaggaataagcgtcatcctagactcctataaatagagacagggcccaaggaacgaaggacgaccaatcttaagaaaataaataatattattattatttattcatgaaaacagtattattgtattttgtatacaaacttataaatcctgaataagattgactcgtagactttgaagatttaacttcaaaatcacataaaagcccttgttatttattgctatccctattattttaattctgcgttaatttattacacaaaaagctaattatttaggtgccgtttggtaacacttttgttttctaatttttaatcacaaaatgaaagtaaatttttgtttttaaaaaacaaaaatacgttctgtaactacttttgttgtttaattttaaaaacagaaaacaaaaatatcaactgtaaagttcatttttatgttcattttttgattttatttacgtcgggtctaggtccgaggtcggattcgggttcaggtcagaggctgggtttagtgccagggccgtggggagatttggg

SEQ ID NO: 17086 - DNA, 4180 bp, Cannabis sativa
attgccttgaataatcatgattaaggcatcatatttacatttttaacaactaaattagatactgaattaactgacataaattcagatatcaaaggttataatatgagctcttacttccacagtggagttaggttgatatagaaatgattgtgatgttcagtccctgcgacgtggcaacttgtaacgttttggataaagagatgtttttctttggcaggtttgcattggtggaaaatcaatcaaaaagtgcataagtatatatgcctatgtggaaattattctagaaagagttctactcttgtcaaatattaccaaactgccaaatgaatatgattttgtctcaatattttgttaatatttgctctattcttagtgaactaaatttatattatttctctctatcaaaaaagtatgtatattatttcagtaattatttctatgtaagatgttaacaaaaaaaattatccctatttttcaagttggactctaaatggagcattattgtcagaataatttttcagaagataaatatttatgtttttattttttttataaagtgatcagaatcgtgataaaattcatgatgaatacattaacaatgatgcaataatctttttgaaccagaatagttcattcattaactgacatacgcatttgtcatcccatagattacaatattatcattacaagctatatgaaacgaaaccgcttacacaaatttagacaataaaactattgtatcatcaaaaaatgcatctatcttatattctcattcatatacacattctcattagtaacaactgtcaatactactagggaattcgaataatttgtttgaatcgaaatactatatgcatgaactcaattaaatttatttagaagagttaaattttcagcttataaaactgaaatgtcacttaaaacaaagcaaaacagaaagcttcacaaaaaatttaaaattagaaagcctacctcaattcatcttaatgtaacattaaaattaaaacaataatctcaattattaattaagttcctaagtaaaaggtttaataaactaaaaaaaaatttgatgaccatgtaaaaaatttcattaaaataatctcaagtttgtgcctttcaatgaaattattattttttttttcttttcttaaaaaataaataaataaataaactgaaaaaaattaaatagtaaagtgatgatggcacatgtggtaattaaaacaacaagcgggggtagtagaggtaattatcaccgatggtcactgaaaagaagagaaaaaaataaaatgagaaaatttgagtagagagacagagtgtttaaggtgaacctctatctctttatcccaacaaaatcacaacgaaagaaaaaggaagaagaagaagaagaagcaatgggctttccaatggggagctctagctcttgctttatacagccttctctctcctaccctctttcctcctcttcttcttcttcttcacgatccatttttttctactcttcttccgcaaaaaatgctgagcccaggagaaggggctctgtcccaatggcctccatgaaccaagacaagtcaacttatgataggtctcccttgcaacggagggccattctctttgtgggtatttcagttcttcccttgttacaactcagggccagagctcttgacggtttgcccacaagtaagtagattttttctctctatatatttgtatgtataggctcgatatgggaaattgacaagtttgttgaaagtttctttctttgagtattttcgggtgattatgaatctttggtgggtttagaagagaagatgttttgaaccatttttttttcttcaattttttgtattgtggcagttcagttgtgctatcaacttgatcttattttaatctgaattttattgtaatttagggaactgacatataggttaagatttgacaaaggctataataattgactcttattggttgtaataatgattatagcaattgactttctttttgatgagaacataataaataggtttggaagattgcctagaaccttttagattgaattataactgttgttagttagttatttatgactaacctatgcattcatttatttaaaatcttacagaagaaactgaggtaaagacatctgaggggaaccaaatagcagaggtttggatctggactaggttcacaatatgtcccaatcagtaattcttgttgagtttatacttgtaagaaaatatccttaattggttaatttgtattgacaacaggcaattcaaaaggactcttcaccaaatgcatttgcttctctattgaatggtattggaatactgagttctggtgttcttggtgctctctatgcctcagctcagaaagaaaaaacagaaaataatgcaacagtggaagctgtgagtctattgaaaaatacacaaggaagattaaaatacttgtatttctttatttatttgtttctgagcaaaatacttgttttgttctaaatgtgtagatgaagaccaaaataaatcagaaggaatctgctatcatcacattagagaagaattttgaatcaaagctactcactgaacagaaagagagaactgagcaacttaaaaaggcgaaagaagaacagatgtctcttcaagaccaactaaaatcggcgaacagtgtggttgcaggattgggagtagagctgaataatgagaagaaatttgtagaggagcttaaaattcagataaacagtcttgaaactgatctttctaaagtgacccaagataagaagatcattgaagaagatttgaagaagaagtttgagctgattgaagtcctggaaggaaaaataaatttactgaacaatgagttgaaggaaaaagaaggtaatgttcaaaatctcagatcttctcttgctgataaggagttagagttgagcaacttgaaaactaccaatgggaaaataaacgatgaactagctaatgcacgttcggaaatccaacatctgaaggatgaaattgtgaaaaatcaaaatgaaatagagttaaagaactctgttgctgaggaattgaatgcaactgttagttctttaagtactgagaagggtgttcttgagaaaaaactcgatgctatcgagaaggaatacaacgatttaaagttatcatcagaaaagaaggcagccttggatgccaaggttttgggagaaaaagaagaagagcttcagctggtaaaggagaagcttgcacttgctacaagtgaggttagtcaaaaccaggaaataattgctaaattgaccgaagagaatgaaaagttgaagaaaacgttggatgaagaatcaaacaaggcaaataatctgaaacaagaactccaagccacgcacgaaaatctagcaaaatcaagagatgaggcgtctgatctggaaaaacagttaatgaagtcgaacaccttgtgcaaggaacttgaagctgaggtttctagagttcaggctgagtttgccaaagttagagattcattgcaaaggagtcttgatgaggctaaacagagtggtgtggagttagccggtgagctaacttcagcgaaggaacttatgaagaagacaaaagaggagctacataatgtgtctcttgaacttgcagctcttgttgaagatcgtaatagcctgcagcaagaactggttgatgtctacaaaaaggccgaaactgctgccagtgatttaaaattagagcaaaaaacagtagccactttgaacaaagaactacaaggcatggagaagcaaatggcaaaggataaggactctcgaaaatctcttgaaacagacttggaagaggctatcaaatcacttgatgagatgaaccgaaatgcaatgacactttcttgtgatttagagagggctaactcccgaatttctgagctcgaagatgagaaacaggtgctctacaagaccctaacagaacaaaagaacgcggccaaagaggcccgagaaaacatggaagatgcccataacatggttatgagacttgggagtgaaagggagagtttggataagaaagcaaagaaacttgaagaggatctatcttcagccaagggtgaaatactgaggttaaggagtcaaataaattcatcaaaggctgttgtaaataacaagaaagctgtaactgaaaacgatggagctgaagaaaacaaagacaaggacaaa

SEQ ID NO: 17087 - DNA, 4406 bp, Cannabis sativa
ttcatctaaaatggccacttctaatataaaaattaaagaaatggaccgatttgttaattgccaaacaaaattatagaagagaggagaaagagagagaatttttttgtaataaaaagggtaagaattgagacccattttggtaatttgaaatgcacaactgcctcatttaaaaccccaacgttccctcctctcagtttcagtattcatcatcgcttctcaaacagaattctccaaacaatgtcgtcgacggcgaaaaagttcccgccgattacaaagtgcaatgagtcgacgacgacttcctacggttcgatcgcagcagatctcgatggaacgcttctcatctccagaagctccatcccttacttcatgctcgtagccgttgaagctggcagtctactccgtggcttcatccttctcctctctctacctctcgtcatcttcgcctaccttttagtttcagaagccttgggaatccaaatcctcatctttatttctttcgccggcctcaagatccgagatattgagctcgtctcacgcgccgtcttgccaaggttcgtactcgatcggccatttcgaatccctaattaagtactcgattgattgttaatgataacatttgtggtttatttatttttatttagattttacgcggcggatgtgagatcggagagcttcgatgtgttcgacaagtgtgaaagaaaggttgtcgtgacagccaacccgacgttgatggtggagccgttcgtgaaggaatttcttggcgggaccaaggttttgggaacggagatcgcggtgaatccaaagaccaagaaggccaccggtttcgtcaaaagtcccggcgttttggtcgggaaatggaagaagattgccattgagaaagagtttggtggcgactcgccggatatcggtattggggaccgggagtctgatcacgatttcatgtctcagtgcaaggtttttctctctctcaatcattattaattcttattattactcttaaaaaccatttcatataatgataattaatttaattgaagattaattataaaatgtacatatatcctccaataatgcacgtccatgatatgatgtcatgattattgatcaataataattttataattcttactcacagtcttgctagttaattaactttggtatggaacatggaagccacattataaattcaagtgttgctctttttggtaacgaaaactataacttttttgctgatcggttatagttttgatgggcgagattttcttggtcgatcgagtttctgtttttacttgtattattagtcatattttggagtgaaaagtagaagaaaaattaatatgtgataatgtgagaatgggtttgacgtaatgaaaagtaggagaaaaattaaaagctagtcatattatgaaattatgaagtgcggcttgcgggccccaattgggacccattgccttaaccattccccaactgcattccagctaagacgattaggtggtccattcttaaattatcatttcatgtcgcatttaatatacttcaatgaaagtcagttttagggcgtgtaatgtttataatagtaatgtttatattcatacttttgtaggctattaagatattcacatcaaaaaaagatagtttgaaaaattacgtaattacgtcatacccttatatataccattgaatttgaaacttatatcatttacaataattataataaacacaaacatttttttttccttttgatatatatatagtcataacatataccataggtagtttgaagtatcttgaaacaaaaagtaggataattatgagaaggtgaccaaaggataacttgtggtaatgaactaatatataattcgtcgtgagaagtgtggtcacacaggcacagtacacaaattaagttactttgtgcaatttcctttctgatctattattggcaattaaaaaaaaagatacatttaagcgtcacaagtacaatttactttcgagaaatagttatctctgattaatattatgaccgtgcaaattgcaatagctattcaaaacctttgatttttttttctagatgaacatatataagacaaagctataaataaataaaattcaaataattttggtgtgatgttctgttaagtcgtggataattattattggtagtagtacattagtactcttattagtctcttaaacgattaatgtctttatcaacttgtgaagttgtgagtgactgaggtgaaaaaactaaattatttaccattaggcacgcactcactacactaaaaattggatttactaacatttgaaaattttcagtaatattaatggttttaataacatttgtgaaaaatgtaagatatattcatgtgagtaaagatgcaaaaatgtcattatgttcttttctagtgtcaattggaaaaacgtcactaattaaaaatacttaaatattaattttataataaaatcttatatatttagaacatatgtgtaagacactaataaggtgctaattaaggtgatgttttataattgattaatgacttactatactctttattaaaatataataaatgagatgatattaattgcgataacaatattacacctcataccttttaacatttctaatatatttaacatatatgaatactacacaagcgaacttactttcgctataaatcattagctagcttaattaacgtatagcatttaatactatcaaaacagcataatatatattatattaattgcatgcatgcatgactttattttaaagaaagaaacatatatcataaatattcattaattctatctatatatgattggccaagcaggaaggttacatggtgcccccaagcaaaacagccactccagtcgaactcgatcgccttaagaacaagataatcttccacgatggccgccttgtccaacgcccggacatactcaatgccatcattacctacctctggctacccttcggtttcatcctctgtatccttcgtgtctacatcaacctcccccttcccgagcgcatagttccctacacctacgccatgctaggcatcaagctcaagatccgtggaaatcgacctccaccgcagagccccggaattctctacgtttgcaaccaccgtaccgccctggaccccatcatttgcgctatcgccttgggccgcaaagtgtccaccgtcacctacagtgtcagcaggctttcgcgcttcctctcgcccatccccgctattgcgctcacacgggaccgcgtggacgacgcgcgccgtatctcggcgctgctccagaagggagatttagtggtatgcccggagggcaccacgtgtcgagaaccttacttgctgcgattcagtgctttgtttgcagagatgagcgataagatcgtgcccgttgcagtgaattgtaagcagagcatgttctatggtacgactgtgagaggggtgaagttctgggacccatacttcttcttcatgaaccccaggcccacctacgagatcacgttccttgatcaattgccggagagtatgacgtgtaaggccggagggaaatcgtcgatcgaggtggccaatcacgtgcagaaggtgctgggtgatactctggggttcgagtgcactggattgacgcggaaggataagtattggttgcttggggataatgatggcaaggtcgagtctatgtataataataagaagtgaactagtgaattgattttgggtttgggtttactattttgttggaatcctgccatagtttattattattatctctatttcattttatttttaatattataacaataacacaaatagctagtgcctagttgtattttatatctttctttggtaatgacaatgattatgtgataagcattgaatttcttctctttttttgatctagctatatatttatgctctcttttttccttgtttagtttatatccatgaacgatgtaccatagcagatcgattgggtttcattcaaagtgggcgttttgaatttcctttttcttatattgtagaagtaaaaaatactatattacttatttatatgcaaattgaaaagtgagccttttttttttcgatgcaagaaagtgagcactttcagtcatcttattttcttacttaggttaatgatcattgcagcttctacggaaacggaatatcactgcacagtgagcattttatgttgattttatttttaggctttgccaacctagcacttaccacaataatatatttaatttgtttttttttttctgccttgtttaatttgattttattagccttcttttcttctcctgtcattagataacgtaataattttttttttattagagtttcacgtgttatataaattaacaattaacccaagatctatttgtatataacatagaacac

SEQ ID NO: 17088 - DNA, 8068 bp, Cannabis sativa
tttttttttcaaaaaattttagtttgtttaaattatttattgaattttcaataattttaatttgtttttaagttaatgtttataaataaaataaaattatttttttaaagaataatttagatttttttaagtaaacttaattttttttaattaatttaatatttttatcaggttttttaataattttattaatttctttttagaatattataatttttaaaattattttttttaataaaaaggggcaaaatattgtattagtcaaagttcaagggataaaaatattaaattttaacggtaaaaaataaaatctaacaggagagacataattatgtaacttttttattttagggagcaggtagtgttaaaaatttagaaaacaaaaatattaattattcttttttagtgtttattttgtttatttatagtaaaaataaaatataaatttgcaataatatttaattactcattattttaattttcgtcccactaatatattatttgtttatgtgcaattaaaatatcattgtcccttcaagcttttagagaaatgatagcaagtttctataacaaattgcatgttgctaatgatgacaatagattacagtctattacaaagattttacaactatgattgcttttactattagaattctcgctcaaatgatttccctaatctctgttgctcatggattagttgtacatgctcttcgaatgaataaataacttgtttagctagatatgaatatccttattttttgttgggtgtatagtattattttgattatcctagtaaaaataatattcatttaaacataagatgtatagtattcataactagcctctaggacgttattatatttgtaatgaaattattcattgcaaaaaaaaaattaattttcttaaaatatttttaatttcttttcaagaaaaattaaatataattttttttttaactagaatgattaaatatataattatattattataattaattttttaaacaaaaaaaaaaaaacacatcaaattggtgttaagcgagttatgtaagccatgtgcctaaactctttctatatgtatacttgattgagtagttacacgttgctaaaacaggaagtctgttattggacaattattcattaaaagacaaacaaaaataaataaataacacataactagacatttcagactttaattattcattttgtctcattcaataacacacaaagagtccaacaaacaaaaaaaaaaatcactgaaagtaaaactaaaacttggaaatcaaactatgagaaaataaaatttcaaagaactgacaactagagattacacaaaaattttcctattcctctttaaaaacaaaaaataaaaactatccagaaactatgttaatcacaagcttctttctctttctctaaccaacataataatcaattggcattttagattatgaaatttatctctgctactattaattttacaagaaactggagtgggatttaatcaactacaaagctttattacctccagtaaatgaattgaggcctcctctatttgtttaccatcatcataatcatcgtcgataatcaacaaatgttgtttatttttctaactgaatcccgctaagacggctgtaattgttggcgccgtagcatttcttgtagctgaaccacttgttgttgctgttctggcggtaatgaaagcaactgctcgggcgtgatgttcagaacttgttgtaataaggcagcctcttcccctgatggaagctgctgcggctaaagaagacgaagaaaaacaaaagttatgatgtcagatctgtttcggtacaaaatccatctacatttgtcatcaaacaccaacgataaataatgttattgttatgttctatcccattttgaaaatgaatgccaatgaaactcttaagacactataagcaaaatcagaattccaaatgggatattagagagaaaaaacaataacagaacaacacattatttaatggtgttttgagacccatcaaattcacagcacagaaaagtagaacaaaacgcgggatgactaaattagtgacggactaaaaggagagattacctgagatatttgtttccctaagtgctgagcatcgtctgaaataggaacagcatttgcaagtattgaagcagctgctgaaacttgggatggtgtagatccattgacatttttattcgaattcaagtttgtaaatggtacagtcccatcatctagtttcctaatttttgaagggtggtttatcaagtccattggctcggaaggcatactccttttttccactatccccagaggcaaattttgattaatattacctctgcgggcccaagttgcatcggcggaaacttgagcagacctatcaacattactaatcggctgtgaaatacctgatgatattgagggtccaggctgttaacataaaggaagtcagattacacttacattagttataattaaaataactagaaaattttaaccacccaagaactgaaaggccgtagctccttgccatcactactagtgtgccgtatttgtttagccaataccaaatataattctcctcactataaacaaaatactagataacaccgagaatataaaaaacaatggaagcagactcagctcaactagctctcgacattctaccaaacaatgcaaataggtccttctcccgttgccacccacaaagcccgccaaaatgaaaaatgaaaatgcaactagacaatagtttgaagataaagtagcttccaacgaaataaattaatcatttcattatttacatgcaaataataaggaaaagtagcaaaataaagcacctgatagcctccatccggtaatgattgacgtggtagaagcgatggctgtatgttagcaattgactgaaccatttgaatattctgccccaaatttgaagttacaacttgtcctggatttttaagagaaggccgctgcatctgtggattcaaagaggagcttgtaacctgaattgttggtcgaatagaaagactacttgaagagcggggttgaagaggaggaaaaggtgaaactaatgattgcccaggcaatacgacctgttgaaaagcctgctcgtttgtattctggggaagctggactcgatgctgtataggaagttgtggaggtccagaaaactggctatgaattgaagtttgaagccctgcggaaacttgaccttgaactttaggcatcaaattagagtgcatattattcatcgctatagggggtaacagcgagtgaggttgaacggctggtagttgaccagcctggctatcttgaaaaggtgtctgcgaaacttgcctgagatttggtgcctgcaactgcaaatttaaaatgaaacatcatttcttacatacttacagttaatgactgaacatgctaagaaaataatttagggcttgaaacaaaccatttgtgtcgtcaccattcctaggatgatctgggcctgcaaagaaagaaaatgatttattttttaagtttgtacattgtgaataatagacataacaagaaaaaacagcttgaatctgcaaaatcattttcatataactaacatcaccatgacactttatcaagaaatcattaataattaattaacaaaaaaggaaacagctacagccccaagtgtaaattgttatcgtttaacatagattaatgaaatgggagcaataaatatattcagagtatacctttggaggggaacttttggaaattaaatttcaatttccttgacacccaagccattgctaatcattcgttctataattcctaaatcatactactaacaaactctcctcaaagaaaaaaaataactaaaaaggaagaacaaacaaccataaccataaggactttaaagtgagagttttatcaaagagtgagacgaaacaatatcttattaaccatcctattagacaagaaagtaatcaattcattagaaaacaaaaaacaagtacctggaatagagcttttgccagctgtggtcttgcaatcaacagctgatgagctaattccttgttttgtgtagccattaactgccaagagaacaaaaacatgagcaattttttctttaggaaaaaaaaacagagattagacattagagattaagactttgctcagctgccaaccttcatatcagatataatttcatacagctgactccttgacattttagccaggtgaagacttaaggggtcattagccaatgccaactggccttgtgaaccacctagcactcccgccataacagatgcagcggatatagctaaatggagaccaattggttgatgttgaacagagtccccttgaattgagggacccccgactggtttcggaagatcttttatttatccataagaaaaaaacatagcattgtttcagggtattggtaacacaataactcaaatcaataacagaaaaggaaaaaaaaagataaacatataaaactaaccggcactaggagccagtccaggtcctccacgaccctgcagtgaaaaacattggttcaagtttacaacaagacaacatttaaacaaatctaaaaagtacagtatctgtagcattcaagattaagttaggcacaaaagagattaatcaaatgtggtatatcatgtagattgtccagatataggagcaggagtagcaagcaagtgacatcaagaatttgaaggcaaagaagacagagtttgcagctaggacagttcacacttcacctgttctcgggttctgtcagtgcctttgtcgttttcagcaaaatcaactcgcaactgacggccgttgatctcataaccctgaagattacgtcgagcactcaaagctgtctcttcatccttgtactcacaaaacccataacccttcggctttccagtctctctatcaataactaatctgaatcaaaaggagacaaaggaaaaattcagacaaagtaagaccctcaaatctatgggtttgaaactagtacccagattggttggacttctaaaagatacttttggactttagaagctccgaaagccttactattgctggttgggtagctatgtgagtttcagcttttagttgtaaaaagctctttaacgctttagtagctttatcaggaatgaaccccagccaaacaaggtcttaaacttgatcatataagaaaaactattttgaaacattcaatggaaatcaataaacaaacaaaagaactcccaattcccaatctcaatttccttaattcatataaacaagtgaaattttcgtggcaattatggttcaaataaaacataaaatgctaaacctatagtagctataatcaaacaattcaaaacctagggttctcgaagcatagtttgagtactgaaaaacacacctgaaagacacaacaggtccaacctcctgacaaatttctataagctgctcctcggtcgcatcataaggtatattacccactgtaatcacacaaaacacgtatccctaaaatcagaaccaaacaaccaaaaacggaaaaactctagaaatttcaaaaacctaaaatcaaactcattatattatgaatcctctacatttgtggagaaacaaacagaagcataaatcgagagagaaagtaccgaaaacgcagcgatgctgtgaagaagaagccatgaatcaagaggagatgatgatggtgaagaagaaggtgaagcagtgcttcatcttcttcctcctaagcatgccagtcccaagtccaagtggaaacgtgtggtttgtggaatggaatgagagaaaaggtatttggttgagtatccgttaatggagtttggagttagagaaaatcgaaagtgagagagagagaaagggttccttccttcttcttcgtaaggttaaagagaaaaagagagagaaagagagttgttttaaaccactaatccaatccaaatgcctaaatttttcttaggccaacccaacaactccaacggcaaacccaatttcagtgttagtttagttttttttttttttttcttgaaaaatgcgtttataaatataatttaagttagaactcatagtcattataaaaaaatattaacaggtatagtagatatctctaccatgcccgtaatattgttggcaaacgcccatttgaccatattatggaccgtatagttacagtttctagctatacaagaaaaattacaattagtcataaaagtagagaggagcttgcaatgacgcacatagttctcaatcccccaaatagagtcatccccttttcaataccaaaggagaaatgctaaaagggacatggtgtctagtatctttttatgtgttaatattgttattggtgcaaataaatatcggacatatatagtttaatgtaatattctaagacaacatatttagagacactactctgtctaatagtaatgctcaataaaggtattatataggagtattaatggagctggtgaaatttaatctggctatgattcgacttgatccgaaccatgtaataaactgctctaccctgccttgccccgccttgatacaccagttactcggatcgaatcggatcaaatctgacccgtcttatacggattggatcggatctgatccgactcctcttttttaaaaaaagaaataataattttatatttaaattaataattttttttcttcctaaatctgttttttaagaaataataatgcatcattttttatatatattttgattttatctgtctaaatcaataaaaaaatattaaattcttatcgtttaaaatataaaaatgaaaaaatctcttatttattttaaaatttttgtataaactcacaatcaactctcattttttaaaaaaaaaaaaataactaattttaacatcaaacttttcaaaatccaaactaactaattttttttccacatttttcttcatagagtactactactagctagtgaatttaatataatttagaaaatccgaataatatcaagctattttattgttaagtgacggtttcaagtttcaacttgcaagaaataattctaggctctagctactatagtctatatattcctatttttgttttttcataatacaaaacaaataaataataataaaaaaaaaacataacattttccaagctaatacggaggatactccttttgtattaagtcatctccttcttttattaattgtaatttttttagtgttaacagaacttgtaattttattgcccataatgtggttaaataggcttttttccactagttgtacggtgccattttgatctcctccgtaccaaaggaatttttttgtaatgaccgagaggtttaacagtttcctgaatatgcttattttaaaaaaaaaatagtaaatatataaaaaagattatcagaacttaataggaagattagcaagagaaggaaaatttaattagaatttggcttgtttgggaattactttaggacaagagatttaatctttctttttaaatatattagaaaccattttataaaaaatatatatattcaaaacaaattgggtcagatccgatccatacaaaaattaagcagggcagagtgaatttgatccaagatccaataagtatctgaaggtttcggatcagatcactgatccaacccgaataattggatctttttgccatgcctagtattattttgagcattgttattgggcatcagtagtgtctagcatttttctaaacgtgttagtttacgattggctagtgatactcattgaaatttattacattaaactataaaggactcgatacttagttagaccaatagcgatattgacatctaggagggtgttaggcatcaagggtgccttttagcaattctcttatctccaatagtaaaactcatatttagtgttaaatcaacacattgtattgtatagtattatatcgaattatattttatgtaatatttttatgtaaaactatatgtaatattgacttttattagcatataaatatatattattttagtatcatatacttttttttaaaaaaaattaaaatatacttacataaaaatatgatatataac

SEQ ID NO: 17089 - DNA, 6334 bp, Cannabis sativa
  modified_base (300)..(311): a, c, t, g, unknown or other
  modified_base (420)..(421): a, c, t, g, unknown or other
  modified_base (559)..(563): a, c, t, g, unknown or other
aaataattagaattagcatttaagtggttaaattggaaaattggcgttttttagaaaatagaatagaaaaatgacagcatggcaaaattgcaaagtggggcccaatccacatcctatggccggccacactaagcaattaccatttatttttcaattattttaatgctaaataattctaacctaaacctaggtggatgcaatatctcattccttcagagaaaaattctaagcctttttcctataccctagccgccaccttctctctctcttttcttcttcaatttttgaaccttgagtgannnnnnnnnnnnccacacacatcaagtggtagctcaatcatagtgtggaagattgtgaagaatcaaatcaacaagaaggagaatcagcatcaaggaaagagagaaagagatccaggttcanntcttgataatgctctgctacaaaaaggaatcaagggctaaagatttgaacagaaggagtcattatattccgctgcacccgatgtaaggtatttcttaaacccttatgtgtttatgtcattgttttagaattcatattnnnnngttaatgaaacatacttgttagtgaatctagatcctggtaaaataattccaacattttatcccaatagcaacctcttttgcagaaaccctaaatgggtcatgggtacacccatacctatcctttagcctataaatatcccttcattttcacagaagggggatcagaaaaaagatagttgaagttctgctaaaaattttctaatctttcttcttcttcaagagaaaccaagagagcatggttagagttttcttgtaaacaccactgtaaaatatcatacaagcctttaaaggctaatacactgactcgtggactagggttcattaatgcttgaacaacgtaaaactctctatctattttacttactgcatttattatttcttaagttctattttaattaatatcttaaaatcttgataaataattatattaatatttcaattatttaaaaaggaattaaaaatagttaaattagaaattgaataaatgaataaaatgagggtatttcggtctttaaaaaaatatatttgatcaaaatcataattcgagtacatttttttactatttaataattagaaagttctttttagaattttatgggaatagaaagttcaaaatagtatttagataaatcacaggggactaaaattgtattattcctattttgaggcacttccccaaacattttttttttatgtagaattttttttaatttaattctttatataaacatttacattagttatattagaaattctaccatacttttaaaaaaaaatcgaataaaatagcttatagtatttaagataagatttaaatgaatgtgttttacgcgctgtgacaatcacataccaaggagagaaagaagattattaaataaagttgcactactaattaaatcttcttttatttattagttttcaaactctctaactagctattaaacatgtataaatgaacaagtcacatgccaattctgttatctatatgattgtagtaaataggctacctaatacattaatacagtatttctacattaataatacactcataaaaaagaagacaagcttccataattccattacagccaaagaacaataggaggagaaaagtacttaactcgcatggattaccattccaaataataatttattacttattagtaagtgagttggttcataaaataatattttatagaaaggaaataagaaaaaatgcctactcaccaatgtcaaactaattgtttttaaattaatttatgaggttcaggaagcaccaaaatagagtgcctccattagtgttgtccaaatatatcatgtgaccattagttgttttggaatatcattaaaaaaaaaaacattttttcccataccaccataacatgcgttgcggcttggacaacattaattagtctgctttatttatttttcttttcttgagaaaaaaaaaaattattattgttattgttacatacaacaatgccttctcgtaaacttgagatgaggtgtacaatgtacataatgatagagtattatgttatttcctcttctcaatgaaggctcattttcactccaaaataaaaaataaaaaaataaaaaaaaaaacaatgttcataatgatagcaacataaatgtgttaataattatgtatagttcacttgctccataaccataacctacctaactctaaagccgaaagtcatttcctgtagaagaaaattgtccaagttcctaatcacaatcacaagagccattttcataattctaattttacaatagtgatgatcatcaactgctgccacgttaatacaaatttatttttttttttctagaaattctaactgctaagcaaaaaagtttgttgtagcctatataggttagtttgagttgaaccactttaaaccattcactttttagatgcatcgaaattcaaaacagatattaggtaagtaaaacattgttcgtggttaaatgaaacaaaatttgtgaaagctcttcctcaatctaaagttcatcttctgtttccaaataagtaaactttatttcaatagtgcataccatggcatccaaaggatttggttatgaattaagatattcttggagcatttataatatggtatttcgaggttttacagacaagagcgttgttaatcgatgctagtggtatcaaatactatcttaagatagactgcttgcaacttgcaaataattagcaattttcaataataattattaaattaataatgagctacaacatatgtgttagagcaagtgcaatgagttgacaaaacagaataagtactgtaattaatgttctaaggtgacagtaaatgatgcatcagttcttttttatagtgcacggcagatataccgtgtacgtgtattgtagtcacaatattttttttatatatatttaattaatattaatatatttttattttattttattatgaaattaagaattttttttgttagaaattctacaatatacttttttaaaatacgaatgtactcacatgtttcggtggctgataatgagcgtcctatgacaacattcactcagaaggatatttactaggctgttatggtcattgccgccactaaagcttcgagaccagataaatatcatgctttatttttttagagattttaggataatgtgggtgaaatggtcagccaagtatgccttgctatcttaaatgacggttcttttgtgcaacagtttaataagtcaaacgtggtgttgataccaaaagtataaaaaccaatattggtgaaagagtatcgacttattgctttgtgtaatgtaatgtataaaattgttgcaacaactttatcactgaggatgaaaagtgttcatggctccctcatctcatcttttcaaagtgcatttgtcccaggacgctcgatacataacaacattatggttagttgtgagctgctccattcattgtttaaaagaaataacggtagaagaagatttatggcactcggacttaacatgagtaaagcatatgaccatgtagaatggaggttcttggccagtatgatgcgacagtttggtctagctaagggctggattaaggttatcatggattgtgtgacaacgccagagtatacgtttttaatcaatggtcatcctaaaggttgagtgattccgacaagagggttacgacaaggatgtcctctatctccttatttattcctcttctatgttgaatcactgtcctcgttgttcgctcatgcagagggtgttcaagatcgggaccacaggttactcaccttgtttttttgcgaacgatagccttgtttttgatggagctaatggaggtgatgctgaaactataaagcatatcgtcctaacttatgaggttgcgtctgggctgaagacaaattatgagaagtttgatatcacttttagtctgaatgtgcaacaagtgcatcaagatggggttcttagagtgttggggttgacatcagtggctactcatgataagtacttgggtttgcccacggtgattggtagaaactaaaagtgggtgtttgagggaatctgttagaaggttaggaagcgtgggcgagggtggcagcagagtttcttttcaactggtggaaagaggtacttatcaagtctattcttcaagctattccaacttatatgatgagtgtccttaagatccccgcgacaacttgtgaaaaattaaagtctattatcagacaattttagtgggattcatatggtgatcaaaggaagattccttgggtgaaatgagagaaaggtatgtcagcctaaggcgatgggtgggctaggattttggtactttcaactttttaatcaagctatgttggctaaacaagggcggaaattatttcaatactcagattccttgcttgctcaaattttaaaatataaatattttccaaattgctctatcctagaggtcactgaaaaggatggttcatctcatctttggtcgagtttgatctggggaatggatttgcttaagtgtggtcttagagatctattggtgatggaacacaagtttgggcattcaaggactcatggctccctcatctaacgtctcttcagccaatcatgaagaggagtaatgatgattgtcgggtaaatgaatttatccttccttctagtgcttggaatgtggtgaagcttaatctagttttttttttgctagaggatgtggacgtaattcttgttattccattagcgaggcgcgagacagaagatggatggtgatggcactatgatcgagtcgggatccataatgtttagagtggttactcgtttgcgaggtcgcttcaggttgaggagggagttgtagattcatccaggctgattcttaagtggaatggaatatgaaatcttgatatgccaccaaaggtgaaagtttttgtttggtgtatgttccatttagcgttaccagtagcaacataatttatctcctagaaagttcaggtacctctttgttgttcacgatgcggagaagaatctaaaattcctgagcatgctcttttttcttgctttggtttgattccagtgtggcattagttggaggtgttgtcagtgctccgttgatgtgtacatggaccaatacaggaaattctcctatttctcttttacaggctatctcgtgaggcttttaaattgatgatgacaaccctctggtggctttggtatgattgaaactcactattgtttggtaacaagctattgagagtagatgttgctctagagttagcccataatcacctatcaaagtttaaggagtatggtcgacttggccttcatttgggagtgggccttacaaactcagttacaaacctacctactcgatggataccaccgcctcttgattccttttctctagctactgatgctttagcaatttcggggaggggctttgtcggattggggggagtgatacgggatgcggggggtgtggtttggttggcgtggtcattgatgtgttaggtgatttttctattaatgtggcaaagctggttgccatttttctctatgcctgactcttgcgcattgatatagtttcagtatctccattattaatagtgattctatagtgcaaattgttggatcaataagcttcacataaattttagtttttagtctattttattagatatctattcgttattagctgttgttggtggtagctcttgtagcgccattcctcgtttggcgaatggttatgcccacacactggcaatctctgttactagtttaggggattgtgtttggacagatgcttgtccacgatttttgagttcttctataacagcagatttatcttaatgaattatgtttttctttcaaaaaaaataaaaatacaagtgtactcctattcagtggcgaacccatgatttaagttgagagggggcgacattttttttaagtgaggaggggcgttttttttttttattttacattgtataatatattaaaaattaatgcaaatttgtattttagtattaaatgtagtataaagtaaaaaagataacaataaaaatattgggttcaataatcaagacaataaatacaaatttttattggtagaggttcaaaaaatgaaattcaaatgcgaaagcaaatatgccttttttgggattagaaattatgactttggatgaaatagttttaccattatgccaaagcttatattgtgtttaaacatatcacttttatttagaaatatatgttgtaactagctaaaatgcatatatatttttttctcgatttt

SEQ ID NO: 17090 - DNA, 2828 bp, Cannabis sativa
gaagacaatggtctccactatagtccgaggtcatagactacacggctatctgaatggaacaaagatgtgtccccctgagtttattccagtcactggtgaagccaagtatgaaggtgaactggaaactaatcctgaatatgagcaatgggtcatcaatgatcaattgcttatgggctggctttatagctccatgacagaaggaatcgccactgaagtgatgggatccacgactgcagtaggtctctggagggctctagagagtttgtatggagcgtattcaaagtccaaaatggacgaaactagaactttgattcaaacagttcgcaaaggaaacactcccatggcagagtatcttcgacagaagaagaattggtctgatattctagcacttgctggatttccatatcccgaagcgcatttggtggccaatgtgttatctggactggatgccgagtatctgtcaattgtagttcagattgaagctagatcaaccacaacctggcaagagttgcaagacatactgttgagttttgatagcaagatcgagaggttgcagactcttaacaatggcagcaaatcgacaagatcctcctcacctcaagctaatgttgctgctaaaagcaacacaggaaagaatcatgccagcagaggtcgaggaactcagaatccaaatcaatatgctggaaatggtggccggttctctggaagtcgtggaagttcagggcattttcgtggaagaggccgcaccaacacagcaagaccaacttgccaagtttgcggcaaatatggtcactctgcagctgtctgttacaacagattcgacgaaagcttcatgggatctgaccccaacagctctaatcttgggaacaagaacactcaagcaaatcacaatgccttcattgtgagtccagaagtggttgaaagtgatgcttggttcgctgatagtggagcaagtaatcacattacctctgatgttgcagccatgaaccagaaacaaccctatgggggtaaggaaaaagtcacagtaggtgatggatctaaagtcaatatatctcatgttggtaatggtagtttagatactgatgatgggaatcaattgttgctgagagatatgttacatgtccctaaaattgccaaaaacttaattagtgtatctaaactaaccaatgacaacaatatactgattgagtttcatgctgatgtttgtttgattaaggacaagggaactcggaaggtggtgcttcgaggaacacttagagacgggttatacagactggaaactccgcaatcattcccatcatccactcatcatgatccatcaccactcatcaataaacaccagtcaaaattttcaagttttcctgcatgtttttctgttaaatccagtgttaaacaaccatgtgttgtcgagtcgtctgtatctaggcttgatgtatggcataggcgtctaggccatccctctcctagaactttgagtcttgttttagagtctgctaatgtaaagaaaactaaaaatgaaatgcaacagttctgtgatgcttgtcagtatggcaaagcacatgctcttccctataaactttcctctagtcgtgccaattttccattagacttgattcatactgacttgtggggagctgctcccgttgcttcaaatgcaaattacagatactatatacatttcctcgatgatcatagccggttcacttggctgtatcctctcaaatttaaatcagatgcccttgaagcatttattcagtttaaaaacctggcagaaaataaatttgacaggaagatcaagtgcctaagaatcgactggggtggtgaatatcacccctttacaacctttgttcaagatcaagggattgaatttcaacactcgtgtccccatacatctaaccaaaatggtagagccgagcgcaagcatagacacattgttgaaatgggtcttacattacttgctcaagctcaaatgccattaaaatattgggtagatgcatttcacacagctgtttacttaataaatagattacctactcctgtgttaggtaataagtcaccctatgaagtgctgtatcatcataaaccagattacaattttctcaaaacgtttggtactgcatgtttcccatgcattcggccatatcagtcacacaaatttcagtaccattcattaaaatgtgttaatctcggatacaacacttcacacaaggggtataaatgtctcactcctacaggtcgcatatacatttcgaggaatgtaatgttcaatgagcttgaacttcccttcaaacaggggtttctcaacaactataaaaccccacaacctgtcattattcatagctcaacatggtcgacacttccctttcctactgttaatgatcatgatcaatcctactccagttctgtatcgactcactctgcagcagaccctgaagcatcacccccatctgctcgagttccatcttctttatctcacaccagtactgactcaagtcttgcaggggaggatcatacagatcaaaataccacaggtgaaaatactggcttgtttgttccaaattttgatcaatttactgttgagcaggatctcgaaccagtcactgagtcccatagtcctgaaccagtagctgagtcacctcaacctactctagccacagccttacaacccacacaccaaatgataactcgggctagagcaggtatattcaagcctaagacatacattggctcagctaaatcgaatatcacttatactgaaccagaaacggttgatgaagctctcaaacacccgggttggaacaatgcaatgaatacagaagtcattgcct

SEQ ID NO: 17091 - DNA, 5046 bp, Cannabis sativa
gtcggtatggttttgatatttgagtgctttttgtcttgtcgtttcctgggagcggagatcgttttgtgatctttgtgggacctgctgacctctgctaatatagagtacgaaagtgagaaacttccaaagtttttgcaccgtaacgctcttcaattttttttttttttagtttttttaattgtttttaattatttattattattatggtttgtagttttttatatataaaatatatattttttattttagttatgtatatttttagttatataattaatttttgttatgtaattcaataaataaaattattttttattaataaagtatttaataattttttattagagaaattattttatatattattttttaatattttttttttatttgtacagtttgagcttttagtgatttttatataagttgttatatgaatttggattgcgatttaagttgctcaattgattgctatatggattctagtataaatttctataaaaatatataaaaaaaaattgttttgaaatgtaaaataaaaaaactcttgttattaattataattttagcttaattaccctaatacttttaattttataatatttttcattatttttgccatatcatacacttttttttttatttttttaaataataataataaaaaaagatatattttatttaaatatgtgtaaggaatttaaatttaaattgtcatattaaaaaatttaatattatataaatacatttaatataagatacaaaataaacaaaaaagtgtagtaaatttaaatttacattataacaatacttttattagatagcctaaaaatttattcttttttgggatgagtgagcgagaggtgtaatagttgacatcactatcatggagtatggacctataaattagttctatgatcacaacaccttttttttggaggggctaaacaatataggtcttctattttttacacaaatctaaattgaccttctttttattatttgtatttggggtgagctcaaacaaaatctagctccattaagttgattatgatattagtatctaaaaattatttaatttgtagtttttaattgctgtattcgtacaccacttacaaacacaattagacacatagggtcacaattgaccattcacacaagaaaacaaatgactttgattttaccatgtaagcaatttgcaataacacaatataccttagaatcttctaactttgtcgaatcaagtttcaaaaatcacaaagttataaaacacacattagggcacgaacacaaaagaaagaaattaaaaaaatagagggagagaaggaagatcgaacacagttttaaagaaatttgccccaaatttggacttcttcctctttgagctctcctttggaaactctttcattagcactatcaatcaaagattacaagaacaacaatcgagaattcaagtcacaactcgattggtaagcctcaaaattttattttcacaattattatccttaagtttggcaatataaatgtgactgccttttgaataaataaatatttttattcaaattttgaaaataacaatactaatagtttcttagaatatcattatctaataaggatctttgatttgaaagaataaataaaaatgaaatgataaaaaaaaaaaaattggctaaacatcaaactaagatgagggcacatgaatgaggaggactttcatcgactggtagtaagcgctcattgttccatgctcatggcacatgctgtccgttgaggcgagcaagcttgtacactccataccttaggactgtttcaatttgacatggtccttcccaatcgggaccaaggaccccagctgtcaggttaggtggaacacctttcttaacatcaagtcccctattataaactccttatttcaaacacaagagtcataatacttctttgcctgttgttggtgagcggcattacataattgtgacccctctcttctttcatcgagtaagctctagtgcttcctctagttcctctagaattagttggttacgatgttattcatagtactgacttcggtgtgaggtgacttgggtctcaacttggagcatggcctcactcccataggtgagtgagaagggagtatgccctgtaacgattcagtgtgaggtcctataggaccagagcacttgtgggagctcctctggccatcttcctctggcagattctaggcacttctttaatccggtcttcaatgtcttgtttactgcttcaacttgtccattcgcctgtgggtgagctactgaagcgaaacttttaactataccattattcttacaaaactccgtaaataactcactatcgaattgtttctccattatctgatactattttgaggaactccatagcaacatacaatgtacttcatgacgaagtcgagtaccttttttaaagttatggtggccaaaggttccgccttagcccactttgtgaagtagtctactgtgactactgcatatttgactccaccttttccttgtggtagagatccaatcaaatctatcccccacacagcaaagggccacagggaggtcatagaagtgagttccattaaaggggctcgtggtatcgttgagaagcgttggcacttgtcatacttttttacgtaatggagagagtcttgacttataataggccagtagtagccttgccttattatctttttagctaagcgatcccctccggcatggtccccacaaaatccttcatggacttccttcaatatgctttgtgtttcttaaactgtcacacacctcaataatggcatggagtgtccctttctatacaatttcccatccaacaaggtgaaccttggtacgttatacagtaagttccttacctcattcttatcagaagggagactctcagtggtagagtatttaataaatggagtcattcacgttatttcaacatcaaccagctccatgctagcttcctcgttctcttcaacattgacgctcgatttaggaaggaactctactgggctgatgttgagtgtatcagcttccttaatggtggccaattgtgttaaggcattggcattcgagttttgttcacaaggtacttgttttatggagtagtactcaaatttttggagttgtttttgcacttgggagaggtaagctgccatttttaatcctcttgcatgatactcactcaatacttgattgactactagttgcgagtcgctaaaacaacgaatggctttcgcaccaagctcctttactaatcatagcccagccaacaaggcttcgtgctcggcctcgttgttggacgcttcaaacccaaacctcaaggcagaatgaattttatacccatgcggggtgacaagaatgattcctacccctgagccatgctcgttagacgacccatcgacaaacaaatgccatacacactctggtaattctcatgcactgttttcttctagcaacccagtacattcagcaatgaagtcagcaagtgcttgtgcctttatggttgttctgagatggtatgttatctcaaattgacccaactcgatagcccatttaaggagttgacctgagtcctcctgtttcattaatacttgtcgtaggggctgcttggttgggacatggatgggatgtgcttggaagtaaggtcatagcttctttgacgaatagactaggaaaaaggccagcttctctatggtgggataacatgactgtgctcccacaaattgtttgctaatgtagtacactggcttttgaatcttctcctcttcacgcaccaatgcgacactcaatgcatgctcagttacggccaagtatagatacaacacctcccccataattggttttaacaagatagggggttcaactgggtgtttcttcaatgattgaaatgctttttcacactcttctatcaattcaagcctcttacttccttgcaataagttgaagaatggtaaacatctatctgttgatttggacacaaatcggttgagtgcagctatgcgtcctgttaggctttggacatccttcttttttttggggaaggcatgtcaatcagtgcctttatcttctctgggtttgcctcaataccctttgagttaacaataaagccaaggaactttcctgatgacaccccaaatggatacttgagtggattcaacttcatgttgtatcttttcaatatagagaaacactcttccatgtcgtcaacgtggttctttgaaagtttggacttgacgagcatatcttccacatatacttccatattgactccaacaacggattgtctttttagtgctagaataacaaacttgtatgataagtttgttgaaaaaaacaatgataaatttgttttgtcccttgctcatattgttgcatagtaaatctgtggcggtaagatattatgtgtcactccttggcacttggccgatcatgttattatgcctattaatgtcaaactgcgggatcattggatatgtggtcatttaaatatttttgagcgtcggatatacttgtacaattcattgaggtctgtcaagtttatatcagctgctaaagaggcttgcaagcctttttttgtgatattaccttactatttctctatgttagactttagaggcctccacaataaatcaaagtttagcactatggaaccgtttcccattgttgttgttgatgggttacctgagcaggtaacagcataagttttcactcatgtattatgttattttttttttattttcatgttatcattttactttgtggttttgttcagtttcttatttttttctagtgttgttttgttgtttttgtacattgattgtggtttttttgtagcatcttttgctgggtattttattgacggcaaacccatcccatcttctgattttgatgtgcaagttcaccacgattaattggctgtgtcattttttcattatggcatgaagaagctgttgggaatattttatcaggatctagatttactatcaagtacgttgaattaacattctaaatatgaatatctctaaaa

SEQ ID NO: 17092 - DNA, 4080 bp, Cannabis sativa
cccgtgatagtggtaatgacctactttcctttaggttgtattgatttatgagacaaagaacaaagtattctactctaaagctcttacaaagaatctctgagtaattctctcttagatcactattttcctcttgaatattctctgattcaatctgtctcccccaatagtgaggtgagactcaaaatcctaagttatatttcaaatactatgtaattttctcttttcctatttagtttaatattttgggccaagtcccaaagtaaccttgcttcctttgagttgatattgggccagacccaaagggccctattttattttattttttttcaaaatgggccttacttaaatgtcacgcttcatcataattgtgctaacgagtcaacgatctgtaaagcgcgaagccctaagtggcccaacgagacaaacagaagttaagctctgttatggagaaacactcttgaaatcgaagctttcttctccgactccgatccaatccaatctcagctgctaatggaggacgcctatgctagatctgtaactgaagtcttagatttcttcggtgtggaaccgaccaaaggcctcaccgacgttcaggtcgctcaacatgccagagattacggcagaaacgttctgccggaagagagaagagttccattcttgaaattggtattgaaacagtttgatgatttacttgttaagattctaattgttgcagcaattgtttcattcgttttggctttgattaatggagaaaccggtttaactgcatttctagagccttctgttattctgatgattttggctgcaaatgccacagtaggagtaattacagaaacaaatgccgaaaaggctcttgttgaattacgtgcatatcaagctgatgttgcaactgtgcttcgaaacggttgcttctctataattccagctacagagcttgttccgggagatgtagttgaaatttctgtgggttgcaaaattccagctgatatgagaatgatagagatgcttagtaatgaattacgtgttgatcaggcgattctaactggtgagagttgttctgtagagaaagaactcgagtcggcgattacaacgaaggctgtgtatcaagacaagactaatattcttttctcgggtactgttgtggtttgtgggagggctagagctgttgttgtaggtgttggtactaacactgccatgggtagcataagggattcgatgcttcaaacggaagatgaagcaacgccattgaagaagaagctggatgagtttggtacttttcttgcaaaagttattgctgggatttgtgtattggtttggattgtaaacattggtcactttcgtgacccttctcacggtgggttcttgcaaggagcaattcactacttcaagattgcagttgcgcttgctgttgcagctatccccgaagggcttccagctgttgtaacgacgtgtttggctctagggacaaagcgaatggcgcgattgaacgccattgttaggtctttgccatctgttgagaccttgggctgtactactgtgatttgtagtgataaaacgggtactctgacaaccaatatgatgtctgtttcgaaggtttgtgttgttcagtctgtgaatcgtggccctcttattgatgaatacagtgttagtgggacaacttacgcaccccaaggaactatctttgacagtaatggcacgccaattgaccttccagctcagttgccttgccttcttcacttagcaatgtgttcagctctttgcaatgattccatcttacagtataatccagacaaagggaactatgaaaaaattggggagtcaactgaagtggctcttcgtgtactggcggagaaggttggtcttccgggctatgactccatgccttcgtctctgaatatgttgagcaagcatgagcgtgcatcatactgcaatcactattgggaggatcagttgaaaaagatctctgtggtagaatttactcgtgatagaaaaatgatgagtgttctttgtagccgaaatcaactgcaaattatgtttttgaaaggtgctcctgagagtattatttctaggtgcacaagtgttctgtgcaatgaggatggttctactgctcctcttacagctagtacaagagccgagctggaactgaggttacagagttttgctggaaaggaaacattaagatgcttggctatggccttgaagatgatgcctgtgggtcaacagactctctcctatgatgatgagagggacctcacatttattgggttggttggtatgcttgatccaccaagagaagaagtgaggaatgctatgctttcttgtatgaatgctggcatacgtgttattgttgtcacaggggataacaagtcaacagctgaatcgctttaccgcaagattggagcttttgacgacatggtagactttgctggacgctcttacactgcttctgagtttgaagaattaccgccgttgcagcaaactatggcattgcaacgtatggcactcttcactagggttgaaccttctcataaaaagatgctggttgaggccttacaacaccagaatgaagtagttgcaatgactggggatggcgtcaacgatgcacccgcactaaaaaaggctgatattggaattgcgatgggttctggaactgctgtggcaaagagtgcttcagatatggttttggctgatgacaattttgctacaattgttgcggctgttgctgaaggaagagctatatacaacaacacaaagcaattcattaggtacatgatctcttctaatattggtgaagtggtctgtatttttgtggctgctgtacttggaatacctgatacacttgcccctgtacaactgctatgggttaacttagtcactgatggattgcctgctactgctattggctttaacaagcaagattctgatgtgatgaaggccaaaccacgcaaagtgaatgaagcagtagtcaccggatggttgttctttcgttacatggtaattggagcttatgttggccttgccacaattgcaggatttatatggtggtttttgtactccgaaaacggtcctaaacttccatacagcgagctcatgaacttcgactcatgttcaacaagggagacatactacccatgtagtattttcgacgacaggcatccatcaaccgtgtccatgactgtacttgttgttgttgaaatgttcaatgcattgaataatctaagcgaaaaccaatcactgcttgtcatcccaccttggagtaatttgtggcttcttggttcaatcatcctaaccatgctccttcacatactgattttgtatgtgcacccactctcaattcttttctctgtgacaccattgtcttggtctgattgggctgcagtcctatacctttcttttccggtcataatcatcgatgaggtgctaaagttcttctcaagaaagtccagcagtggtgtgagattagcttttagattcagaaggcctgatttacttccaaaaagggaagttcgtgataagtagtggtaatcaatggagctgtgactcacccaaatttatctcacttccatattctgcaacaataggtacgaatatgatgatgaacagtgcattaaaaatgctctttttctctttatctacattgatgcacaccaccacgaaccaagtcatcatatatatatatatgttgtggtgaatggttattttcgtgccattcatctacctcaattttaattcaacttcgttccaacattatttgggtttattgttgatgctcacaatattttttgtaattttatttgtaatgaaacatacttctccaccatttttcgggtctaataatgtctcgtagtgttagaggtccatggtgggaattcttatggcattttgatgatattatgaaaaagagctctcttgtggaattttaaactttaattgattaaaaaagaaaagtggaatctattattttgaagagcctcataaagactttgtgttgtagctttgcaaattgatcttggaaatatgtgaaaagcactgaaatctgagttttattttgcagaaactcaggctgtggtttaggaagat

SEQ ID NO: 17093 - DNA, 2834 bp, Cannabis sativa
attttcgcataggatgatttgagtgttactatctaagattattagcaattaatagaaacttcaattaatgtttgtaaatatatagagttatatctattttttaataataaacatttcattagactgtatgaaatttgtatactttaatcattgttaatttcttcactaataatttcaacatcttgaatgttactcctttattgctttaatctgtttatattttcatctctattcttacaccgtatatataattcataaaatcacatcagactcagtgatcatacacatccagtagaaataagttaaccactgaaatttaataaacaaaacaacccaaaaatttgtataagtcgaagctgttcaggtaaacgatggctgcctcatcaaatcaaattgatacagaaaggcaatggtagaacaagggacatctccctaaaatccaatccggaatttcaatatttccccaccaataaacttttccccaaaaatcaccattcccatctttcttcacttcaatttcagcccactgtaactccattctcttcttttgaaaatgctcaaaaaccccatttaaatcactctcaccccaaaccacaaccaactttccttccaagctcaccatcctagctccactcatgtacgcaggcaaatctttaacaaccccattaacctctttccacctcccattcacttcatcgaaccctttgaacctcccacaactgtcatagcaatacaaaacaccattcaccacacaattctgtccattccaacccgactgcagctcattctcaaaggcttcccaaacattcgttttcgggtcaaatttgaacccggtttggcccacccaaatgcaaacccagccacccacaatggcgcagtccgagacccacttgtttcgaaccccatcaggacaaggaacggcttcccagactccgatatctgggtcgaacgattcaacccaatgggtacctccgtgtgatgagcttggcccaccacctcctcccgccacgtatattttaccgcccaaaaccgcagccgaggcgccacacctagccattttcatgttcggcccgcgctcccacgtgtggaacctacagtcgagaatccacacgtgggaggagaattctccgtcgacgaagccgccgaggacgtagatcttgtagcctacggcagcgtaggcggaagattctatatgaagaggttgttgcgggactcggataagagcaccattccgggttaaactggggtcgggtttctgctggatatagaaccatgtggcgggccaggcagagtaggatccgacccttatgtaaagaagatcatgggtgcagttgagaattgatcgtgcggtgtagaattgatgggagaaaagaagggacctgatgggtctagagacctgggaaagaatgatgtgatgccatcttggtactcgtgcgaggcagtttaaagcgacgtcgtttgtaagggatgggataagaatatcagccgctaactccggctgctggctttgttttttgtctttgccggaagccatgaatgatgatgagtgctcgcctgagtaacaaaccatagtaaatgcttaattttatatgttgttcttcttgactttttcttttcctttttcatttttttatagctaattggtctataatttattatacataattaaatggtaagactaataagaggaatcctattccttcagaggaaaaaaaaaacaccatcttgcattgtaagagctgttcattgttgtgttgtgtgtgtggtgagcagtgagcacaattaatcttaattatatgttaaataattcgtttcgttcatattccttgcatgagtcatcgaatttttatgtataaattatcagtgccaaagagaatatactgttgagctaaggaatgatactacaactaaagaaatgatgtgatatattatatgtaaatgtacactttatattacatatatttttatgtattttttatagttcaatttaagatatgttttagtattttataattttttgtacagaattatgtttgattttgtttttatttgttatttaggaaaaatatttagagatgttcaattttgataatttgaaagtgttaagcaagtttttttgagcaaaaaagagaaaatataatgaagaactgaaatttcttttagcttgaagtaattttttattttttaaaatgggtcaaaaattacattttgagctcttaatttcgtggtcaagattttatcaggatttagatttactaacatgtatgttgtttaacatcctaaatatgaactttctaaaataattaaattaaatacatataaagtttaagaaattttacattggtggcggcacaataatatgtctcatttcactcagatctctaacccttgttcatttctgttgcagagtaataacaagatctgagtccgattctccttcaagtgttggattcttcacaatcttccgcactatgattgagtacttgacttgctatgagtgagtatgtactctttcactatagagaacgaaaatttatgaagggaaagagaaggagatttgaattctatagaaggagactctcaagtttctagatgtctgacaaagttagaaataggggtgcacaaaatatgagccaaactattcaacctagccaacccaatttattttttgtagtaaaaggttatcttactaagagtaggccatagctcattgggttaaaaagtgatgggccatataactatgggttgattatgggttggacacattttaactctatataacccaaaccaacccatttcttgaaagatgtttcaaatttgagacaactttcata

SEQ ID NO: 17094 - DNA, 5151 bp, Cannabis sativa
caataggggtttctatacgattttagtttctatataaaatttcgtaaatatatatatatatataaaaaacggttttgaagtgtaaaaataaaaaaattccaataaaatattacaaatattgatgcaattattcaaaaataaaattctcaataataaataaaattatattacatgaaaagtttattgtttggttatattatttaatttttgaaagataaattaaaataaaattccaaattagggattgggaatcacattctctgtcccatccctttccttaaaggggaaagtacccacagatactcatacccaaatgtccaaccttggaaaatcgattcatctccacaaacaccactgacccatatgcccaaaacatttcctttcatcgacgttgccggtgattgaacactagaaagctatcaattggatttccaggtaataatgtcattgtcagtgtaacaatttgaatttcaatataattatattatgtatacttacaatgttgtttgtataattctcttttttctttcttcgacatttttgtacttgagtttaattaacaatttttgggctcattgtttagttttcaagaatgaatttttatgcggaacacaaaaatacttaatagttgtgagccaagaatttagtatagtaattgtattttgtggataattaaattttaaaatttaaaatatgtcttaggtttgatttgaatagtttccctctaacactccaacttatgaaatcaggacgctaagtgttcgacaaaatggccaagagagactctgccactaaaattctgccatctttgacccctcgaaggtctgctagacttctcaagaaccacgatattttggtaagctctttccacctttcagataccatttccaacaaactaagtaaacccagtaatgggttcaaaaattgtggatccgaaccaccctctaatctcagacggtctcccagaatttccaccaaagattctgtgggaaaagaggagtatagtagttgtgaggatttgggttctgggcttataaaatcttccaagaataatgacatgggtaggtttcaaaataggagatctcagaggctttctaattgctcagagaagactagcggagataagggggtgggtaaggaggaggttttacatactgggaaaggacatttaagagtgaaatcgggtgagaacttgttggacaaagggaaaaggtcaacgaagagacaagttaaagaatcagatggtgagtgtagagtggttaaagatcatcagacagagaagagtaaaggaaataatgaccgcatttcgtcaaatttacacactgggaaaggaaagagttcaacagcaggacaattcaaagaaccagatggtgatggtgatggtgagtgtagaggggttaatgctggtaggaagagaaagcgagatgaacaaggtaaagagaatgttaatgggtggaatgaggatcaagaattggcactgcaaagagcttatttagctgcaaagccaacaccgcacttctggaagaaggtttcaaaaatggtgcctggaaaatcagcacaggaatgttttgataaagtcaatgctgaccatttaaccccacctcaacgtcagcgcggggccaagaaaagacgaagtgtatcacctattcattctcttgagctctctgcaagtaaagtgcttaaacccgtcgatctgaatctcaaaaagcgaagttgtaataatcagaagactcgcattacacagaaaaatgctaggaagttattgaaagagcattataatcagaaccaagatcatgatgctgatcttttttcagttcttgaacccaacttggatttatctagtgaagctctccagcctaatcatatattttccaccccaaagaattgtaaacaaggattacttcagaaatatagtgagagatctacttcaggcaaaaagataccacttctatcaagatttagtggctcaaaggtgacaactcttgctagccctccagtactgaagcaggtcaaaaacaaattcttacatgagaggtatatcgatcaattacacacaagggatgctaagagaaaagcagcagctgctaaaaaggccactttgaaaataggtgatggaaaggagaacaatgtcatgaaaatggatgttgttagatcagcaaaaaatgctttggtttctgatgctagggaagctatcactatgcttcaaaacataaagaccaatacaatgagtaactcctctgatttggatgatgatattgttagaagtgatgatgatgatgatggtgagagttaaaatggaaattagttttttttccctaattcttcacctgattagaatgtattaaatcatcttgtataaaagcgaatttcttaagtagttttgtaactttctaatgtctgagaaatcataggcttagttgctttagtttgtgaacataaagagttgtcttgtatagttgtattgcatttaattggtgatgtaacttttgctataaaaacctgaaattcagggaatataggaacttgaatttgagaaaaaaaatgtcttaggtttgaacatgcttgaagtaacatactaaaaaaatgagccccatgtgctattattaatatattgactaattgtcaaagggctaatcccccatttctggcagtgaaaactaataagaacttatcattgggttgtgttattgacttttgaattcttgctaattaaaaggaattgtgagttgttttttagtagtattttatagtttcctatatacataatctaattgactagatctgcatgcattaacccatatagactagagtgaccaagtttaaagttttctcagtatgatcaaagttgtgctgcttatgttggtgctagtcatgagttatgtatggagtagtacaagctcttctgatgatcattgcatagagaaggagagacaagctcttctcaacttgaagaaaggctttgtcgatgatggcaatcgtctatcctcgtggaaaagtagtaggcgagattgttgtgcatggagaggtatcaggtgcgataactcaaaaactcatcgtcatattatcgctcttgatcttaaatctaactacgatgatacacaattgtatggtgaaattggtcattctttggttgaattgcaacatttgaggtacctagatcttagttacaatgcttttactgaaattcctgagtttattggctctttaactagacttaaatctcttatctttgaatacaatcctatcacattcattcctgcccagcttgggaacctcaccaggttgaaatttctcaagctagctggtgttgattcagattcttatgagattagtactaatcttgagtggctttctcatctcacttctctgagattcttagagttgacttacactaatcttacaaaatccacaaactggtttcacttgattaaaacagcaccatctttgtcaagtttggcattatatagctgtgtatttccaccaacagcaatagatttagacatcttctccaacaaaaattcttcaaattctctaaccaatcttgatattgtttatggtaacatacctcataatgcagttccttggttgctaaatgttagtaccaatctagttaatctcactcttaaacttaataacaatctaatgaaagctcctattcctaattcttttgaaaacatgagatttcttgaacgcattgatttgtcttcgaatggatttgaaggtgaaataccaaaatcattggggaatctttgtaatcttcaagaattagtattgttgaacaataaattcaatgctacattttctgatgttttagaaagtcttagtggttgtgctaaacattctttagaaagtttggattttgaggagaaccaattaagtggatcctttcctgatttgaaagcattccctgtcaatctaaaagaattatggatcaactctaaccaattagaaggaccattgcccaatttttcaatgctttcaagtcttagattggtggatgtttcttacaataagcttaatggtactttacctgaagatattggtaagcttcatcatcttgagtacttgtctctctcttcaaattctttcactgggcttgtcagtgaagttcactttgaaaaactttctgaattgaaagaaatcgatttatccggtaactcgttaacattgaggactatttccacttggattccaccatttcaacttgaaagactatcattgagatcctgcaagttaggtccacaatttccttcttggattaaaacgcaaataaatctttcatatcttgacatctcaaactctgaaattcacagtgaaattcctaatgggtttttcaatcaaacttcgaatttgaattttctagatctatcttcgaatcaatttcatggtcatattccaccttatctgtcgaatgtcaacatgttgattctttcaaataatagatttattgatgtaaagtcttttctttgttacccatcacaaggatcaataaaagttcttgacatttccaataatatgttaagtggaagccttcctaattgtcattggcatatgaaggaattgattgttctgaaattagataacaataatttgtctggaataattccaagaacaattggtctgtcatatggaattcaatatttgcttttggggcataataatttttcaggaaagcttccatcatccttgaagaagtgtaaacaacttcaagttcttgatatcgaatataataatttagaaggaaatataccatcttggattgggaaaagactcatgaatttgattattcttcgaataagatcaaatcattttaatggagtcataccatccagtttgtgtcatcttcattttcttcaaatatttgacatttccatgaatatcataacaggacttattccttcatgcataaaaaatttcacctctatggtagatggaaagaaagagagccatataaatatttggacaccagttcccatgtatggcgacatgtttttaacgtatgaagttgttacgtcgattatgtggagaggcgcttatcgcgagtatagcagtactcttggattattaagagtgattgatctctcgagtaataatttgataggtaagattcctcaagagttaacaaaccttgttgaattggttcaacttaac

SEQ ID NO: 17095 - DNA, 4728 bp, Cannabis sativa
  modified_base (2353)..(2354): a, c, t, g, unknown or other
  modified_base (4672)..(4685): a, c, t, g, unknown or other
acaatataaaaagactgtatttttagtaaataaaatcaaaaaaatataaaaatatttaaagttctgtgaaatcgtatttttgtaatttttttcattatttttgtgtattttcctataattttctcttcagttgggttttcctattattattgcataatgggccggcttagggcctttgaggttgtccatccatctaatgggccaactttctgatcccatttttgaacatagaagtgcagtacagaagcagatatggtgcttagatcgtgttcttttcccattcgtagatatctgctctcacaattcagatacggcatatcaccaaacaaccggaggtaagcaccaattatctcttccaactctaatattcagttcaccaaatttaatacacactcacttaaaccaataccattatatctctatgtttcactcaaatctgtccagttgctcttcgttacttagactctcaattcattgaggcatgtaagagtttagagttagaagttagaactattggagcttccccaagttttaaatatgataattgggctatttcatatgctctctttccatttaaaaaaaaaaaaaaaaaatccaagtttcttatttctgattttaataaacagcttgaaagtaccatcccagaatcattatcgttatattacatgctatatgctgatgcattgctggtcctaatagaaagttactaatgcagcaccctcattgaactagaatgagtatgccgtatgcgtttctattcatattgagaagaactatgttactttttgaagataaaataatatgtggttcccataaaatggtttattttacttttatccccttgcattaaagatgtagaaacataaaattttatccatgtttcaatgtattttccaaagaagagaaaaagagtggaaaatttacttctgcgctgcaacgatatatgcatagcatcacatttactgattttgtagctacagtgacaatttatgtcatttttcagtactggctggaagcatcacctcatgatttaaatatacagtatatatgtataaatttttaaaatattattgaaatatccatgtactggtagttgacggagttgaaggaagagcccattaaactctttagttttggttcttctgctgcagaatctccaatacttgatggatacttatagattgatctgatttgatcccgtttacatatatatgcatgagtgtcttatatatgtttcattaatatgcctgttaatagatttttcttttatgtaaatgactaaactggtaaatcgttatgcaaaagaagagaagaaactggtttgtgtttgtggccatgcaagggcagagtacggtccatcacaaggacttgttcagtttcagagcaagcacaattaaaagacaattgaagacaagtggtccgtccacactttcaagtttgagtcatgtcagattcagcctggtgagggagaaaatttctttgagatttgaccactcaatccgacccatcaaaatcaaagctgcagatggaaatcaaggagagctgtcggatgaagatgatgatctttgtcctgtggaatgtgttagagaattcaagactgatgaagagttcttgaagatcctagataaagccaaagaacataattctttagttgtagtagatttttatcgaacttcttgcggaagctgcaaatatatagagcaaggatttgcaaagttgtgtaggggagctggtgatgaagaagcttcagtaatctttctaaagcacaatgtgagtactatttattatacatgggatctaaccaaaaaattatataaatatagatataataggctttgaactcgagttgctatttcttacacaggtaattgatgaatatgatgaacaatctgaggttgctgaacggctaagaattaaggtaacttcctctagtaatacagagtgtcttcatactccattagatgatggaaatggtcgaatcttttcccatatgaattttgtggctcattagtttggttgcttttaaaacatgtgattttaacttaatgagcataataaactgatgcagacggtgccccttttccacttctataaaaacggggtactattggaagctttcccaactagggacaaagaaaggattattgctgcgattggtaaatacacatcctctgtatcttaatctaaataaatattttcagttctgggctttgttactttaaaaataaattatgcagttgatattatatacaaatatttatagggattgtataatactaaacaaagactttccacatattaaaacgcccaaactcgatttccctacctacttatgatatatatatatatatanntatatatatatgtatatatgattcattgtgctaagattcaagcacaatattgatgtagaggtttgtatattaaacttgtaactatcactgttatttgttatcatcttcgatttttccaatgaaaatgaggaatgtgttgcatcacatacattaaacactatttgttgagagtgtatgacttaatggcacacaagtgaatgggatcattaatgtgaagttaaactctcaaagactttacttagaacttaatgacatcaaggctactagttcttgaaaaactgtcgttttgctgtgagacttcctttcaagggcaagggataaggtgattcataccaacataacttttatccgattatcaaaataatattacgaggcacatgcaaactttggaagtaaaaaaatgagaaagtatattctaattttaggaccctagtggtaagagtggtcgatgaccataacgaggaaaaagtattatattttattttttgggaaatgtttttaggcaagccaagtaaaacagcacacaattcattacttatttatggtataattacataaataactttctttctttttttttcctttctttttttttttttttttaatttttacttttaccttcaaaaaatttctttttttatattgttacagtgttttataaaaacacaaaaataacaagaaaattacaaaaaaaaataataagaaaattacgtcaaaataacaacaaaaagaataacgtacaaataacaaaaaatcaacaaaaatacaacataaaattcattaaaagagtattttctgtaaataaaattttaaaaaccgtaaaaatatttaaaactccatacaactatatttttgtaatgtttttgttgtttttatatatgtatgaaattatccctatgtatgtgtgattaaataaagagaattattcacaaagcacttaacattacattttttttagggatctttttattttaacattttcacgagctgttttttcaaaaaaaaaaaataataataataataacgtcatttttacgttactgtaacgttatactatttttatgtaacgtgaaaacgatatttaaataacatttttttagaataaccaaaaaatatcagtccatatttctgttaaaaaaaagtaataatctgccaaaaagtagaaaaaatgtaaaaaaaaacgtaaattttttttttattttgatttttgaagtgtttctaaaataatctcttaaataaaaagatattactatatgtttcgtgctcattgaattttttctatgaatagagaaccatttcaatgatttaaagaaaatgtggaagaagcttttatatgaataattttaagagaccaaatactcctgctatgtgtaattagagcaaaacagaacactaactaacctaagtaatcatgattaacagcctaactaccgaactaatctttatactaccctcaagagtcaagatgatgtaatccaaattctcacattaatataactatataatcaaatactaactgtagagaacatggttgaaacaacaacaataaaaatagctctattttaggtttttaactattttaactaaaaaaaaagtaccattaaagatgctctaagatcttgaaactgaattaggaagagtgacaacattagaatgtcagccaaataaagtttcattactcaaatgtgtaaactatctatggaattaaatttgttactaacatataatgagaattacaaatttcaaagatttcactttgaacaaaaacaatacaattccaatatgactatcaaagaatgagaaatcaattctcttttatttatttatttatttattttgaaaaacgaattttcataaaagagagtggattacagaggtattgacaagtctgcaattagtgaataccagcaacaaaagaaaaatctaaaatatatttggctaaataatggtcaactacacttgattccgtaaacaaagcaaaaaccagtaaaagcagaaattgtatttttatttaaccctacatgttaacgataaggattggattttgatatggtattggaggatccaagttgggcacagatattaaatgagacttttccattgtgtggctcaaattgtgcatattagtagagtggaattttcgctcattataatttacgtacaaggattttatacatttcaataacaaagattccaactctatcgttgacatagaccagaataaaaacaatattatgtgtacattttattgtgaaatttttaagaaaatttgtgttaatatatatatatctattctactagtaaaaagttacgtgcgnnnnnnnnnnnnnnaattttatgctagtttttttctacgttattaaaaagtgataca

SEQ ID NO: 17096 - DNA, 2366 bp, Cannabis sativa
  modified_base (153)..(164): a, c, t, g, unknown or other
  modified_base (2123)..(2126): a, c, t, g, unknown or other
tatatatatatatatttttacagaattttacatagaaacttctattataactaattgaacaacttaaatcgcaaccaaaatctgtataacaatccacatataaattaccgaaaaaatcacttcagaaatctaaattgtaaatttgaaaaaaannnnnnnnnnnnatagtatatgaagtaatttttcaaataaagttggatgagggagatttcaaacttgtgtgatactaccaagactgccgtaaattacttttgttgatataccatcttatactataactttgggagctttaataatgctagtgaaaagagaacattgtcttcacccccactccttttcactctcttattttattttatttttttggattcgaataagagacccgagaagaagacatgtaatttctatatacttccataatatataaaattatatatttcaattacagaagtgaatttggtaatttttattttattaatagcataaacttgttagccttaaaatatgaggggttaataataaaaggagtaaacataataaattgatagagaaggataataataaatacaataatggataaataaaataatgatgcaaggggtggccatggaatggaggccactaaaaactaggaggtgttaagcctctaattgtagcactaaaatactagtctaattagtattattagaccaacaaagcaaaagcaagaaacgagggagctttgtcactcattttcatcctcattttgattcttcttgccttttatttaaagaaaaaaaaaaaaatcattgttgacctccaaccctcctcccctttctttacccatatgctaatttgcatttaaacattattcttcatatttaattactaatttatcctttttattttgtctaatgtttagtattgtgccaaattttatgacaattatattttagcttaatagagttaagaaaaaaaaaatcatctaatgtaatgataaaggtcaaaaagtgtgttaaattttgcattattgtatatttattttgaatttagtattaaaatggtaaatttgacacaatataacaaagtggaaccatgtgaactattatgcaatatgcatggataaacataattttgagttactttttatttcaaatttagtattcatattatattcaaattatcttaataattggtgggagaaatatgaattccatattcaaattcatctaatgcattggatcacatttcattatgataattacatttatattttattttaaattatttttatctggttataataatataaccacattcaaccactttagaggatcaagtagtgttattgaaaaataaatgtcattcaacatcaccaaaatttaaaaatagacaaacgaatcaacaaataataataataacaatgaaaagtggttatattattaatgaatgcaaagaaaaaaaaaaaaaaaagaagatcagatacaacaacatcaaataaacattcataattatatcaacaacttcaaatataccaatttgaaaagtcatcttatcaccacattataacctaaaatgcataaaataataaaaataaaattccattacataataacataggaatcaaaacaatactatcatctaataaaatatatagggatataattttgtttctgtactttcacggattggattgtaattcgtgatgtacgataatcgtcaaaagaagaaattatttgatctgacggttgagattgattaaagaataattagggttaaaaagtaaaaacataccctgacactcatttaatgtaccttgagacccatataatatactacgaaataataaaagtacgaaacaaaatcatatccctatatatttcttttttacagaagacagaatgagaaatgatattattaccaaattgaagaacaagtgtctttagaatcatatcaaaatacacaaacaataattttcctaaaaggtcccaccatcataaatcaaatcgaaggttaaattagtcatttcatgctgacacaccaataccattgcacagaccaaaaaaaggcagaaatatattatttaataataataataataataataataaaggattctggtgagagaaagagagagagagagnnnnagagagagagagagagagtaggaaaagaaaggtgatgaaggcgatgaagaattccacaaacgcagcaacagcaacaacaccaacaccaattccccgtacaaatggaatcatcgtctttcttcttaaccgcaaccactctttactcttcttttctccaccaaccaattatttcctctctcttcttctccattttcattctccttttctagctatccttttctctttccctctctatctctc

SEQ ID NO: 17097 - DNA, 6482 bp, Cannabis sativa
  modified_base (6442)..(6447): a, c, t, g, unknown or other
aaccatgcaacataaaacgatttctgatctttatcatttagggcacaaaacacaacagattaatgttctaaaaatttgtgatcaagccagatctgcgaagaagtttagttgtcactaaatcctcaacctttaattgatcttcggagaagccttattctgagccgctttcttggctatctctgtagttttagcacttttggatggaagttctggaaaatgtcacaagagttggcaagtcatttatagcataagaaactcttaaaaaagcaaaattaaagttgggtgatattaatacctggtagctagaagttcaggtgaagggaaggcaccccttttacaaggaacacagaggagaagaactaatattcgcggagatcataggtatggtccccatggctaacagggtagtaagagtccgggtgcttgtcgaatctaaagaagcccaacttcttcttatttatcctcatggcattagcctttacactgtagaagtaaaggatttcttccggggagggtacttccaatttgttcatcttgcagaagacatagcactatgctagacgcctatacaatgaagggattagctggaaaggagctatccaattttttgcaattagatgcgcaaagtaggttcttagaggaagatgagcaccattagaaatgttggaccagctccactcattgaatcccttcgtgctggtagaagcagaccctcccgtggtagatatcctatgccacatcaatccagggacattacggagaccatcgccatcagcatagacctacaacatcccataggaccaaaagcagttgactttctggttcatctctcagacggagttgttgtatgcctatgcagtaaagagtgtcttggccctcctctttcctttggcctttgcaagggagccttcctctacagcaggttcatcctttggaatagttttcagggtcgcttttgactgaggtattatagcgggagccatagcaagaccaccttccattgtagtttcctcaacaagagtgataggcgtactttcagtaattcctacaatgcccgcttaggaatcctggttcaagtctatttctactagcacaaaaataaagagaaaagcgagcatcttgaagcaactgaccaagaaaaggaaaacctccagactgataccccaatcgacccaatcccacgattaacaaacgtacaggaacttactataacctcacatgatcaaaaagaaacatgcctaaacaacattattttcttttatgaaaatttgattctcagaaagattttctcttaacattgcaaaatttctttggcatattctactttgctactcaacacgtaaacagtctcaaccctagcatgagcaagaaatttctatcctacacatgaaatgttaaaagtttagctaggggttagtgtacttacttgttgagtggagagaagatgggtcagtgccaaagaatctcgtctcaaattttcaaacccaatcgatgaggttgttgcaactggcctaaaagtcgaatccttcatctggcaaagggtcgagttggtcaatttgtagaggttcaatgtcaggaaaaagcttcacgcgaaagttgagcaattgttggatcaaatttttgcactcttcttgcatgcaataagattgacaatagaaaaatattataggggaaaagtctgaagtatggtgtggaataagtgaaaagaacgttgttaatgtcaatttatacttctagaagacaatcagttctttcaaaattatcggcccaaatcttctatcataattcgacagctggggagttgaaaaggccagaggcatttattagtcacgatttacctcgagtccatcaagccataaagaaaggtcttttcaaattgtcgcaccatcagttttaactttctgtggtagatgcatcccaacacgcgtgtaatgaattaaatagggcattttgtgtgccgcatgattgccacgtcaacaatttttgatgctccatctgcccttaatagatcacagctcatcaataagatacatccgcgaccccaatagttaaaaggttagtgcatgacaatagtgtaatgaattaaccagggcatttagtgtgctgcatgattgccacgtcgacggtttttgacgctccatttgccattaacagatcacagctcatcaaaaagatttattcgcaaccccaacagttaaaaggttagtgcgtgacaatagtcggttccagggagaagtagcaagctcccagaactcagaaagtcctggaagcttgcaggggtaaatgttatctgtatacccatatacttgatacgtggcattcgtggaaaggtgccaccatgtactatttgtaattagcgtgtaccctttgtaattagtgtgtacccagaatctatctagctatattccacctagagcttaaagcgacagtttcataccttctgacaccgaatcagatcttgccccctgtgtcaaaccatggtagtgcacatacgtgtctttgtagcccctttttgtccaacgacttgtctaggcaaccacttttaaatgagaaacctttgagcaacatgtgtcgttgttcccaaaaaatgccttgcaatggccatgcaccacacaatggaaaagctacctactaaaccagtagtcggctgatcatcctattgtaatatcagcccatgtggcatattgagtaagaaactctaggtaagtaaagggtatgcccttacccacatgtgtgcctataaatattccgactttttatgtgaaaagggtgaataatttttttctgccaaaattcctggaagctttattcttttctaagagaaacaaaaggaatacacaattaatattcatactgtaaacacttgtaatacttaaactctcgccggcaaagctaatataatggattcgtggactaagaattattaatgtctaaaccacgtaaaaaactacgtgtctattatttatcgttttatattttttttaagttctaattaatcggcttcaaaaaaaacatagagtgtggtacaagttatttattattttttaataaatttatatatcattttcttaattataagtattaaataatgtaataaataaacatattatttacttaaatatatatattaataaaatagtaattaagaatgatgagaagtatggttacaaaaatgtatgtaaatgtgatgagtagcaagatttaatataaatattatttaataaataaatagagtaagcttgcataatatgaaatgaaaaataataattaaattatttattactttttagtaaatttatgtatccttcctttaataattaccattaaaaaaattcttccattcacaactctttctagtgctggcagctaacattacttgccaattattgataatactattttgggggtgtagtgagtaaagaaaacatgtttcatcgaaagtcaaataaccattttggttcaatttgaagacgcttcattgtttcactgcatacgtggttattaacatcgtgatagtttcccaaatttagcgtgtggagattaaacgccgcaagaaaagaaaagaaataccctatttttcctgaatttcctttcctctaatttcaacttctccaataataataccggctaacccggtttcccggttccgaaaacgattacgtctccttcccttacgtgtcaacttaccacacccaccacttttttcatactcgcctatttataaattctttctctttctaatttcacaatcttcgaaatactaaaaaaaaaaaaataatcactctcttcattctcttctcttacaaaatctatctcaaaacttttccctgaatctcaattcataaaattttcccaaacggtagatgagaaactcaaaaggaggatccacaatggtagcggataggcccaataatggtctccttgccagacccaaattcggagcactgttgcattccgaatcaaatatcttctcgccacgtcacaaagcgtcccacatcgacgacgacaacttctccggccaccgtcaaagtagctcgtcggcgatgagtccgggatcatcggttagtgcttctccctacgccatgtccccttggaataatcaaaattcttctccgtacaacaagtctccttggctaacatcctctccgattattttcactccttacgaagaagatcatgagaattttcctcgtaatggcttaatccggtctattgtaagagaagagggtcatgtatattctttagctgtttcaggggaccttctctacactggatccgacagcaagaacattcgggtttggaaaaacatgaaagaattctccggatttaaatgcagcagtggtttggtcaaagccattgttatctcgggtcataagatttttacgggtcaccaggacggtaagattcgagtctggaaagtctccccgaagaatccgcgggtccacaaacgaatcgggagcttgccctctttcagggattttctccggggctccatcaacccaaagaattatgttgaggtcaggaggcgacggaatgttctccgtataaggcattacgacgccgtttcgtgcatgagcttgaacgaagaacaagggttattatactcagggtcgtgggacaagacaattaaagtctggcgaatcgccacgtccaaatgcttggaatctatcactgctcacgatgacgccgtaaattcagttgtttctggtttcgactcgttggttttcaccggctcggctgatggtactgttaaggtttggaggagagagctaaacggggaagggacgaaacatttcttggttcaaactctactgaagcaagagaacgcggtgacggctctagcagtgaacgtagaaaacgccatagtttactgcggttcgtcagacgggttggtcaattactgggaacgagagaagcacttgtctcacggtggggtcctcaggggacacaagctcgccgtgctttgtctcgccgccggcggaaaccttgtctttagcggctccgccgataagaatatttgcgtctggaggagggagcctagtggggcccacgcctgcctctcggtgttaacgggtcatactgggcccgttaagtgtttggcagttgaagaggaatgctacgaaaatcggggctccgaaaaggacggtgcggttgacccgaggtgggtggtatacagcgggagcctcgacaagtcagttaaggtgtggcgcgtgtcggagcacgtgccggacgtgaatcggggtagagcgtgggagcatcaatatgggagtagcggccaagggtcgcccaatgagtccgttgttagtggtcggtcgagcataaggtcggctgcggaaaggagctttaaccgtaggcacgaccaaaactaaaggaacgtcctaagcagtatctctgggaacaagccaacgcgctttcgatggtcgttgatggtacccgccatcggattggttctggggtggcgtagcatcgttttgtggttccgtaataaccttcatacgactggccaccgtcattcgttaaaggtttctggactcttttatctctggattgcattgattttttttggttgccgtcctacataactactaaccaataggagtgtgccacgtaacaaacaattggtcgatctttctgaaactgcaagtgtacgtatgatttttttgtatttgtttttctcttccaaagtacaaattttgcctaaaaaaattttcaagaaaaaaatacaaagttcaaaatgtcaaacccctttctgtttatatgtatttattatattaattatttgaaaaggagttgggtttgctgtttcttatttttgtaagtttcattttatacgttatagtccaaaagaaggtttagtgacctaaatgttgaattgaaaatttacgagtgtttgtacatatttggttttgttgggtttgactttgtgcaaatttgtgttgttatataattgttatacataataagtcgtatgcgtacaattcaaactctccttgattacacaattgtatgtatttataaattatcataatgaatatttatagaggcagctacactgtacacaatagtttgtttcttcctttatgggaccaaagtcataaaacagtggaccaaaacatatatgatatagaagatattatatatagcaaagacaacagtacaatatggacggttatatagtaagaatattaatgtatatcaactttctcgtttgtctactttatctacacttcttaaaccattcaattttacaagagaaattacagagatattacaagcagatgatttataaaccattcatcaatgatataatatctaaataaattctaaatgaaaaagctaagaaaaaaaactaaagaataatttcgattaaaataaaaatctaaccatgtccttattaggcgagagtcaaagttatttttattttataaatttcttcattgtnnnnnnttgtaaatactagtctaagttgtcatctttagatg

SEQ ID NO: 17098 - DNA, 7351 bp, Cannabis sativa
  modified_base (2003)..(2029): a, c, t, g, unknown or other
  modified_base (6605)..(6614): a, c, t, g, unknown or other
gggatattttatagaatttaattaccggtgggacccgccggtaataaaaagggttccgccggtaataatacaacggtcagactcccctgactattaccggcagaacctgcctctactaatccgccggtaatagttgttttaaattttgggcggtcaaattctcgcccaaggaattagaggcagaatttctgtctgtactagtgtgatccgccggtattactattttttttttaaatattaattttttttaattttcaaaaaacaatactagcggatgaccaattccgccggtaataaccaattaatactggcggtttggctccgccggtactagttccgctggtaattaataaatctgttgtagtgtaattatttgtaagatattgttcaaaaattatataaatataactaaagatttaaaagatacgtaaaatttaataattgtagaaaaatatataaaaaagtaaaacatgaaaacagacttattggccataatatgcgacgcgtcagcacatattggccataatacgacacacgactcgtcttttgaaaagcttgaataaaaatatagagtggagcagcacggtaattaattaggaacttacacaactatatgggagcgtttcatagtcattaacaaaaaaaacacttgtgtgaaaaatagcatatagcttatgttgtgattttttatataagtatagttccagcaacgtcataacaattatagctatagatctaagttctttataataaaataatgcttaatttaaccacctgcaaatatatttgcatccgtacaaatatataataatatatatatacacagatggatattattattgataagtctcgcaacctctaaatactaactaaaatctaactatctcatggtttgactggatacgcaaaacaaaaacattcatataaacaaaattcgtacgaatcggctggagaaacaaagtgacacaatatatatatatatatattcgaaacgctataatgaaagtgtaagatctaagagctcttttgaactaacattatttgtatgaggaacttggtttggaacagcagcagcagaagaagtcccaacaaaagtagcagtagtgaggagtgaagtttggttagtcttagggaccttgaaatttgaagttggaataatctcttgtccattagcatttttaccagttatgaagtcttcatgttcaaatgaaggcttccaagagagagaatctggagtctgatgatgatgatgatcagtagtagtacttattggtttgatcaaacggtcacgagcctctcgcatgcttctaatgagttcataaaacttctctattttctcttcttctccttcctcttcttcttcttcttcttcttcttcattttccctcactactacatggctgagcttcctcttcttacacatgtttccctttcccatctccattttgtgtaattaattagtgaaaagtgaaaaataaggtataaagggataattaactaacttattgttggatttgtttggtttctttgataaaaaaataataaataaaaaaggtgattttttttttcttaaaaaaataaaatagtaaaataggttatttcttggatgcttcctggttgcttctgggagactcggtcatcatctcgtgagagcgtgaaggtgtgagtacacaataacaactcgttttcagtcattttcattcgtttttctcgttggcattattttttgtttttgacaaacttgtataggcatcagctaaaataaatatacatggaaaaaaaattgtgtagattaagtttttttttacctacaggcattttctcaggaattgtagcagactagcaggtatatattaaaaaattacctccacttatctatgaaaatattaatttgtaaattaataatcagtctaaattttaataagtgataatatacactacaaaattaaggaccaatagtgataataagtctaaattgtaataatgagagagagagagagagnnnnnnnnnnnnnnnnnnnnnnnnnnngagagagagagaggagagagagaagaatacttgaatggaaatggtgtgaattgtgataacgaacccgaccttaagaagaagatagagaaaagaaagaatgggaaagattatggtgtttctaaaagtttgggtttctgaatgaaaaagagaaagaaaaaaaaaattaattggaggaggtaagaataaattagtaatctatttaaataattactatttaatttaagaatattattaaaaaataattttatgaataatctatatatataaaggagaagtatgaagcgttgacgtggcggtctaaaatctctccaaagttatttgtctttttcctccttaattctctcaatttttaatattttattaaagcataaatttacaaattaatattttactattatttttaataaattttctataaaaatatctatcttaaattatggttatggagtatttgactaggcgtctgcagttggtagccaatcaatcgaattttaagtatcaccctatgtgtaagagtctcaagataataagtctctgttttgcggatgatctgatgttgttttgtaaggggaacttaagctcgctacaggtgttgaagagtattttagatgagtttagtgcctcttcagggctagcaatcaaagctaacaaatctcaactctattttggaggggtgaaagaagaggaaaaacaggttatgttgagagaaatgagtcttttagaaggtttgtttcttctcaagtacctaggggtgcttctaagaccaacaaaatagaaaacagaagattgtggtgtgataattaagaaaatcaaacaaagacttcatacttgggcaactagacatctttcgtttgctgctagggctcaactcattaattcagtattgttggggctccgcaacaactggatgaacatcttcatcttgccgcatatagtatcacaagggagatcgagaagctatttagaggttttctttgggattggaatggtcatagaagtaagcttcatgtggcttcgtgggaaaaagtttatcttcctaagaattatggagggttacgattcaaagatagggtcaaatggaatcaagttgtccttgccaaatatatttgggccatttcttctaaaagtgacttactttgggttaaatgagtcaataatatttatctcaagaataattctatttggacctatgatctaaaaaattatacaagttggtattggaggaaactttgtcatttgagggacaaatttactcaaaatgatatagcaattgcaggggctgctgtggatcggctcaactctaaattgttgtataacagcaagttgctgcaatttgaatacgaaatcagcaacaatgtgtggagcagctacaatatgccgaagcacaggtttattttctggcaagtgaccaataaccaactgttaaccagggacaaatttgctcagttcaaaatcacccttgacagtattttatgtccggtctgtggtgctaaagctgagacaaacgaccatttgttctttgcttactgtctttcgcagcaggttttaacttagatgtgtgtttggcttagaatgagtagatggccaaccgattttcaaggttggcaaagatggttagtgcaaaacaagaaggataagaagcagagaatctatactactgttatggcagcattgatctacgatttatggagtaacaggaacaattgcatctttaacaattactcgaggacagctttgaaaattgtacaggatattaaagatatagtgttctatagattataagttgcaaaaaaagggagcttaaaaacttatgagaggaaatgtatagagaaactatactgtaattagttgttttgggccttgctgcctgttttgattaggtcgtaattgcttatggttaatgaagttcattcctttttgataaaaaaaaaaaaattaattttaattttaattaagcaacgtttgcataaaaagtctttctatagacatatatatatataaaagtattaaattttaaggaaaagataacacttgtaaagtattttcttaaaaatttacttttagtaatagtcttggaggcaacacttatataagtgttgcgcctttaattattttttagttaaataaaagtgttgttaatgatattttttctagtagtgttaagaatagcatcaaaagcaataaccacactaatagatgtaattctagtaacaagtgtatatgtatcaaagaaatctacattttttcttttttctaaaccctttgacaacaagacgtaccttgtactttttaacaatatcaattggtctcaatttctttttaagaatccacttaaaacctattgtcttacagcttggtggtatcacaactaaatgttaagtttcgtttgactcaagagactccatttcatcattaataacttcattccgtacaagtcaaactctagtgagtcaaagcttcttggatgttagaaggatcctcctctagagtatatgcacaaaaattagaactaaaatctttagatactgtagcttttttagttcttctaggttcagtttctataccctcttcatgctcattatccctaataataaacatgttactagatgatgcacccccactatttctcaatttaaatgaaaatatatgttcataaaaatcagcatcattaaattccaaaataacatgcacatttaaatcctaaaatctatatgctatctaataaacgcacattcatatactatactaaccactttaactctcttttggatcaggaattctaacaaatatcaaataaccccaagttttaaagtatgagatattaggttgtttgttttttaaactttcgtagtgtgaaattttgcttttagatttaggaagtctattaagcacataacatacaatcaataaaatattttcccagcaatgagaagcagtaccagaattcaataatatattctgttacatatcatcggtcatttgaaactttaggtagcggctcacgacatatttctttgttcttgcctcctcggtatcatatatttttctataatgcttcccatattttcttgacatatttggtagaattataataatcatacaaatcaccaaaacattattcaaaataaaaattttacacaaaaaatcattcgctatccaggagtattttttctaaacctgcgattcgtacttttcaacttcatccttcttctcgacaagaggtagagtctcaaacacaactggtttcaaaatagtcagcacaagcacaacttttttcatagtcaaagaaaacatcttcagcaagacagacggtgcgtgcatgtgtgggtcaagttgttgtgtcctcacccatttacacaaaattgggtactacttggggtcctatcccaaatgtcaaaattggaccttatatacccttataaacaagcgcttatatctcatgtgactctcttattttatcaaaaattgattaactttgtaaaaaattccgacaatcatagataaatataacaatgtatatatgatgatcatgaattcgaacaataataatatgaagaagaaaccttataatattatgaaattaattatataatctattattaataggaaatcgaaacaattaacgtacgcatgcaactagtagctaggatatcagtactcagtagtactagcaacatgattacgtactacatagcaataatataattaactattacaaactatagagtgaggctaagattaagatctaaactattattattattaatattattattactagtatagtagttggtttcttgggagatttctccatcttactggtcgaaggagttactctactactaccacttcggctaaaatctgagcattcaaatgaaggaacccaagtattattagtactattactgctagcagtactcaacttcctcttcttcatcttatttttctcctgtaacaacttattatcatcatcatcataatcagaattggaataatcatgatcagaggactcctttctcataatcagccgggtgcgagcctctctataactcttgatgagacagaagaacttctcgatctccttctcttcgtcttgtggatcatcttcatcatgttcatcaagaactattctgttatgatcttccttcttagttttattctccttatgattattattattattattattattctccatgatcatataattaacttttctaataagaaagaaagctagatgaagcagactgatgagactgtttatgcagtttttgtttctcacccttttaatggagtggaatgcaaaaacgaaatcatcctgacacggaagaatatatggttatatgaaaagacaatgttgcccttacccatcttatggtggccttgtcagttttgatagagacgcttagggttatataatttaggctaattagtaattttattaaaaaaattctaacatagatgaaagttcaggggcatgattaaatacatataaaagtttgagggagtgatagatatcaaagtctggggagcatgatttagtacctgaaagagtaaaattgaatgaaattagacnnnnnnnnnnaaatttaacaatctcaatagttcacggggaatttttaacaaaaattcaaggaacatgatttgatatatgtcaaagttcagggaaaaaattgctaattacccaataatttattgatgatgaaatatgcttagttgctgacgtttgtctgatgacgtctcacgaggctgctttcgcctacacctaatttgacaaaataaaaaaaatacttaatttattctgttttgctatattacactattgtatatcgtaccatgtatatatttattctttggtaacaaagcatatatatttgtttagtacaagagaaagacttaaaaactagctcacatagataaacaaacattaataatgaatgtttgctgtagatgtaattattatgaaattaaaggggtagttttgacattttaaaacggaggcttttgataaaattatttcacaccaaccagcactctccagaattaagtgggaatgattatttggaccctgagaaatgaaatgtgggggaggaaacatatcatgtggctttgactcaaatttattttctactataattcgctcttgtcaaattttatataatgttgtttactacaacctttcatataaaatttgactcaaacacatatcggttgttgcaccatttggagatcactaatactagtgattttgagattaaaatatagaagattgtatggaagcttcatgtccccctcccaaagtgcaccaactcatgtggcgtg

SEQ ID NO: 17099 - DNA, 1954 bp, Cannabis sativa
attattattattattattacctgttttaagtcttcttcgtaatctacaagactgaaatttatgtcagcctctactcctctgaacttaatagcagccctatcatatgcactgcataatagccaaagttaattggttttaattaattgattaattataattaatttattttgataatgaagatataaagaagaagaagtagaagtagatgttagttgttaccgtgcagctgcatgtgcagtgtcgaaaccacctattaatattattattaatatttacaaaatcaaaacaaaaaccaattaaaaaaaacataaaattgtatatatattttatattacaaaacacaacaattttcacacccaaaaatagaaaaatttataacaaagtcatacccagataaacttgttttccacaatccctgtataaggaaggacaaaatcaaaaaaaagaaagacaagaaataccccaaaatataattgattagattcaaatgcttacaaaattgtccaatataaaaaaacatatttataggaaagaagggaaaaaaaaaactaaaattactgtactgaccatatatgggactcccaccggccagttcgccggtaaaaggtaacgccgcggtattgagagcttctggacctgggcccacgacggctcttcttcatgggctgagaaacttccatagaagagggctttactgggcctgggcccagtgaatcggactggcagaacttcactccgacccatgcggcccggggaaacccatccactatatttccaccacccacatcggtggggccgccgactaagatggaggaggaaggtcccatttctgattcttccaccggaaagaagtttcgggttactggagatgggtctgtttccatggagaagtcttcttcttcttcttcaagctcgttgtgggtcactgagaacccaaatatcttgctattgctaccactacgcttcttcatcatcatcatcatgttacttcgggtacccattccgtactcttcgtccgatccgtcctcgattacaaccgccgatgagctcgaattcgagacggatccgacccgtttacccttttcgtcgtctccatcgacggaggttttctgggacgaacaaccttcggattcgtcgtctcgtctctgatcaggacagtcattaagatcccacattttttttttgagttcctctttctcttcgattttctcgagaaacaaacggaaaagaatcaaaacttaaagaaaaataaaaacccagaattactattcgtggtgttggtgggtttcaatcaaaaaaaaaaaaactttctcactcgaaagaaagaaagaaggaaaaagaaggtcagatatttatatgagatgaatgatcaaaacgacattgagaagtaggtagtttttgatgtcgtttgttggttgttgttgtttagagtgagaaaaaaagaagttccaagatcttggtgtaacaagctaaactgcccaatacagcatagacgaggccagtttcaccaaaagaccttaataccaccaccctcttcttcttcttcttacttcttacttctctctctaagtttctctctctaaccactaattgccactcttttcttttcaatgacatacactcataattcactctctttctctccctaatacagtagttgtattctataattttattgctatttctttttattttccaatcatttgtttttttagttcaaattttatatctgcccatttgtcagctctctctctcatttaaatataattattaatttatgtatattaatatgtaaccccacctctcacctagaagacatgaccatgaagaaggcttttactttttaaactcttttcttttctttctttataaatgtgacaattatatgctatacaatttgtatgtcttatggtttttaattaaaattttgattggtgggattgtgagagagaga

SEQ ID NO: 17100 - DNA, 5366 bp, Cannabis sativa
  modified_base (4716)..(4719): a, c, t, g, unknown or other
aacattttcattaccattacaatgaaccaaacattatcttaattacaataactttttttgcttaaatgttttttttcttaacatatttagttacaataattactacttgctgaaagtaaaaaaaaatcccacacgggacgaaaatgcaaaaaaaaaataagtaaataaaataaaaaggactccggctctgggactaaatataaaacacaacataatcgaggatgaaactataaaagaaataagtaaaattatagtgaccaaacaatgcaataaataaaaattagtagcagaagaatttcccaaattttccataggtaatgaaggaaggcgggaacccaaaataaataataaaaacaaaaaattaaaattaaattaaattaaataaaatgctcaaattctattcgatgtccgtacagttttcacctctccccatacaaatatttatagagagaaagaggggagagagaatcccttcggtttctcagtttttcccctaaaattcagtaagggtttttggaaatggtagagaaatctctcaaatgcaagggttcgattcagactccgattcctaatgctgcttcttccgattcctcttctctcaaaatcactaaatgtgaagctccgatgatgatgaatactactacaactacaactactacaacaactactagtactactgttgttgttggtaaggaagaggaaccgccttctactattaagagacacagtgctcggattaagcttaaacagatagctgagaaggaagttcttgttcgtaaaagggtcgagttgcttgatcatggtccggaagttaatggagcttctaagaagaaaagaagaagggtttctccttcttcttcaccttctctttctttgccttctgataatgttgctgtagtttctacgcccgaatctgtggctgaaaaaaatacctttaacttgagtgagagtgttgttgttgttccgactccggttaatttggagggaaagagtgaccatgcgaaagttagggaaactctcaggctgttcaactcacattatttgcatttggttcaggttaacctaccaccattgtgttgttattgagtttttgtgaaagtagttttgttttgctttgttagcttaggtttggttcttactactttttgggtgttttccccctgttttataggaggaggagacgcgatgtgcaagagttgttgaagataagaaaaaatctaaaggttctaaatcgaaggtaaacttctgttctgttgtaatgggtccttaaaggaaatggtttctgcttttttttttttttttttttgggttcatgcaagtttagtagaatgctcttatatttatttttgagatttaatcgcaccaaacacaacattttcataattatcaaaaccctattatgggtttcattaagttttgtagaatgcacttatattcatttttgatgattgaatcacacctgcatttatttaattatcaaagtcctattacgaggttcattaagtttagtaggatggtcgtatatttatttttgatgatttaatcacacaaaacacagcattaaccctattagaaaaattctgtctcttatacttattattagtattcaaaatattacagaaaaaagttgtggtagatcttcttgagtttgtgtgaatagttttgttttgcttggttaggttcttactatattttttttttctgttttgcaaagaaggagaagcaatgtgcaagagttgttgaaaataagaaaaaatctaaagcttctaaatcaaaggtattttctgttctgttgttaataggtctttaaaggaacggtttctgcttttttttttggtgttcatgtaagtttagttgaaactgtagaatgctcttataattattagtattcaacatattacagaaaaaagttgtagtagaagtagaagtagaagatacgaagatcaaagcaaagcgacctgatttgaaggcaatatccaaggcaagtgtctgatgggctattttctattttcgaagtgttttatcagttttgttttgttcatagattttatttagtcttatgtttttgtcacccattggacttatgaagtatttcttttaagcagatgatagagactaaaacggttttgtttcctgataaaagaataggcaatattccaggtttgtggctttcattttaaatgttttcaagagtatgatattattaatgtggcctggttgaaaggaagaatgataagtttttatcatgtccaattcacttttgagcttattgtctatcggtgatgagatttatacattagtaaccttacacttttgaaaacttatgattatgatactctttcaatgctgaaaaaactattgatggcaggtattgatgttggacatcagttctattctcgagctgaaatggttgttgttggtttccatagccactggttaaatggaattgactatatggggcaggcgtacagtaaaggggtaatgaatctttcccctccctcttttgttaagggatctgagatataatacatatagggaatgtacataaatcatttatgtggttattataaaaaggaaaatttactctatttttcctttattggtgaaattgcaggagtacagcacttatacattcccaattgctgtggctattgttctatctggcatgtatgaggatgacttagacaatgccgatgatgtcatatatactggccaaggcgggcataatttgacgggtgataaacgtcaaattaaagatcaggttcttgagcgtggaaatctggcactcaaggtgtgtgcttgaaaagtttttggtttcctatctttggcaattttttttctctttgatactgacttattgacatggtagtcattgatctagccgacctatctgtttggcattccgtgcttgtgttgggagttaatcatgtcagacacccgaacttgtataactttttagtgcaatttattcgataatacataaacgcaaattactctctcaactactttgtagagaaaagtgatttgtttgtctgctgttcttgtttatgtagtttttaacttttttgcagaagaagaaacatcagaaaattgtagttttttttctcctcaagtacatgatacaatatgactataccaacacattttgaattcatatacggtatattttgtattgagcatggttccagttatgcgatccacagtaagtatggccctgtagctgttggtggttgcaattgtgaataaactgtaaataaatgttgataatacatgttgagacatgcttacttaagaggggtaagtcaaatagtctgatgttttgctcccacaaggtctggggtttgagtccttcttgagtaccattgtaattgctgtaatatctcaacatttaatattgtagatggttaggtgaggtttctttctagataatgtgtgatgatgcatgcttaattttttttgctgtgtttgatttgcttattaatatagaaatgtgtgaatggatgttgtaaatagtattgatttcaaggatcttatgtattctgcttccaatgcagaattgtgttgatcaaggtgtacctgtcagagttgttcgtggccatgaatctaggagcagctattgtggaaaagtgtacacatatgatgggttatataaggtaattaccttaagcacaaggtctattatatacttttggtattttaggctctgttggctgagcttctacttcatgcttttagcttctcagaagctctatctgagaaagctactaaaattggcttctgctaaaagagctttttagagctaaaagctgaaactcattggttccctagccagcaacaaaagtgcttttggagctttagaagcctaaaaatagcttttaaaagcctagtcaaccaaggcttgggtcaatgtaattatttttgttttggttgtttgtttgtctatttgatcttgtaaatatgatcctattgttggtcaagtacatttgccttttcgtctacaggtcgttcagtattgggcagagaagggtatatctggattcactgttttcaagtttcgcctaaagcggctcgaagggcaaccattgttgaccactaagcaggtttatatacaatcatatttttctgtttggaattctgtcttatcaacttaaaatgtgccatgatttttcttttcaagtgtgaatgatctgccttgcaaatcatatcatattttgtggaatgtgttcttgtttcacaatccatttttagattacaacatgcattggtgggccagtgagtagttctttctgagacttttcagttgataatgtttactctatttcaggttcaatttagctttgggcgtgttccgcagtcacttgcagaaatacaagggtgtgttataaataacattgaatatttcaaggaatgacaaacctttcatagtgttctgttgtaataatctctatacttttttgttgtctcaggttggtgtgcgaagacatcactggtggccaagagactatccccattccagctacaaatttagttgatgaaccacctgttgcaccgacaggcaagtttaactattaaactagtaggtggtggaacatgaaaatatgtattgtttgcttaccataatctttattaaaaggttaataatcaacatatatttctgctgtagtgacagtttttttttttgaacaatgaacaaaatttcattgagaaagaaattannnntgagtacatcataaagaagagatcgaaaattcttcatcaaaattagctcaccatccaccctaagtgcgtgcgcaactaattcatgcatagccataatggtcaaatgatttgctttagtgtcagtttttggttcttgagtttactcatcattttctttccaactcggtttcacttttcaaaattatcaattatttcaatgcataagtgcaagttcctttgttgagtatgaattttgttaactttcagattacaaatacttgaaatctattcaaccagcaaacaatgtcaagcttccttccagtgctggaggatgcgattgtgtaggaagatgtgtggattcaaagacttgtgcatgtgctaggcttaatggctcggacttcccatatgtgcatcgtgatggcggcaggtagggattatatatgaactgtttggtttatcctgctttctgtttctcttaccttcaaattttaacttttctatgtttaccagactaattgaagccaaagatgtggtctacgaatgtggccctggatgtggttgtggacctgaatgtgtcaaccgaacttctcagaaaggactcaagtatcgatttgaggtatttattcatactgctaattgcttaactgtcatcgaagatattttgattg

SEQ ID NO: 17101 - DNA, 7165 bp, Cannabis sativa
  modified_base (1922)..(1925): a, c, t, g, unknown or other
gaaattttttatatatttatatatacctgtagtcattatagctgaatgaattgcagctggactccaatttggatgaatgtttttaagaaggccaacaattccagaaacatgagggcatgacattgaagttccagaggctgcattatatttgactcttctcttatcaaattctaagtctgtagttgctggtgcagattcactaaaggcagcaataatattaactcctggtgctgtgatatctggctgtaagtgaaaaaaaagctaaagtaagctttgacatattatgactataagtgaaaaaattgtgacttaagaaaatcataatacctatgtcatcactaaaatgtttttgctaaaagtaatagtaacaaatactatgatatgttgttgctaaatatgttttaattcacaacaaattttattgctataaatgaggttgtaaatcattagtaacaaattgtgtcttttgggcaagaccttaagtaaaactggttgaataatgctaggtcctcttgatgagaatgaagctataattggggatggtttttgtcctatttcagtttttggctgagtgatgtaagccataggaaccctgcaaatattcacaaaaaagaatatgaaattgagtgcatgagtttgagtaaaaaagaaaattatttgatcctttattaaaaaaaaatgtagtattttaaaaagtaaaataatttctccaggccctgggtcgggttggccctaggtgtagactcaagattgaccctgaatcagggtcgaccctgagttgaaatgggctatagacaaattttttttttttttggcatttactataaaaataaatggtatttttaaaaatcataaaaaaaaaatatattttttaaaaagtatttttttcatttgggtccttaaaatgagtgggccctataaggccgaccctgtcctgaattttagtgagccatatgaaaaaaagaaattttgtgtctttatttagaaaaaaatgtaatattttaaaaatcaataaaaaatatatgaatatttttaaagaggaaattctttttgggcttctggattaaatgagccctaagcacaagcctaactcacctatgcacaaggtcaaagcctgtgcagccgtaacccgttttagcccaggcctaatcatgttagtagtagtacttacttggtagttttgaggtattccaatacataatttccttgagtaacattgagatgagatgtagggagcacatgaagttcagcagtgaagccatgatttcccactgagacattattaactagaatcattcccacagcaccagcaagtaaagcttcttgaccttgatcaagtgtgaaactttcatccccaacaagacataccaaaatttttccctttaccttctttggatcaagactctcagtctcacatagttgtctgaaatgaatattaaataaatgtgtatataattaattaaataataagttaatttgtttcttcgatcttttgggaagagaggatttgaacttcaaatcttctctttatcaaaagagatgactacaattaattacttacgctttcaaaggatcttttactttagcagcttttgcatccaacccataaatcaaaggataaaacttttgagatggcaagccacctaaagaaagacttagtccctacagtcatgagattatatattaaaatatgtcacttaatagttataggaaacttttatgtttagagctgcattgatcattacaattttttttcttacttttagttataataaaatttgtaattaaaaataaaaaattgtgaatcggtagttaaaaatattagccacaaaaagtacagtttattgtgattaaatgtgtttttagtcataatatttattgtggctaaaattaaattagtgacaacttgtatttaaatactnnnntttagtcacaaataattttttgttctcattaatttagtcacaaaaaaattatgtgactaaaaggtagtaggttttttttttttagtggatgctctcctttgtattttcgacatccaaatagttttaatcttagttttttctatatgaagtgtacaaagtagttattaagaaatcttgtaaatttttaaaaaaatcatacaaatttagcgcactgtaatgttcaaatagtctattgcatacatctctttggtacacgtgtaaaataaattgtttgaactatgctttttctatataatagatcattataaatttcttagaactttgcaagatgtattgctattaaataactatattgtatactctcatataaaaagttaaagaatattaccttaagatgctttttgtttccaagagctacataactatggaactcgcgatcaattgtgctagcagcaacggttatcatccatggtgacgcattagctactgtgtttgaattagatccgtcattgccagctgaggcaatgacaacaatatttttcataacagcatgaaaactacctattgaaatcgattccttaaaatattcagaaggtctaccaccaatggaggctgaaattacgtctacaccatcacttattgcagcttcaaatccagccaaagtatcagcttccgtgcatgaattgccttcgccccaacaaaccctataagcggccacccgagctttcggagatccaccctttgcagtgccattgccattgccaaatatgtttactccagagacaaagctacccgcagctgtggaaagagtgtgcgtcccatgtccactaatgtctcgactagtaaataagttttcgctagtagagatatttatggactttagaagtgcaatataacctttgttaaagtaccttgctcctattatcttcctacacaaatattcaaaatcgagaagattgattagtcattatcatattcagagccgatcctaattataagttatttgagcctaaagataagaaagaatttataatttttttatatcatatttactaaactgtaatttaaatcagaatcaacacttatattacgctttttgactaacctattgcatcgaactttatctttaacgacggattgacagattccacgccattttgatggaatgggtccaattccttcatactcactaaaactctttgattcaggccaaacacctatacataaaatatatataattgtaacttatatgattagttaatctaattacacttgtaaaaaagaattacatatcgttaatgatgcgacattttaaattaatcaatcatatttatttaaattggaactcattaatttataaagcaatatgtacattactgtatatatgtaatcttattaatttcgcatattatggttagttgttaagaacaataagaaaattaccactgtctaaatttgcaataattacatcttcaccgaatcgcgctttcgtccaaatagattttgaaggaacacgaccgctatttctttctaatccaagaaattcccatgaatgagtagtgtgcaatttcagttccttgctcagaaaaacggatactacattcggatgctctgtaatatataattaattaaacacaatattttagatcatatattataacataatagaaaagagtgtgaacaaaacatacatttactcacttttactattaaaatgatagattatatatattttagacaaagtaatttttacagctaaatgttactgttagttacaataaaaaaattacttatcgttaaagtataatatttaaatataaattgttattaattaaatttttattacaatatttgtttgcgtctaaaatatatatttattcacaataaattttgacttttttttttaactttttagccaccatttttaccttttattgaaaaatttaaaactttttgtgttttgttgttttttgttttgtagtggcacttactttgaatttcttgagcttctatgtcatgaagaattgcagcaaagccattaatatgcctattatatgagtaaaagatggcatcttttgctttttcctcactgcacaaaaaatccaaaaaattaaatctttatgaggaaaaaaagaaaaattaaagaagagatgtatgagattaatattaattggacattaattaatgataataaccttcctaagtaagatccaagaagagtgtgatgagattttgtggctttttcaagatcatctgaggtagggtttacaccatgagaatgtgttcccatgtacacaatatatggctgcaattatacatacacacaaaaaattcttttgatttgctaaaaaataagttcgaaaaatgaaatgtattttttggaggagtaccggaagttcagtttccatctccaaaactgttaaagttaaaaataaataaagatagatttattaaaatgaagatggttaattttttgtaattatgagatttatatatatataactataaatgcttgcctttttatgagtggcttgagcttgtgattggagcaaaatgaaaataagaaaaatggtaataagaagagaagaagaaacaacaacactaccatgtggtgccatttttttcttttgaaagaaagagattgaattgggtgataattagatctttggtttcttcttcatttttatggtcaaaataatgtagcatatctacattatttcataattaattaataatatatgtaccttattttattgtataataattagtccccaactttcatgtttctttggcaacttgattccctcactttttttattttattcttttaaagttcaaagtgactatatgtatatctttttaaataataaaacatctttaattatgaaaaattaattattagattttttttttgaataaattactttaaattaatagtagtgattactgattaattaataacctctccatagtttcctcaccttctctctcattgcttatctcactcatatccaaaacttattaattttacgaacattgttattaccagtggtgcccaacaccttctataggtaatgcttcacgattggtcaacaagattacttaaaagttatttttttgagttatataagactcgatcgatatttaatataataatatagtatgacatggagagtgttgaacattaataatatattttaacaattctataattttactaaatctaaaacttgaaaactttatgatagaggtatatgaaataatatattatataatgtactaatgttgagaagaagtgatttttttaattaatttttcacaattattgaagatcattgataagaaaataatcacatagaaaactatacatatataataaactaattattgaagaacatatctttgcatgtacactaaaagattagggactaatttgacaaataataaaaaaagtgagggccgaatcaagtttctaattaattacgatatagataaaggttagggactaactaattagacaaattaataaatttattatctttttaatttttaaatataatacacgcactatggatataataagagtcacatttttgataaaagaagaatagtttaattaggactgtaatatatttgacctatatatatatataatagagtagggttttgcatggtccataatgatcattctataaaaatttggcttagataaagtgataatattgtaaagatcaattaatatatatatatatatatatatatgtataattgagttaaacgaatcccatgctaccaaattaaataatatataaacaattatgatataagaaaagaacgattatcattaatcaaataaatctataagagtatttaaaaatttcggacaaagtacatctatctaaacacgaattcttaactagtaacaatttttatcagtgcatagataacattaatttcttttttttttttaccaaatatcatttttatcacaataaaaataatattatttgtaactaaaaaataatatttatatacaatttataattagttcaagaatatatattcataataaattataatttttgtaattaattaatattttttttatatataatcaaacaaatattgtatattgtgactcaatttttttttattttattatttttttgtagtaattaaacataaatttggctcaatttgaatgtataaatatctacattttcaagtgctgatctatgtatatatacgtatagttttatatgcaagtggccatatataaaaatagaatatattgtgttaatgggaataagaaaagtattgctttaattaatcatcattcattggtttcctcttcattttaaattattattttatacttaattagtactcctcctaatggctctaaatttctttcattgtaatacatgcatgtgcactgagtgcaagtggcaacactttgataaattattaggacttgatataattgatccatcttgtagggtttaaacattattggaattaatgtatatataatgtagggttttgaatggttcatacttaattaacaatttataattgattaaataataaaaagcaataatgtaatatacatatcactactaaaaaaaaatctttgcattcatatgttaattactgaaagagtttgttgctaaaaaaaattgtttagtcacgttttttttatgttagaattagactgtgtgttaagagagagtcgaccctgatcgaatatatgacctaaggcgatttaaattttggaacctttactttcaaaaatatataaaaaaaaatattaaaaaatagtgtgataggacctataccattgtgtaatgtgtcatacactccaaacaaataagttattgtttacaatacacttaattttacttaaataaaaacctaataaaactttttattttttattttggaaccacgaaaagtgtgggtcttaagagcataagcctagctcgtctatgcctagagtcgatctgtcttaaggtgtcgtttggttgaaggtaataaaatgtattggaattgaaatgaaacagttttaattctattttttttatttggatgcatttaaaaatattagaatataattccaatatagaatgacttttccattatttagcgaaatgacttttctatttctaatgtaaaaatgagaaaaaatttaataattttttattaattttttatagattttaaatttgattgtattctat

SEQ ID NO: 17102 - DNA, 3229 bp, Cannabis sativa
ttggaccggtatgttgagatgctatcagagaactatcaatttaaagtggccacaaatgttttcatgttgttcaacctatgagccttttttcaaacaaaattattttaatataatatatatgtattaaaattaatatagtctaagtgagagaatgttagactttttatttgggctgacattaaattttattagttttattaaaacttggattgattggatagttctttgatgtattagcccatattgttggcgatcaatagttaatgagcttagcatctgtatataaagtttaggtaaagcaaaaaagtgggcttttctagttaattgaaacttttgatgagcatgtctttgatgaacatgtccagtccaactagaattatgtagttaagtcccttcctaattttataaatatatattgtctcatcataattgtatacttttgataatcaaataactaaactcttttttatttaaaaatttagaaaaaaaaaacttaattaatagtattgcactattaaattgtaataatttatgaatcattcttatcatttttttttattatatacaaatacatgttaactctatctttaatttatgtaacaatgatgtgtttgtttgataactttatggtgtcttcgggaggtgtgacgttgatggaagggcggtgtgggtcctccctttcactcctcactatacaaagtgaaatgtgaacgtcaaaggaaagacgagagtcgagagagttcttggcagctagctaagtacgtgctcaccgcgtaacgcgtctcaaacacactgcaccactcaaacactctcatacctttttttattctctaatccctttaccaaaaaaaagtctaaattggttggtagcacgatttttttttttaactttaataaaaaacagaaagagattattttatttggctaattgtcgaggaaaacttcgtcacattccattgctgacacgtggatgttctttaccgttggaaatgtagatccagcaatgttctcgtacccccatgtaatagtaaccacatggttaaccaatcttctttagcactaaaaaagagaccaaagcaatctgttcaaataacattcacttttcaatacagccaagttctaaacggaaaacgttctccatgtattcgaactactgtgaagatgttattagtacgacatgataaaaatccccacttcatttttgtccaacttaaacctttttcgtttgcttaattatcacctaacatctcggttactgttttttcaatataaaaaataatcaattataaggcaaaaataaaataaatagtagccaaacatataatttgaccacatccatattttgaaaataaagcccttggataagtccaaacatctgtccatcctgcccaaaaaagaaaaaacgaaaaacaaaataaacagcattttttttttttgcctcagagcaaagataaacatatgccacacgactttaccgcattaaatttcttgtcctgtttttctctttcttcccactataaaatagcaagtcattattaactttccatatttctcccaaaaaaaaatctcacccccaaccttacaacccatggcagctcctctattaatttcttttctcctcctctacttcacggcggccggagagtccatcggagtaaactacggtactctggccaacaaccttccgtcaccggctcaagtagcgaactttctcaagacccagaccgtaattgaccgcgttaagatcttcgacgttaaccccgacatcctccgtgcctttgccggtagtgggatcgccgtcaccgtaacggtaggtaacggtgagatcgtggggttgaaggacccaagggtagcccggagatgggtttcggccaacataaaaccgtttcatccggcaactaaaatcaattacattgcggttggaaatgaggttcttcattggggtgataagttccaagtttctggcctcgtcccagccatgaaaagcctccaccacgctcttattcaagaagggattaaagatattaaggttagcttcttctttctgtttcattaagcaacaataaatgagtgtatgtagttactaattatgattacaacaggtaacatctcctcattctctaggaatactctcagtctcagagccaccaagctcagctcgattcaggcgaggctacgacagagcagtatttgtgccaatgctgaagttcttgcaagagactaactcaccattgatggttaatccttatccctacttcggctacaatcccaaaatgcccaactactctctattcaagcccaaccgtggcatccgtgaccctaaaaccggcatcacgtacacaaacatgttcgatgcccagatggatgccgtacacacagcggcgaaggctattgggtttggaaatgttgagctggtcatcggcgagacgggttggtcatcggcgtgtgaatgggaggtttgttcgatcgatcacgcgagggattacaatgctaatcttattaagcatataaattcaggaaaaggaacacctttgatgcccaatcgaaagtttgagacttatctgtttgctttgtttaatgagaatcttaaacctggtcctcttggtgaacgcaattggggtctttttcagcctgattttactcccgtttatgatgttggcattttgcgcaatggacaggtactaataatactttatctatacttattcattaatttattactcgaatcaaattatctttcatattttcataattcacgtaacatgtatattttttttagggcttacatttcttcacaaatttgattttcttttttctttttctaccctattctttttcttcacaaatattctcctttttttttttctaaattgttttcctgtttttctaaatggcatttatttaaaatattctgaaaaattatttttagaatttgagaatattttagtgctgaaaagaaagttttaatggcagttttttaaaatattctctaaaatttttagaaattcatattaatttgaattagactattgaatcatattttctgaaagaagaaactttgaaatatttcttttttgcaatgaatgttattatataaatgtaaaacatgaacaataaatttagaaaatttttaaaatgaataaaaatttagaatatctcgtactatatttttaatttgatttctgtgagtgttcttactcattgtcttcatagaaaattatctactcca

SEQ ID NO: 17103 - DNA, 5905 bp, Cannabis sativa
  modified_base (895)..(909): a, c, t, g, unknown or other
cacatagcacacttcaattttatttctccctaaactcagtcatcatctcatatttattaaccttttttttttttttatattcaactcttgcacgtccaacaattgacattataacaccatcttatttaactgaaggaataatttcacaggtaacaagcagaatgtcacacatacatatacagatctgaatacataaacgaatgcatggggaagttccacagttgcctttccattatacaaatgcaagcaaactagagtccaaatgtcgcatcataaaaaatgattttttttttgcatcaaatggtagttgtatatgcaataagacaagaaaatggctataatagtaaggattgcattaccataggaaaatatgtctctccaccctcaacattgtcacttaagtacattagcattgttgctattctctgaccaccacgcttcaagttaaactgcctcaacagataaaaataaaagaattctcagtttctcacattacaagagcaagagataaaggtctttttttaggccaagagataaagatcttgtgaagaagaatatacaataagagaatcaatgtaattaagtaattaaatgtgccaagtcatgttgaaaaacttacagtatcagagaagtagtcgtgatgaggtttgtaaaactcactcttttcatacctgtactgctgcagatgtcagccttgataattaaaagataataatatatcttttcataaacatttaattttctagttaagaaactacattccaccttaagacttgaatcagctccccattttccacaggtatttgtgaatagacagatatacgcttttcaatagcctgatggcaggagggtgaatagagattaaaaaaagcctgagagagagagagagagagannnnnnnnnnnnnnnagagagagagagagagaggatttaacctgtatcattggatactttttctcttcaggagaaagaaacatccccgagcttgttctaacattactctttattccctgaaattgaagcaatgatgagaacaatcatgtttttattccctaaagaagttaggtagaaccagaaactcggaattgacatcatctttacagagatcttccatagttaattacaaaacaaaaattcagaaaggagtagagaaacttaaatgctatcatacacaccttccctgtttttgtgtccaccacagtagaaacatgaagacgggggagggctaaacctctaagatagtcacattcctgtaagaaacataaaattctttacttcaaaacaatataattcggcttactttcaattagaatattccaccattcataagttaaaacaaagaatcttcgtagttttgcctggtaaagaaaataactctctaccaattgcctaacaacactgccttgcagcctcctacgattgaaataaatcctcaatacagaagctaccatccaaccaatgcaggttgatatgataaatgatgtactgatacatatagccttgctatttatttcataaatgtaatttaaaaaagaacacgtttccttccattctgcctcaattctctaggatcaacatgtttccaccttctaagatggggtggattggttagtagtttataatcacttgaggttttgcatagttaaactttctcaagtccttccttgctgctacaccaatgccctgtgggcaaaccactagaatttatacttcatgagttcatcatttctaatcatcaacaaattaacttgagttccacaattgaaatttgcaattataaattatctcatcttcactttcactcctcaatggacttatgactagcacgtaactcttctgttccactgattatattataatttattatctcaaaattgaagcacgtaggacttaacacaattataaagacaagtttgtagaattcggtggtatccaaaattaaaaagaagaaaaacaaaaagaaaaaagaagatagagatcatccagataaagagaagctgacttgatgatataatattaaagtgtgcatacctctacgctcaaaaaattatgaagtacgatgatacgaggtgaccagctaattacttcaggtttaacctacatatgtcacaagtagaaacatcagtgtctctaaaagctcaatttatcctgttcttgatatcacagtatgaactaaaacacaaacatggtaagacctagtattctttggcagtccaaaaacaatcatggaccatcaaagaaaatttcatgtctaattaacaaagaaatttaaattacaaaggaagcaatatgcatagaaggtgattaaggaaacctttcgctgacataatattcccaacaaagggaaaaaaaatcaaaagagcatcagaaattgaaatcagacattatggacagctcacgatctcaacccataagactggtaccaatacattttagatgttctcgcataggtatcttttatttttcagaaacaaaatcattttaaatattatattgatgcataaagttgtcctgggaatcaaaagcttaatcttcaaaataaacttgtctgacatacatatccaattcgtaaaactgttgcctctttgtcgtcattccaatgatgaatacctaaacaatgagggaaaaaaagcccattcaatgaaaaaatacatataaatctgtgtgtgtgtgtgtgtgtgtgtgaccccatacagggtaccatacctacctctgggcaactgaagataactatcaagttgacgcctgtgtgatgttcggaaattaggaaaatcagaacctataaaggaaacagtttgtaaaaagttgagcaaagagcataaaaaaaatatgaataacaaattgtgacatgcatacttaggagtatgaaaaagatcttatagaatcaaaatgacgataaacatacaataacttgagcgtgagttacacagtatggcaaaaacatgacaaatatattaccataattataagagaaaatacaaaaataagatcatctttaatgcaaaaattttactatgaagcattattgcaatgataaggaaatttcaccaaaattatacaaatcagaataaaagatatagtgataggaaccaaagacagagaaacagtaagctaaaatagggaatattattactgaaatcaaaagaaaaaaaataaaaactaaccaggttattcgagaaacctgaaaacctcccaagagctcaaagttcaccacactcactcccacatttcttacctcagatttatatattattctaaccacccaaacacccctgctaacaaaccagccatttccatcatgacagctgtcctagtagtactacaactcattccatagcaccaaaacatgaggaaagtaaaataaaaatgccaaataacttagataaaggattgaaaacagctagtgatgatacatccttttttattattcaacatgtcagaaactaaggtcacaaaaacaaactaaattatgaaaaagcaaaagaatattgagaaatatattaattaattaaaagaatctattgtagttcattgaatacaaaaggacctgaacccaaccctaccatagattaatcgatgtcatcaagaatgcaaaataaatataactataacagagattaggagagttgatctcgaatagagattttatcattcaatatataccatatgaatcttccagtcttcgtataaatgccaactgaaacaaagcacctgcaattccatatgagagaaaaagaaaattaatacacttgaaatccctaaagtttgtggtttattagtctattaaattgtattagaaacatagatgtttgtaatgccaacatgaaggaataaaagacaaagtatgaaggacgaaaccattcaatgtcagataaataattgcagataagtttttcagctatctggaaattccaactccccttaaaaggtactccctctagaaatggactgttgttaagaacattacttatcccggacaaagaacattacttatccattcagcacttaaaacttggacttaactaattaatatcaaccttaatagaaaggaaaaaataatctgacaaaagcaaaatgaaaggcaatataaaaaaaaatctggctacattttaggaacacttgtgtttatgacactagcataagagcagagaactttggtataacataacccaatatagggaactctagtttgaaacttcgacaatgctaaaaaccttattatatggataggtgacttgaactagacatacagctacaaaattcatatagtcagatcaactaatcatcgaaacatctaaatacccttaaaccttttcaatcatgatctagcatagcctaaattgtttacctcagtacaacagctataaacagcagtgccaaatgaatacaataacaatcatatatcctatagcatttatccaaaattactactccaaaaagaataggattttattattacttatattttttttggaaggatcaaagagagcatatgattttacaggaataatataatatgagtaaaatgtaatcattagccaaaacattgcgccaatatagttaatttctcattgacatagaacttaattggctatttttcttattcctcgctaagccaagtgaatatcagaaaatagctcgacgatctcatcgtcactctgatactaattcaacaatacaaatcattgatcgatttaagaaccatatacaaaactcaacatttagagctcttacacgttagcttccgtacatttcctcgggaaaaatggagaaaacttttaaaaatatatatatatatatatacaaacaatttgatttttcaactttcattgcaatgcattattaattttcgaaagatgagatgaagtggaaaattgaaagctgtgtacctataatcattccgatggtgacgaatgttagtaatccgaagacaattctcatggcggcggacatgggcgaccagtaaagatccagaaagtgatatagctatgaatctgtaagcgtttttttctgtgagaaagaaaaacaaagaaattatgtggagagatacgtgattgtgaagaataaaaaaccactctctggacccccgcccatggctttattttcctttccctttaattgctatagtatctctatatttttacaatttaaaatatattttcttgccttgtattctatatttccaggattttgttttattttttcttccttttaagcttaatttgacctcaaatgggttgactttgtacgaccgtattggacacgtatacattagtttggtttccgtagattcgattacagatttgttttagcagtttatttttaggaaaaaaaacaagaatatacaagaaaggcaaaaaaaaaattattaaaatatggccatttcaacaattatacacttcacaaataaaaaacttataaaaataccacttcctcttaactttcagccgcatgaaacagaacaatcaccaaaaaaaaagagcttcagtcgttcaacccgacaacacaaccgaaataaaaccaaatcaagaggaagaccactattaattccggcaaaatcactggaaaaaagacagaaaatagatcgaacatgaaattgatgaaagaaagagcaaaaaaaaaaaacaaatcctcctaatatcaaatttcagattcatataatgaagatttctaacaaatagatttggagttccccatcaatccaaatcaggtttaatccaaataaaagaaaaaaaaatatcaataatagatctaagatatatccagttgcattgtcgttgattttaagattttcaatattgaatatattaatttataatcaaaaaaacgaaaaagaaaattcaaatgaatctacagccacatagatagaagaatgcttcaaatttttttaggttgttttatagtt

SEQ ID NO: 17104 - DNA, 8577 bp, Cannabis sativa
taaaataatttccaacaacatggtggttctctagtgagcatcttagccaccctcactgggagaagctatgcaatcggataattgagatcacggagtcaggttcccaaaggatcttaaatacattagctggtgttgtgacagctgaagcaaagggcaaaggtttaccgcgactttcatcatatgttcagtgttgaatttttgttattgcaattatatttttgttctcatatttgtaatttgttttttttttaaaaaaaattttgttacaaatgtttctgtttaataagaaattttattattgtgtttttttcttttagtatttgattttactttttattcaaaaaaatttgatttaatttaattaaattaataacgaattagtagaacataaattcaatttatattttattatttattctattttttgcaaaaaatgaaataatattatatatatatatataaaaatgtgtttaacatccacccgacttaaaatatttttctagtctaatattgttggactagaaaaatactccttttatgttcgaggataccatgtccaacataaaaatggactaaaagacatatcatgtccaacttttatagacataaaaaaaaggttttttttttcttttgtagtagtgagtagacatagttttaatcaacagtagacactatatataatttaaatatcggtgacatatgttattgcactaacaccctctcaaagacctaccataattatattgacggcactgcatgtctcttaattattaatatttaaatttagagaaaactatagatttctaatatttataaattaaaaattacaactacatgttaaaatatttatttttaaaattatataacagaaactatctcagttataataaggtaatgttttttttttttttttttttgaaagaacagaagttcattaataagtgagaaaattggggatcacagggggatcaccctccccttgaaccaaacctgcagactgtctagaaatcctaggagatttttctaaactatcagctaaaagattaacatcacgactaatataatgaaacttacaaaggttaaatctactactaatatccaaaatagatagagacttgttgagggatctccaatccttggggcattgattaacagcaaaagcttggattgcggtttgacaatccgaaaataactgaattagttgctttttctcttcaatagcccacttaagcgccataaggatagcactaagttctgcatcaaaagcagagatagctttggtaaaaactgattttgaactccaacgtcctataagtctgcttaccattactgctgcaatccctgcctcccctctgagccaggacgcatccgtaaacaccatccaatcaacatccattgagaccatttgacaaccgagagatctattaacaaagcagggagttatctctgaatcatcaccatttgaaaaccttgaatattcctcgaatgccttccctactcttctgcttatctcgtcaatcttcaccacttctccaagacgacaaacattgtttcttgtcatccaaatttgatccatcacacagccaagataagttaagatttccttccttcccacaccagccgcctttacttcaagaaccaaattcttaacaaaatccaccatgttgatccctggaatatgttccactctcataggaaaattgcctaaaaaccagatagattttgtcaagctgcaatccctgaagaggtgtaaacaactctcttggtaactactacacagaacgcactccttgtcttcaataaaaggaagacgatcctttaccgggatagcattgctaagaactcgccaaagtaaaattgcaattctaggatgaagatccgaatgccacacccaattccaaactggctgctgatcttgaaacctgaggttttgatccaccaagtatgcacctttaactgagaaactgccatcatgcttccctttccaaattaatcgatccttgttaggaagagggagtctaggaatttctaagatcttttctccaacttcctttccaaaaaattgtagcacaatttcctcattccaatcattacccatcgatacatctgctacagttctcgcagtaaaaccccgagctctaagacttcccatcaaacttttaaaatcattgaactccaaccaaggaatccaaggttggttccagatgtcaatggactcccccccagccggtatagccaacgatcccttcaaaataatgtttcgaacttcaagaatacatttccataaatatgaatcgctattcttctttttcacggtccagaaattttcattcttgcaatatttgcccagcaaacatactatccacggcttgttgcttccctcagcaatactccaagtcagttttgccattaaggctctatttgcgtcctcaaaacgtctaatcccgagaccacctgaagatttcagttgacaaattgaatcccacgcctttagagccatgaaccttcccttagtaacttgcccttgccaccaataccttcttaacaaggcatccaattccctacaaattgagattggaactctatttgtagacatcgcatatattggcatagcagacgcaactgacttgattaaagtcaatctcccagcataagacaacagtctcattctccaaccttcaagcttctgtagcatactctctctcaacttcaaaaatctttccctcttccttctcttgaacacaaaggggttacctaaatgtctctcttcaccatccgattgcttgattgtgagtttctgcaaaatgtccttcctcttgtctgtagccaggttatttgagaaaagcacactggatttagctctactacaaacttgaccagaccatttctcataaagattaagacatcccattaaatttgttgcctcttctgaatttgctctcgcgaaaagaattgtatcatcagcgaacatgaggtgtgaaattggaatagaatttcttgctattctaataccatgaatcttccctctgttttgttggctgagaataatttttgagaggacttcctggcaaagaagaaagatatatggggacaaaggatctccttgacggagacccctttgaggcttgaatttctttaaaggcgtaccattcatcaagactgaatatgagacttctgatatacacgacatcaaaagctttacagccttcgcgtcaaaaccatttgcctgtaggaccttccttacaaattcccactccattctatcatatgccttgtgcatatccagtttgattgccattaatcctcccacaccccttttcttcctgatagtatgaactaactcctgagttagaatcgacgattcagcgatccatcggcccggaataaatgctgattgaagaggggatatcaaactttccatatacggtctcaacctattagctaggatctttgcaatgatcttataaggaaaattacagagactgattggtctgaattgatccattcttgaagggttattgactttcggaataaggcagatataggtgaagtttaatccttgatgaacaattccagacctgaacacttcttgaacagccgcactcacactgtctccaaccacatcccaatacttccggaagaaacaccccgggagaccatccggacctggagactttaaaggatgaatactgaaaactgtatcccgaatttcttcgatagaaggaattttggtcagcccctcattgagagtctcatctattttcctatcgaacagattctccaactccacaggaatttcaggattatcagaagcaaataactccttgaagtaatcattaataatacctgaaacttctctgatgttatccttcatattcccatacttatcttggagatgccaaatttggtttctcctccttctgatcgaagccgctgaatgaaagaactttgtacttctatccccgagttttaaccatagttcacgggatttttgacgccacatggactccttttttctccaagtttcttgaagttgttcttgaataaggaattcctccttgcaaaaatcttcagtaatttgttgcctttgaatccaatgcagcctactttccaaggcactgatacgatgatccatgtctcccaccttctcttttctccacttctgaagcgcccttctgatgttatcaaaattcttcaaaagactttttattcctccccgaggcaccttctgctaagccttgcagatttcatctcgacaagtatcttcccttgaccacgcatcataaaatcgaaaaggaatgaagcccttacttttaagcatgagagtatcgaacaaaataggggcatgatctgaaatcatgattggaaagtttaatattcctgcagaaggaaaagccgagctccaatcataagacccaatacatctgtccaatctttctctaattagacctccattaaacctcttattttgccaagtgaattggcatcctttgaatctcaaatctactcctcctgtatcttgaagaaaagcttctagccatcgagtatctgaagctgtcacttttttccctcccatcttttcttccttgttgagaatacaattaagatcccccataactatccaaggcccgtcgcaagcatttactttgtgggttagcatctcccaaaaaatagttttatccctctcatagggaggtccatagaccgcaaagagtctccaagcagggagaccctgagactcattaattgctacttcaaaaacattgttatcttgctccaaaattgtaaactgtaattcatgcttccagaggagacagaaaccacctgccaatcctatggctggaataattgcagtcctttcataccccaaacttcttgccatccattccatctttcctttatccaccttagtctccatgagaaacacacactccgacttatgctttctcacccaagctcttaaagcttggcttgtcgggtccctcgcaaggccccgacaattccatgaaaggaacctcatttggagtttgggggcttgataagggccgcctcctcgcccgtagctaagctttgatcactttccactggaacttcaattaaattcagggtatcctccaagtttttaactacatcaccgctgtgattactctcctttttggcttgtctccttgttcttggagtagactttgatcctgcaccacgcgttctctttgttactccacgagatgttgatgaagtagatgctcccgaacccattttgaaaggagtttcgatcggtccaggtgcaaactcaggcatttcaggaagttcctgagagaattctcttgtattgtattctgtacgttgtacatacggtaccaatgtcagacctgctttcctcttcctcagttgtgtgcattcgtggaccaagtttgaaacatcaacagggtcatggaacagagttggggccggttcaaatttgtctattggggcagggcccatgagttcttcagcaagcccaatttcttcagcatatatgggccatggaaagtgagtgggctcaggatgcttgtgtggatttctggacttacacagctctttatgttgtttatctatcatttgttcataagtaggccccatatggcccattattgtagttattactctctcatcacgctgagtaggagggggtctcgatgaatatttcttcaggatctcattatcagtttcttcagctgttaacttccctttgttgtgtatcctcaaggccctaggcgaaactgaccttgtcctccttccttgatttagctcttcaggtatacctttatcttttgtcaactcatgtatcttgatacctgctggttttttgaggatattgtcgacaactttcaaattctttccaaaaccagcccctggagattttccctggactctgattaccttccttttgagtcttccattctcattggtttgctgtacttgccttgggatatcctccttgagcagtccctttcctttgtcctttcccttaacttccttggccggagttggagatctgttcaccggcggttgagtatgtctcgcatcctctctgaaaaaattgagttgattccttgtgttaaagcaacttatgactgacgactccgcccttatccacggtccgaaagccggaactgccgcaccctccggaggaaaagcaaacacagtttctctaaaacaagccttcttgtcatgacctatatgcccacaattgtagcagaattttggtaatcgtaagtattgaaactgtatccactctttccttcccctgtaaatatcaaggaagaacccaagtgacacttgatgcttagttgataattccacttggaattttagaaagcctctccttgctagagctctttgatccacgatatcgcatcctttgtactcccctgcctttgcaacaattctcggcgtattcatggcatttaagtatggggttgggagtcccgtagctttaacccagaaaaccgctttgttcatgtccacatttgaccaatcaccctgttcaggccattcatggattattaggagttttccgtttatcagccatggcctcttctccaagatagacacacagtcttcctccttctcaaagaaaatcccccatattcttggttgtaacgttttgaacctccaatgtccatttagcctccatttctgctccaaaattcctttcagtcgagatcttgacacccctttaccttcgaaaaaacttgccaaaatcccaattctggcaatctcagcatttatttcaaaatctggttctaactccagtgtcatagactcaagaaaatcctgtcttaaatgttctacctcttcattccttagtgcctcagaaggtactgcattaacttcaggatttgagacttcatttaatgcaactccctcctcaggtacttgggaatgttgttggtcaccctgtactgtagactcattcaatgtagggtcttggggcagttgttggccaccttgttggttattttccaccatatcttcattcattgtgtcattattcgttccatcttgtcttactccatagccccccgagttgtccatcgcacttccagaaaaaagaatcaaaagagaaaaacaaaagtaacaagggaactcccaccttaaaacaacgttaaaaactcgaacaaagaactgactgaaacactcaactagaacaaaactctagctggacaaagtcttgtcaattggaacctccaatcttctcatgagagaaagtaactttggtattatttaatagttataataaggtaatgtaactgatacaatatagttatgtaacaacttaaacaacactagtttctttatttattctcatttattttttaccatgcaagatgataaataaaccttagcatctaatagaagagatttaccataaatacctttgttttttccaattttaattgtttaaaaattaaagccggtattattaaaataggattactgtgtaaaaaggtaccttatactgtagctatatatagtatcaaattagtagcttttcattgtagcgacagactccgtcagtcatctttcattgtagctacagtgcacttctaaaaaatgaatacttttttagatgttttttctgtatgtatataccgtgtatgcgtgtatactatattcaaagcctttatatatttaaggttgatatagtcttttacattttgagtttttttttttattattttttttctactttgcatcggttttatactaatgcaagtgagtttgtattcttaaaaaattgatggaaatgaatttgtgttagttaaaaattgatcatgcaaaatcctagcagttaaaatcgacataaacttttaaaagtgtataattgcctcgcttttagaagttaactgatgcaagaaaatcattttagagtaatgacatactgccttagtttctgaaaggcactgcaatttttttttcattataattgtatacaaatagcatagatcataataattcatataaatcatacattcaatttaatatatctttttttcaacacaatctagtgaaactaaatcacaaacccaaatattactttctagttcctacccatcatatatagtggagactctccctaatcagtttatcaaaattattataagaatcacctttaatatcagtagtttcatacgctttcttcttccaatacaaacttttttccttcattttctttcccttctctccttccatcatctccttcacaagcattgagacttcttctcttttgacatcagggctaatttccacccctatacccaatgtcttacaagcaaaatggcagttggtttgttgatcagcaaagaaaggccagcaaatcacaggaacaccagcacaaatagtctctatagtagagttccaaccacaatgagttaagaaaaccccaactgaagaatgttccaaaacttttttttgtgagcaccaatttaccaataatcctctgtccttaatctcctcaaaaaattcttcagacaaaactttagccgaatcagaacccattacaacatcagacctaactatccacacaaacgagtg

SEQ ID NO: 17105 - DNA, 10073 bp, Cannabis sativa
ttttacccttttaaaatcaaacataaataaaattttccttttaatacccattattccttaaatattcaaaatattatatactaattattttattttatctattaaaaatattacttccttatagactaaaacatgtaaaaatacaaataaaggtgcagccctagctagctactacttcatttctacttctcgcgcgctctcgatacttgggcgaagaccaaggagtgaaccaatgtcgcgttgggaggatcgccattctgactccaagcgccatcgttctaggttcgacagggaccccaggtctgtctctttttctgcttcatatcataattcatatatgttttctgtgttggacattggttactatctgaattgggattgggattggatttgaaatggtttagggattcataggtaagaatgcttatcaacttatcgtatgtctggataatgatccataatgtttctagattaggagaaatgtgcgcaaataacttggccatttttgtttaacattttcatattaggtaatctggatgttttaattacgttctttttatctctactttgaatatttacttgattatttgtatatattgagacgatgatgattttctaatttcatttctatacaatatgtttgcatatgaacgcatgaagcttagacatgaatgtgaattatctcccataagattcaaagttgaaaaattattatttttttagagtatgtgtgtcaagtttttaatgagcacttaactataataatcataacatggatcgtatgtatctgtcaatggttgatattagtcccaagcggtctaagagggatggaaaaccagaaccagagaggctacctagcagtaatagtttggacatcaaaaataacacagagcaagaccaaaagcatcgtccctccctgcaagatggatcgccacctaaaagtttggtaccaactgattctaaacccgaaaaaggggctttaagcagtgacactgacagaaaacccaacgggaagcacgaaggaacaaagctttctgcagttccaacggatggacctcgaccccggtcttatttcaaggtgttgtgtatgaaactatagtgaaacttatttagttgctagcaaaactgatgaaattatatctcattttcatattgcctttagaatcattagatcttagtagactgatactctgattcaacctcacaaattttggtttacattgaccatagtaatgcttgcagatattatagtatataactttctggttccttcccctcaaatatgtgcaaacagcatgtatgttgatgatggttacgggcttgtctctacttgaagtgaattgtgctgtttaggtaatttgggcttactgatggaacaaaccaacattagttagttggttacgttaaattgcagtgataggtcgaagagtgttaggaacttaaatttttaatttatttgttgttgtaatgacctgtaaatttagaagtgcaaacaaagaaacaaagaaaagttgaagtagcatttgtaaaatattaggatttgcaacattagatgagtaagtggaaaattatgtgtgaggttgttttttttttaagaaatatattagtagcctcatgtttgaaagtttaacatatagatttcatcacttcacaaaatgataagccagtcaaactgaactagaaagacattaatagctgcattggaactacctaccatgaaccttttgccctgaaatcccaccacttgagagggcatagtaggtttgtgatgggaactgttgggcaacaccctgccattataccgaggggaaaaaaaacctgtattctcttttgatttatataactttgtttctattcagtgtgtgcaaaccttttatctgggttgatgtagcggaattgttgttcagccctgtgccttgaagtggttccatgtatataacaatcttaggcttgcctgtccatgttttataacagcatgacgagcgtggtaatgccgcgcgagttggtcaaagctcgggtagaaacacaactagtggtgagcttctttcaagcattatctgtttttgttcatactttcaggctgaaagctcttaaatcatccatttgtacttttgttaatttgtaatcttccaaacgtaaacacacatatatgtatatatgggaatataactatacatattggtctattctctgcttgttacagaacgtggatggtggagagattcaagggatcaacataatgagaggacagaaaataagaagtcaaccaacgacacacgaaagagagatgatggagccaaaggagatgaaaaagccaactggcgccatgacaggttctctgaagtggaagctgatgctccaaggaaaagaccttcatttagagagaagaaaatccaggctgattttgaacaagttgatggagcagcaccagagactgcaaagctgagatatctcgatcagcctgccaaagaaaacagaaaggaggaacaaggccacaacactcgctattttgatagaaacgaaaaagcgttggttggagacggggcagcacatagaagagaaacacagaagagaggtggttttccttcaagggaaaggtatcgtggtggcgatgatgatgtaaattatagaagaagagatggattgattggagggaggtctgagttccgtggcggtagtgatggtcatgataataagtggaagcatgatttgtatcaggatgctaataggagtccaacacctaaaaatgaagaggatcaaattgcaaaggtggaagcactcttggcttcttaggttatgatttacaactatttttatcagctggtgcttaagttttggagttgtgtattaaaaaaactctattactttttgttttgtgtttctaaacatgtatgtttttctttatttaaaaaagtattaaagaagtactaattttgagtaaataggtgtatgttatagttttaatttgatattaacattgcaaagaatcacacacacacacacacagaagtactttttctcctgaatttaattctataaaatactttttctttgtaaacatttcccaaacaatgtcaaatgttggtgtagctactttttatctgaaaaagtggatgaaaatatgatgtgatagtagtcattttcttttcctggattatataaaacaaacacaattttgtgcgacaatcatttcattacttgtttttgtgtagtcattttgtactctgaattgaaatacaattaattaaactttattaaaaagatttttatcttaaattctaatttaattatgtaaatatataagtaagggtaaaatcgataaaagtttttttttttttttttttcagaaaaatattttaaggtgtgtcatacgtctaaattatacttagtaagagtatctctattagagatgcaaattggtaatcatcttgtaaaagtttgcttcaataatgtgctaaaagttgatccaaatttaaatcacaatatgacatgatgtaaaatttgtatcacaataataaatacgctgcttatattcacttttatgccatttttaatattttagcattaaatttagtcatttaattactttttaggattaatcattatacttaaatactattgaatatatatatttataagaaaaaaattagggtttctcatttttaaatctatagctatcgaatgtcgtcttttttctccggccaggtccaccgaccttccctgggcttaggcgtgtcttgtttgaggttgtgttttgatactgtcattcgatttttgttactgcgattagtcttgtttctgtgacataattttgagtgttttagtcttctttgtgtgacatagttttgacttttgagtgctttagtcttgtttgcatgacatgattttgagtattttagtcttgtctatgtgacatgattttgttttattttgtttcattgttggttcttctttattattcaatagcttgctattaaatcactgttagtggttgggactagcaagttttttgcgactgaaaaggttgttagtaatgcagtcacgtatcttacacaatagttgagtggtcaagctacgagattgaacctgcaacaatttatactgttgtgttttctgagcggtggatgaaacagaatgtagatgttttaaagttaactgtgatgctgcaatctttaatttgattttattttaatttttttgtcaaacgatctaggaattatacgactaattatttagttcatttttctaattctaattctagtcatgtctctaataacactaatgtcccgattagattataagctattattttaactaattactagcaataaaaattttataatttattcaaaattttaattcttttatattttatatattttttattttatattaaattttggatcaaattttgcaattgtctattaaaaaatataatattaaaaactgatgtaaatctatcacaaaattacattttatataatacaatttttatttattcatatcaagtaatgcataattgaagggtaaagaaatctcaagatgaaatatcaattaaaaataaaatagaaagaagtggaaaataaaacataaaaaaacaccacttaaaaaaaaaacagaaaactagaaaacggatctctatggcaaaactaaaaagtacagagagaaagaaagaaagaaaagaaaaacagtttaattaatcggtgaattgaattggttcaatccttctcgtcttcttcatttactgatcgttttcaaaaaccctaaccaaatttgggctcataaattaagaattatcatcttccattcccatccggagtctgatcatctcgcccaaccacacccactcaccagtctatgcaatggtggtctgtaaatgccgcaaggtatgcttctctctttccctctgtcttctttctcaattagaatttcaacagtttttgtttccgctttgatttctatgtgcaaatacgtgattaagtagctcgagattcagatcggatcgaggttataaactgttgaaaagctaaggtgatctctaagatcgtgaattagctccaacttactggttttaggtgtcgggatgggcgggggagattgaactctctacatatcgatcgatatttgaaatttgaatgaattatgtggttactaaatcctttgaagcgtgttgtggtgcattttgatttgctcgtatttattttgtataattgcttcgtctaattacatgtagttttctttgtgatttaggctacaaaattgtactgtttcgtgcacaaggtcccggtctgtggagaatgcatctgttttcccgagcaccaaatatgcgtggtaagcttcttgatttgttcgattgtccttacagtatttttaggtgcttgttgtgttgtttccggttgaatttttcgaaactctggttctgattctgtgttcttttagttgacgaatgtgcttttactctactctacttcatttttggattaacaataaaatcaaaatcatatggcagcaccccattttttatctgataattcacaatttaaattgtttaattagattctgatttacttatgtttattggaataaccttttgccccttgagctaacgcatcatggaataaaacacttaaatttttctgtagtgcataggttgttgctgtgtaactcttgaagattagtttttcctatgccgaaaaaaaaaagataaaagtttttccagtatgtaagtgtgttgtgctttctgacatatgtgtctatattatatgttgtcatttattgtaaagatccgtacatactcagaatgggtagtagatggagagtacgattggccccctaattgctgcctctgtcaagctgtacttgaaagcgggactgattctcagactactcggttgggttgcttgcgtaagtgcagttatatttatagttacagcctactgcctcttacaggtgcattctttttattaaagatgtggaatccattctacactttgtaatttatatgtttgctatattcaatacagatgttatacacacaaattgcctggtttcacatatcaaaagttttccttcgcatactgctcctgctggatatgcgtgtcctgatcctgaatgctctacatcggtgagagatatttctagaacttgactttacatatgtatgcaaaactattggcctgttaggttgctgttgttttcttcccccatcttcgtcatatatatatatatgtatgtgtattgagtaataatatgtgcacccacaattcacaaaaaagcttgacacactttgttgcaagtaacttcaaccgatcatctttatttaagatgggtcccatttattaaaattgacttgccacataagtatgtcatgtttgtgtgtgatttatgtgtgcatgtatcattactcatatgtattttatatactaaatacttggaaggaaaaaattgaaacatcgcttgaagtttgaatttcaagattgtttcccgatacttcagtgtaaaaaaagttgttgaaagagttagtagcttgttttgaactatcacctattttcactgaacaagtgtacatcataaggtacatttggatttttaaacaatttcattgtcacttcaccattgtgccgaacaatcattttaagttccggagttatttaatgttaaagcagaaatttattttcctctagtcacttgtgagtaagtcaagtgcttgggagttgggtgtgtggagtggtcttaagtccccataaaagtatctagttgataaaagactaaagatggtttccattttagcgctaacacaatttgttcaataggacttgtttatggtcactatgtgtaatttacaattttgatgctcattgtattttgtactcttctttttaatgctaactgcttaatgtagatatggcctcccaagaatgtgaaagactcaggatctcgcctacactcaaagttgaaggaagctatcatgcaggtatggcttctgcttggctcttagattatcagaaagattgatgcctatctgataaccaatttattactgttcatgatgttttgttcagttggttggtgttcattaaagcaagtacgaaaccataatttaatcacattaacaattaaaattcaaacagtcttgcgaaagtttgaataacaggttgagactgttgacaatgtggatatttagatagaatgctagaggtacaattttgttctacctctaacaaacaaatttctttcgtactcctattttagagttgcaatttgtctttttcctttttttttttctatctcaagttccaaatacctaatgtttttcaatcctttcgaaatctcttttacttgacatgacattaggtatgtggtatgcttctttgtaaaactgcttcaaccctggagtatttatctgatgttgtagtcccattcattgcaaataagcaggggatatctttaacattagttctgtgggcgcgaacttgattgtttcactattacactcagctttgaatagatttattattgttttgcagactggccttgaaaagaacttgtttggaaatcatccagtttcatttccagtctcagagtctcgaagtcctcctccagcatttgcatctgatccgctgactgcagtcacttctgcagatggcagggaaaatagcacagcaaaaaacgaaatgaacatggctgaagcgtacctaagtgcaactggagcaggatctttaaagattccaggcacagatatttcagagatagaaggccccagttcagcaggaaattttacgaaaagcaccagccctgttggtgtaagaacatatgtgtagttagtttaaattatttattttaccggattattttttctttttgttatatttattgttgtactgtccatgtttattaaagtcttactcaatgctccttttattttgtggtggttgtgatcaatccagcctggtgctacaacgcgaaagggtggtctggcttatgatcggcagaactctgaaatttcatattatgctgatgatgaagatggaaagcatagaaagtactcacgaaggggtacctttcgaacatttaatacatcttatgtattgtgtgtgcttgtgtattgactagagtttctggttggctgtttgactgattatagtattacctaaatgattaatgttgatttaccaaaaagagagtaacctacctgttgagttaagagatttctttgttccccatatagatgaagaatacaagtaatttttccaattagaaaatcatgaacagaaaatgcaattgttgtatttgtttgtgattatactgctcatggcagttttatcctgttttgacaagttaagtcctaattctagtcaaaatatgaagaagataatgtaacccatctctactgcgctaatggttctagatttctagcatatatattcttcattatcctgttgacttttttagtacttagttagaatcttgaatttgaattcttaaagttcattgtaggttcactcaggcataaattactccgagcattaataccattctggtcgagtgcattaccaactctaccagtgactgcaccacctcggaaagatggatcagcctcaaatgagaccccagaaagccgcatacggcatcaaagaccatcaagaatggatccgagaaagatcctcctctttatagcaatcatgtatgttttctgaacttgttttgtcaacctgtgctaactatatctgtaaagccaattaggtgacgaaatccatatgttatgcagggcatgtatggcaacaatgggcattctgtattacagattagctcaaagaggtcttggtgatgaaatgggtgaagatgagcagcagtagattgtggttgacttaatgagagcatatttgttggtttcttcctttgctgcttcatgtttttatctttttgtgtctaaatcgataacacatacaaaatggatgatgttgttgaagattttcattcggtgtcaaatgacagtaaaaaaaaaagaaaaaaaatcccaatttgttagatgtaatctttgctcattttcttcttccatatcttgttgttgtcttaattttaatccctttgaagttgaaatggagaaacaggttgaatccaattttctttttcctttttgaataggttagtttgtaattatactacattatgtttgataaattaacaatcggaagattcaaaacaaagttacgggcggactgaacactttgtcttcttttaagtttggctaatttgaattttttttccctgaactttgacatgtatcaaattatattacctgaatttttcaagtcgtaaaaaattctccttgaactattgaggttgttggatttaaggacttttgtccaattttattatgaaagtttaatgtagatgaaaatttagagagcacaattctgtacatgttaaagttttgggggcatgattttataaatatcaaagttcgggggtaccattttgtagatggacaatctacatattagcaaaattgaatgaagttaaaaaaaaattcttaaatccaataattttaatagtaacatgatttgatacatgtcaaaattcaaggataaaaatttaaattagccttttaagttttaactattgctgatcgtacttttttttttatcagtacttaagataaaaaattatggttttttttttgacgatgacaaagccgtaattaaaaaagtaaataaataaataagacaaaacattagaccaactcgtccatctttaaatgttttgatgattttagtcatattgtgattaagattgttaatttttgtggctcatggattgttaatgttgcggccaagcatgttttagggttgacagtgttatagtatcttattatttaaattatgtttaagtaacatttaaatttattttataaactaataaaaggaaaatttttccatacttaaaaaatccccctattacaataaaaactcataatttttctttaccatttaatcctactaattcctacacttacccaaaatactttcctcgtttaaaaaatacttaaaaaaataaactctctctctctctct

SEQ ID NO: 17106 - DNA, 6050 bp, Cannabis sativa
tgacccatcatcccatacatgcgtgaattacgcggtgactggaaagaaaaaaaccaaacaaacttgttcgatgttttctatttcctatgatggaaaacaatcacagtcggtcataacttttcaatagagtcgagtaccacattttgctatttcaaaatataatggtgacactaggacaacagaatcaaagtatacaaatttgttccttacaggaatatgttaaaaacatttgaaatttatcaaaaataaaaatgagcagaataattaaaaaatccgcagaaaattttttatttcatgtacaattcaaacatccctaaaagtgatttcaactagggacaacctgaggttccaggggtgtagacccatcttcttcctcagccccattaatcaatgggatcttcaccgactttttatcttcctcttcaaacccttgcttgaatctatcatagtttgtaatttcactagatttaaatggccgctcacccaggacttcaagcaggtcattctggtgaagtacttccttttcgagcaacaattctgcaatttgtgccacttgttctttgtgttcctctattagttggaccgtcttttcatatgcctttgcaacccattctcgcacttcagtgtcgataattgctgccgttttgctgctataaggcttggtcatctcaaatgaatcctctctctgagggaaggataggagaccgaccttatcactaaaaccatagactgctacttgggcataggtcatctttgttaccttctccaaatcattctgtgctccggtagagattttccccaatataacctacgttccaaaatcatcatcagtattattaggctataaatggttaaaaagacaccagaaagtttacatttgccaatttacatacacttctttttgttcacaatacattctcttttccgttcccactttaattggccaagatgggacgaaaagtgtaaatttgagttgaaggtttggtataaatcatttaaactaagaacctcggtaaaatatgagaagaaattaacgattagtctagctacctgttcagcagccctaccaccaagggtcatgcaagtcatgtcgaaaagttgctccttagtcatgagaaggttctcattgggaacatactgggcaaacccgagtgcagcagtgcctcgaggaacaattgtaactttcaacaagggctcagcatattctaagaaccaaccagcaacagcatgacctgattcatggtaagcaacagttcgtcgttcattcttgcttataacctgcatgttgaagtacgaatgttaaagattcacaaactagtagataaatagccagaggaccacataaaagattcacaatctaacatactcaactagagcgagaatccttcctccacacttaaaagtttcattcccaaataacccagagcaacacaggaagtttctgcctacccaacctcttagtgcattcacctagtcttaatacttaatagaaaggatacagttcaggggaaaacatagtcctgaaaaaccatgattttgtatgtaacaagaggtttccaatacaaatgagattgagaggacaccatgcatcgtattattatggaaggaggaaaaaaattttataccttgttcttcttctccaaaccaccaatgatcctatcaatagctgactcaaaatgatccatagtaacttgaccactctcgtttcttgcagcaataagagcagcttcattacaaacatttgcaatgtctgcaccagcaaacccaggagtgagagctgcaagcctttgagagaaatatgacggctcgtgatcaagtttgatcttttttaaatagatctggaaaatctgatcacgacccttgatgtcaggtttgtcaatggtaatttggcgatcaaatctaccaggtctcaagagagctttgtctaaaatatcaggcctattggttccagcaaggacaacaactccagaggttgttccaaagccatccatttctaccagcaattgatttagagtactttcacgctcatcattggatcctgagaagcctccccgtccccttgctcggccaattgcatctatctcatcaataaatactatacttggagcacactgccttgcttcctgaaataagttcctcaccctggatggcccaaccccaacaaacatctccataaaatcagaaccagcaattgaaagaaagggtacacccgattctcctgcagtagctttagctagaagggtctttcctgttcctggaggaccaaccaacagtgctcctttaggaattttggctcccaattcctcatatttcttaggatttttgaggaagtgcacaaactccattatttcttgctttgcctcatcacaaccagcaacatctttgaaatagacctggaacaacaatatacagttaataagttacataagtaatccatgcaatagactagtagactgcataaacagcattagtcataccaaaaaggcgaaaaaaaatatataaagaaggatgcagcaacaaaattcaattctacaatttgattaggaaacagaaggctaaccttattttttgcatttttatcaacttttgtgacatgggctttccctatattgaatattccacgagcacccttacccccacctccaccaacacctagcccaccttgcattctccgccccatgtagaggagggaacccaaaagcaatagtgtcggtgcaaatcttaacaactcttggtaccataccatttcagagacatatgttacaggaacaaaatcgtgagtgtctattcccattgcttcctgagcttcctccaacttctcctcaaaagattcaacacttccaatgttgaaataatatttgtactgaccgcgacttccacgagcaggcgtaccattaattggtccttggacaacatcttcactagctggatcgcgtggtgagttccttacatatacttttgcaactgatttgttagaaacaactatacgatccactaaacctggttccagaagcttgttcttaaactcttggaaactaatctggataagttaataaaaaatatatcaaacaaatgagaagtgaacaaatagacatcaacatcaacttgaaaacaaaattacagcaaaaacaaaaaaaaatatgcctcatatcaattgcatccataacaaataatacatgtacaagtattgatgagcctcaaatgaaaaagatcaaccatgctgaaaccttaaataagatgcgacaagagatgggattaagtttcaaatgcaagtatcagccatacaaagaaatgcctgggaaccacattctggcgaatcaagcatccacagggtcatatctagcaagggttgcaaggtattttagaagaatattaaactcgagatgaagcttcaactaggtgaaagccacacttctttcactcatcaaaagcatcaactatctgacttgctattataatcaccaatttaaaaactgggttcaactccatcacagtaaatatcagagcttcaaaactgggttccactccatcacagtaaatatcagaggaatctcctcaaaaagattgagcattaactcttttaaaaactaaaacaaaaacttgatagagtaaaaaactcatacgatgccaaagttagatttccctacccgacatattttagaagcacaacacatataatcttaatagacaagataaagaaggccactaacaatttttatagcatggcaatgaaacagttactaaaagtctagaacaacccctctaccacaaatcaagagataaaaaagcaatcaaagttcaatgaaaataaagtaacaaaaaataatacatacctgttgttgttcacggggaccaaaattaaatgaggaaaggaataatccaatcactaacaaaggagttattaaattttggaactgcttcataaaagcttcctgaaaacttccacgatcatcggtattggattcatctggaatgaaaaacaaagtgattagaggcagatatgcaagtggtacccagtacaaattaaccaaaatccaccactttatgctattgctatataatatggaaggaagcacaccattgaggatcaaaataaatgtttatgcagatgaaagtaaccttgaaccaaaaattaccaggaaaaaaaaaaagcctaatccctggtcaaggctaaaaacttataatacagaggggaaaaataagctttgctaataaattaaataaatagacaccatctttatttcttatgaattaactaagaaactaaggttaaaaaaacattcaggaccggcaacaagataatttcatctatactctatagaatgacctatctttatgtaggagaaacatccgcgacccataatttacatagagatagattgaaggaaagtttccagttatgatgatcacaaatctaatcctaagattaatgagccctctaactcagactaattttacaactatcaaatacaacaaaagcatcacatcttcaataacagagctaaatattattgtcaaacaaacagcagcagcaaataatgataattaactacattctaatccaaacacgaaaagggtatagacgtattatctaatctgagcagtaaaaaatagatttgtcaacctttggactcagatttctgttcttcccctttaggaatttccttcttttccttgggatagaagttctcatagtctgccaacaaaatgaaaccttctttagtttactgaaaacccacagaaataataagtataaccaaaacattagggggaaattaaaagctcactctttttctttggggcttcgctggagaatagtctacgaaattcagggttgccgagaatgtaacgaaaatctgaagcagaaacctttcgagctccaatagaagtaacatagcttctcagaaaccctaaagccccatctacgggaccgccaccctgatacgtatcaacacccgcaactgacaaaaaaccttcgttttcgttcaaggtcgctggccttcgacctccatacaacaaattctaccaaacccaatacataaatcgacagaaaaaaaaaattacaaaccccaccaaataaaaatttaacaaaaaaatagaataaatcagaaacaaaagaaacctcgtggccatgtagaaaaaacccttaaacgaatcagaaaacttactcttgaacgggaagatcgtgagaaagagcgtccaatcctggaaaatatcatcgcttggagtgtcccagagaatcaaaatgggaacgattgtaatcaggaaagagataaataagtactgaaaaatcggtaaaagatagagaaatcaaaagtaatttaggtgatttaacaaacacattatttgcgaatttggaatggttcggatgaattaagattttttaagccgggaagggtatgaatctccctcacaccctcagatatatgggcttcgcttcttttctttattttattttttatttttttaaaaaaaatataatgtcagaacattagtttttatttatttatttattattattattattattagagttaatattgttttatttagctgtgtctgtgtgaaaataattggtatattaagtagatttaatttttttcccttttacaaagtttgggggaattttgaggtgacaaaataggatacgtggtttttgttgtgattacttggcaaacaagattcaacactcacacatcgcctcattgaattcaattcaatacatgagaattatatgagttttggagtctcaaagtttaagatattttttttttcttttttgaaatcaaggtttaggatgtttaaatgttaaacagtcggtaatgctcctttcttaacattatttcattttactttttatcttttttctttagcacaataatataataatataatatagaagaatgtataatcttatcatgttgttgtcaaataaatgttattcatatgtacattttgattttatgattataataaagtaaatcactcctccatattggtattagaaatattaagttgttactataatcaacattaaaatatatttaaat

SEQ ID NO: 17107 - DNA, 8494 bp, Cannabis sativa
ctgtgcatggtacacggtatctcaccttaattagttcctactaagtattgatagttaaccataataattgggaaattttcaaaaatacattaatactgaatcttacaaaaatgaaaatattttgcaattaattgttacattttactgagttgatacggtgttctgccctttttttttttttctaaaataaaaaaattttaattggataagagctgacaatgagtccacttaaaaaaatataaattttataggtttttataaatagtgtaaaattataattttttttctttttgcaaaataattattttattggaaaattgaaaacaaaataaaaaatatggaaaaattagataagggtaactaggtactaaccataagggggtaactcgttaccttatactattttttccatatttattttttacttttttttctaaaattttcaaataaaaaaaatttttgaaaaaaaaaattatacttttgtacacttatatttgttgtttttccctactatttaggaatttttacaaaaatattaaattttaggtaaaagtttacaattttactatcatacagaattttttacaaaaatactatctttttataaaataacctaaaacaattataaaataataaaatagaacaactaaacacaacagtaaaacaagtaaaaaataaccgtcaaataacggtgaaaacttaatatagtacatggtatgaaatttacacattttttttttttaaaaaaaaaatacaatatttttttaaaaaaaattccatcattaaaaaaaaattaaaaatttcaggtggtgtaaaaactgctactatctactataccggaatcactcccaggtgggcttctttatcgggccatttaaggcccaatgagaacggcccaaaatcataaaaaccctttcttcccgttagatcaacactgactgcctctgctttccatagagaaaaacataacactcgcttcccaccttcggcgttgcaggaactccgaacagtgagtctttactctgcttttgttatattttcatggcgactttgctttcattcatttcttttacgtgcgcatatttaagatagggaagaaacttacaaatttctcagtttgttgatgccgcatagtttttattttttgttgtagaattattctgtaaagatttgcatttgtagaattaaaaaaaaaattatgtttgcattcgttatcttattattgttttgtaaaataaaaaagcagcggaattaactataaagattttttttgttccatgatttccatcttccttagtttccctctacttttcagggtttagggttttaggactcaagttactcttggacttcttttatcttattctcttacactccagcaataattactgggttgtgtctccttaagccgaacaaactgtttcctattcatattatccattagttctttctcaatttcatggaaaacccttaaaccctttaactctctctctccctcctgctacagaacctgttggatcatcctgtgaagggtgaacccgttttgccgattccctatcctttgttgcagtatcataggtcactctttattttttttatatgtatgttacgattaagctgcacacgcacagtaataatgtaaagacccttgcctacctgtatttcaaatttgatatggtatagatacaagagagttgtttatgttttattattggtttaacagtattgcaggcacttgtgattaaattcatagaaaatgagagaggataggtctaataaacggggcaagaggaagaaggattcctatgatgccaatttccagaataaagaatctggaagggtaactgatggtggttctgataaacatgaagattctcgaaagcattggatgagtacaccatataactctgttgtcaggtatatggatatatgaacttttgtactaatgatgaattgcataggttgttttatttttatgattgcctacttggattattctctcataaagctacctgcacttgctatgttgtgtatatgtgggatttgataatcacttttaatgctccttatttaggaaacaggttgaccctgaaaccatgaaatacttctctgaaattgcaaatctttttgagagcaatgaggttgattgggaggagcgatcggttatgtgtggtagtgctctggaagaaactagaggaaaagaacttgaacttgcaactgattatattctaagccacactctgcagagtcttcttgagggatctgatgttgaacatctatgtgctttccttgagaactgtgtttcagatttttgttatattgcaatggatcgatcgggttctcatgtggctgagactgctttgaggtctttaggcttgcatcttcaagacagtgatgtctactctgttattgaagacactttaaccatgatatgcaaggtatgagtatctatcaatggttaaaattgtatgcattttattaatagttgcctttgttgttaccatactgtagaaattgcattgtcacaaatgtaagaatataattttaaattatttattccttccttttactgctgtcaggtaattttagaaaatcctgttgaggtgatgtgtaactgctatggatctcatgttcttagaagtcttctttctctttgtaaaggagtaccattggattctccaaggatgcaagtcaacaaatcatcaaaagttcttgcagggcgtttgaatttcaaggcatctagatcagatgaagatgctttatctcatgctcataggggattcccagatttacttaagttccttgtctctgggttgttaaagtgttccaggaaagacataaagaccttgcaacttgaccagtacagcagtttggtttttcaggcacgttccagtatactattctggtatctttgtataatgctatgttcttaattcttatgcctgcaagaatgttttatttgccatctttttataacatgtttactcttgtttttttttaataaagttgtgcttatgtatatatattttgacagactgcttttaaactattgatgggacatgatgaagaactatcgatgataattcctattattcttgggtgccgaaaagaaagtattgtggagggaaatctaatcgactcaacgaaagtgccatatgttatggatttgttgagagaacctgcatttagtcgtctaatggaggtgcttgtctttaacataacttgcattcttattgttgcagttcttaataagtattttattttttttatctgtccttacaatgtgtttgcatttctttgagtctgtgatatacaaggaaattttttcgagtacattctgtaattcagtcttcgaatttctttccaataaatcttcatactgtgatcaatatggtggaatttttaactctttatgtgcttttgttgagcaatctgctttacttagtcatttatataagttttcttttaaattaattttcaatgattaggtattctgtctctcccatccccagtgataggtttagctttccctagtttccattttaatattgctttgaaatatttttgcaggtaattttggaagtggcaccagaagtcttgtacaatgagctgttttcaaaagtgttcaagaattcattgtttgagctttcatctcatcattgtgcgaactttattgttcaagcactaatatctcatgcaaagcatcaagatcaagtacgtactttgaattaaaacatttttacactcttaactcctttagtgttgaagtattcttaatctcattaaagatggccaactaatatttatttgaggtagtctctttggtgatcacatttgtcttccttttatgctattcgtttgacatttgtggatctaagttgctattggtattattagttttgttggatgaaaattttgctctagtgtctcttttaaacatattttttaatattctttaacgtcatcatttgtccactagatggagttgatatgggaggagcttggtccaaaatttaaggacattcttcagatgggaaagcctggagttattgcttcaatcattgctgcaagtcaaaggcttcatactcgtgaacaagaggtttgtaactatgttaatcttttttgtgtttccaaatttattttaatttatgttttttaaatttaatatgtaatatgtgaacacacttgaaatcttatttgaaaacctacttaaaaatatgaattactgataagtaaggctgacaagtgaactcttgtatttcattctttaattattttggttccttctcattctaatcataagtattgggtaaaatactttggcagtgttgcgaggcccttgctgctgcagtatgttccgcaactgaatcaccaggatgcattgttcctcggatactttatctagataaatacttcttctctgaagacaaggcaaactggaattggccgagaggtgctagaatgcatgtgattggttctttgattttgcaggaagtttttagatatccaaatgtatgcagtttttgtattgtattttggtttctgtcttttctttttcgaatatttgtttagagtaatttcttctggtcgatgcttttattttagccacacaacatgcgatatagtggattgtctcttttgattttcaattatcagttttttttaagctagaaaaaagtttacatgtttacataaaatgccaaagctgttgtgcattttctaatatggctgaattctagcagtttgctttgatatcattgttgcttatgctaatataagtctgtgcaatttatttctacttaacaggcatttatacagccttttatttctagtattttatcactggaagatgacaatgtcctagaagcagctaaagactcaggaggtgctcgtgtaattgaagcttttcttagttcaaatgtttctgcaaaactgaaacgtcgtttgatagcaaagtaagtcttttctatttttcatgatattctcactgtaatttgtatttaaaaataatagtttctttcactttgtagacttcgtggacattttggagagctttcaatgaatttgtcgggctcattcactgttgagaaatgctttgccaccggtaatatgtcactgcaggaggccatagtatctgagttgtcagctatacgaagtgaactttctaagacaagacagggtcctcatctcatgaggaaactcgatgttgaggggtgagcaattagctagagtgtgctttaaaatatttcaattgttactcagtgcaatttaattttattttgtccttaaccactatctgctggtgacagatttgctgctcgacctgatcaatggaggtctagacaaacatcaaaacaagcaacttatgatgaatttcatagtacatttgggtctggtgatacaaactcatcaaaatctggcaccttccttacccatacttacaagaacacaacacaaccagaagggctaaagaaaatgagggtagaaattgacaataccctaacatctccctctccatttttgagcacttcaggctctaaaggaaagtccaataaagcagaaaagcgcaggaataagtatgctagaacttcctaagacagcgatagcacaaacggtgattttatgaattgtcaccggataaaaaaggagtctctgcaggtcagtgaaatttgccagacaaaacagtgagactgcctggagaggataagcaagacttctacgaactaggaaacatattttggatttaattatgtaagcttccaattttgcaacttccatgggagctgtcgtcttgtaagttatagaaaataactataataagtcttcgatcttaccttgtcaaaatcttagagttatagcttacaagttttgcttgatttagattttgttcttcctgttctttattatgttgtttgaaagctttctagcttatgtaactctacttcagtttattctacagtaaagaaattaaagaatttttatttaattacccgagctattcagcctggaaacaaacaaaactgtatcttacaatgattgcattacattaaccctctgttgtcactgccctacactagaaaattaatgaaatgaaaaataaacctagaaagaaactatgaagattccagtgtaattgctctgtacttctatcttcaagccatcttatggaggactatacctggcgcatcaagatggtattaagataaactacaggaaatcttctaagttgaagaagcttctaattgttgggtaagtaaaagaaattattacttgttttgtattggattcgaaccgctccgtggtatccttcgaaaatttgatttaacctgctgatatggagttgtcctgttaatctgcaaatccttgacagcttgagttgatgatgatggtgaagaaggatgcagttttgatatcacacgtgcctcacaggaccaggacgatagaatgagtgaaacagtaagtgcaaaagcagctagaaatctagacaaggctttcattatctattctctttgttgtgtcttctaagttgatgaagattgaagatgatataacttgtaagtatttttgttaatgtgtgttcttttctagagtcttgtgttacagtgggggttggtttgttgatttatacctactatactaaagataaagttcaatttgggatctgatagtagcatgatcatgtgctcaaacattgactgtttcaagttgctactctgacctacagatttgggaggctatagtaatagtaattcatatatttttcataagggaatcatgtgattaggcacgtgatgttgatattagtattgaccctattctggggaagctcaaaatattgatattatattggtgaaaatcagtggtgttgtttaggtgttggatccacaagctgctgattcataacgtggtggggttacagctatttgggtatcatctgatgaattggtaattggtatggtcagaaatgaaaaattgtctatctggtttggtttgtccattgtttttcattatgctatgttttgacgctttaaaagcaatgtgaaaaggaaaaaagccaaccatgacttttgcaattctttttaggaattcttacatctagctgagctgatagcttttggagttgtgagaatctaaaggagctcatttgtaaatcaccttgtaaataaaaaataaaacaaattttgggattcattgcatacatacacgcacacacacacaaatgattaattacttattctgagaaataaaaaaaattataaaaaaaaaaaagcaaaattcatatatcgactttggcaacaatattgtattatttcttcaaatttgttttaatgttgttgtagtggctcataataatcttggagtagcttttagattggtctacatttttgttgtgaagtctttgattgcttggaactctcatatatgcagtctctagtgttgtgttgtatttggatatttatcataggatattaaaagtttgcctctagttttccataaatatctcaacttcaatcctatcatggactggattaattaaatgagaaacttgtttggatatactctgtactttcataaaatttagaaaaaagtaaataaatttgtaacgttagttcttttcctttttgagtaatgatgtaatcaaaaactatacttttgtattaaaatattgaaattcgggttcatatggttggttacaaggaatagaaactaggtaagaattttaataaaatagaatagaataaaatttaaaatacaaacaaaaaaaaaattagaaaattggtaaatgtgtttttcattttatgttagaataatttttttttctttcattttgaaataatcgttctgccatcttactagaaaaatcattctagtattttaaaatgcaaataaatatgagaaataaattgacaatttattcacttctattccatttattacctccaacttagaacaaccttatcctaaaaaaaaacatcagaattttttgtttcaagttgaaaatcatttctaccctttcagtttacaatttactctttttaccgctcataattattgcaaattttctatccgatctcaaatttggatgataatagagcaactataattgctactagcctactggttagtcttttttaatattgtgaagagttagtattttatttttaagaaggatgacaaaacattgtatacgtcggttatgaaagttcaatttaaatagtactccactttgaaattcagattcttttaagagaatctttaatagaattattttttattggtgggtgtctaaatgtttttaacttctaaaattattaaaaaaatatatggtttatgactgtttgggtaaattttaggactttcttatgtgatgagtataaacaaaatagaaaattccataaattgttatttttagtaaattttttacacttcatagtttttttcacatatttacggcagtctataaaaatataaaaaaacaacatcaaaataatat

SEQ ID NO: 17108 - DNA, 4275 bp, Cannabis sativa
ttgcattttaaaatataatgtaattactaaactgtgtaattaccaccctagtaattaccttacctagtaattacacagttacttctaaacacacccggtattatactatattttaaaatgtaaggtgtgtttagatatgatgtggtaattacatataaattcctaatatcttgtttggcaaaatggttagtaattacatgggaaataattttttttagtagctaatgtttaataaggaaattttttagtaattacacagtgtatcatgaaaattgaagagtataattggaacccctcaattacttccaattacacattgtaattacatgttcagacaaattaagattaaagtattttaaagaaaagagtggagaagctaaggaaagtgttcttagagcatataagaatagggtatttttagtttgactctttaattattttaaaatttctttattttagtgtatttaatatgagtgctataaaccttgagctaaaattgctcaaagttaaaatacatataccttttagtttagctaaattttacatttttagctattttaactacactagtgagagtcattaaaaaaaaaaaggaaaaaaaaaactataccagtgagagtgctctaaaactcaacaaaaattgtacacaaaattgtaaattttttattgatatgtatttaatttaattgtggttgaaatgaattctacatcattatcattgtaaatatgtgttagaatcatttccctataaatattgttctaatcaaatgtacattcttctctagaagaaaaaatcaaatgtacattcataatataattgaaagtacctaatccattaaccttaagaacataatcacactaaaaataaaaacaaaattgttttgtttgaacatatacttttggtttgattttcctttagttttttggtcaattatcattgaatttatttattttttctaataattttaattgaaaaaatattgtaaagaaagaattacttaattagttgattaattattgtgatacattcattcacgttaaaaatcaaagagttgattttcaatattcaagaatcatcaagagtagaagtaggaccactagtactctccacaactttcaaaagcaaagaccaaactctgaattgttttaattttattcacgactcccaatacgaaaatttcaaacaaatctcaaccgttggatcacgtaactactttgactctcacagagccttttaccaggtcacccggttcctctctctcttgtaattattatatatatacacataataatctcatccttttcgtccttacttcttctccatccaactccttcgtctatggaagcctgagatttttccaatcccaaatactctcagattcattctaacctttactcttatcttcttcaaagagcctctaatggcggtggagctaatgaggttccccaaaatggaagatcagaaagagattcaagaagctgcgactcagggcttgaagagtatggagcacctgattcgatttctctctcacaatcaacagactactcaaatggactgctctgaccttacggatgtaactgtctctaagttcaggaaggtgatctctcttctcaaccggactggtcatgccaggttcagacgtgcgccggctcattcgtcatcttcttcttcgcctccctcgtcttcttcgtcctccggttcgctctcgcttcatcaacctcaggtacctaatacactggccttagctcccgcgtcgattgcttctcatccgacttacgtttctcccgcgccgatcgctcctccggtaaccgctcaggcggcgagtttcgcacaatctcagaagcagagcatgactctggattttactaaacctaacaataatatacttagctcgaacattcacaaggcctccgcggaagttgagttcacaaaagacagcttcagcgtttcttccagctcgtcgttcatgtcgtcggcgatcaccggagacggaagcgtctcgaacggaaagcaagggtcgatgttcttgactcctgcaccgactgtctccgtcggtaaaccacccctctcaacggcgccatttaagaagaggtgccatgatcacgaacactccggcgatttctcaggcaaaatatcgggatctgcatccggatccggaaagtgccattgctcaaagagaaggtaacattacattccttatcctaacccctttcattacgctgcgcattttagcatatatcgcgcaatttagtttgatgccttcagtaaggaatttgatgtagttgttttctacttccgagaaatactgattctgttgattgagccgagttgactcagtatattcatatagctattgaaatacaatacgagttgactcatttacaaactcggttgtgataagagttaatctaaccgagtcaacctgagtggtaggtgttcttggtcagcgagttaggttggattccaattaattcatttatggtcttaggcacgcgcgacaatgacagtgctctgttattgtgttttatatgaattatgaaagaaaaaatataaggaagaaaaaggctttttagtggaccgatatggcgatatgtcacttcatcggggcggggaagactttttttatttttatttttaaatttcttttattgttgaccgataaaaacaccttgttgtggcgtacgactttcgaacctaattaattgatctaaattttatttatttttaattcaggaaaaatcgtgtgaagaagacaattagagtcccggcgattagttccaaagtcgctgatattccacaagacgagtattcgtggaggaagtatggacaaaaaccgataaaaggctctccttatccaaggttaatttctctgatatatatgtatatatatatatacgtgttgttaatttattaattcattgattgatttagtttaattcatgttatttacaatgcgttgttgtttttggttttacagaggttactacaaatgtagcaccatgagaggttgcccggcgaggaaacacgtggagagggctcccgatgatccggctatgcttattgtaacctacgagggagagcaccgtcatcagcagccggacaccacggcgccaatgggtggtggtggaggagtctctttggtattcgactctaatcgagtgtgatagcccccatatatatatattttttatatttttcttaaaatactcgaaagtagttgaggaggggatagttgatagaatggggttggatgtaaattagttgagatatataaatttcaaaaaaaaaaaaaaaaacttgacaattgataatgctgaaactatgcggtgttcaatcaactttaatttcatctaattttcgatgcttttttggttggtttatttatttgtttttttttgtaaattgtttttatattaccttgattgtttttgcaaaattattttaattaatacttgactaggatggattctagattaccagaaaaaaaaaagggtcttattaaactggtggtattggagtttttggggaggggatataatcatggagttagtgggccaattagttgttctctagttgggaattcaaaatgttttctttaatgagaaagggataagtattatgatatggtcaactgtgccataactagccagccatgagttgttattatgtatatctttattctcaattgtctaaagtcaatggtcgccttaactctcccaaaaaagaaaagaaaaagagtgataatacatatgtggccatttttatataaatggcgatattacaccattgaagagcatagcttaatgaaagccaagtcaacggtgaaattaagagctaacgcgtaaaaaaataaaaaggcttgctttgacttttatggccggctctttgttatttttatataggcaactggtcctttattcaaaagtgttgcttataaataaatgaatgatgatacatgtgttatgttatgaaatattttttaggaaggtttaaattattaaattaattattattattaatgtttggttgtatttttttttattacattgatttttttttttaataaaaatcataagatctattaataaattatacgagttgttagaaagatacgaggtatattatggttatatctatttgaccattacaacaatacgatgaggttcgtcttgtaccttttaaatgtacacatcattgaattgatgatgaagaaatataaagtttgatatacataatagtaactagggctgcacatgggttgggttgggcggttt

SEQ ID NO: 17109 - DNA, 4605 bp, Cannabis sativa
  modified_base (31)..(39): a, c, t, g, unknown or other
aacacagggtccaatctgtaacttttgcaannnnnnnnntctaaaatggtatttaccttttttttaattattacattaccactcattaatacatttattaattaaaaaaaacttttttttaatttttaaatcacattttaatcaaaataatttgaactagtaaaaaattttagtcccaaagaaaataaaataaattaattgaagtgtagattttcaataaatattaattacttagtgagtgtttttttagctattttcgctttttgtgtatcgaacccaaccataaaaattgtgttaaatttaattttggtgcatattcttagctaaatttaacacaaattatacattttacattgaagataatttaacgatacactaccttttatgatacttgacaccttaagttaccccttagaacatctcaagtggaagtgctttaaagaatgtttgatgatatagatctatttttgacatatcttaatggatgcttactttggagcgaaaaagaatgccaataaaaaatgtctaacaatagcatcatttatatcttctcttttttaaattattattattttgtcacaaagtaaaaaaaaaaaatatatttaatatacattaaattataatataatatatatcataatcatatgggatgaaaaatatatgagaaaaaaaatctaaaacaagaatttctctccgtacagggtggttttgaatttctctctgtacatgagggtttttctgaatcgcaagtcatcctctaaagcttcgttttgggcttccgagctatttttggtgctcctccgcctttgatgctttcttcctggatgtcagtcctctattttgggtgcttaggaacctcttccccgtgataagtgttctgtttagcgtcattggagtagagacaactatcttttgtagtgtagagttttgaattccctggtgctcctccgagcctgctaggtatttttctgagcctctttattggtctccagctcttggttccttctctcctctcgcttgtgattgctggggatttctttagtttgggtacaatgcacaagggggtcaactcgacaaatgtagtgcttattccgaaggtcctgaacccccagaatgtgtcccagttcaagcctatatccccgtgcaatgtcgtctataaagtgatctctaagactattgctaatcggataaaacctttacttcctagaatcatttgtcccactcaatatactttcgtcccaggacgcaatatccaggacaacaatgtcttactgcaagtaattatccattcttttaagcttaagaaaggtaaggaaggattctttgtggtcaaaaaggcttatgagaaattgagttgatcatttgtagagcaagtgctgaaaagttttggggtcccaaagtgatttcgtgacaggatatcccaatgtattattacatcatcactcaatatttgtcttaatggggggctgattggaaagatcatcccgaagtgcggtattcaccagggggatcctctttccctgtacattttcatttgggggctgaaatcctttcttcgttattggatgaggctttgggaaatggtagaattcaagggattaagctgagtaagaatggtccaaaattatcccatttattctttgtgaagggccttatccttgtgggaagagcttatgttgaggaagcctagaacttttgaggttgtctggaaaaaaaaatatttcgtggttaggccagaaagtcaacaaacctaaaaagctcatatttttcagctcgaataattctaaaggaatgaagagggaaattaaagatattcttggtacagatagcccaactggaaacatcaaatatttggggcttagtgtgtttagaacccgctaaaaggttgctgatttcaactttatcttggagaacctttcttccaagtttcaaggttgaaaagtgaaaaccctctctaaagcgggttgtgccacacttattaaattgataggtttatcctttccggtttattctatgcaaaactacaaaactctctcaatggtttgcatctaaaattgatggcattgtctgtgatttctggtggggaagtgagaaaagaaaccatggtttatatctcaaagcgtgggataaaattttccttcccaaatctttaggagggttaggcgtttggaaaactattgagatgaatcatgcatttcttgcaaaatgggagtggcaacttatcaataaagaccaatccttatgttacaaagtgctagctgccaaatacctcaagagtaccccttttcttcaaagcagatataagaactttcactcatgattctggaagaatgtggttaaggaaaaagatattttgagaaggggtgcttgttgtgtggcatctgatgggagagatgtcaatatctagaaggatgtgtgggtggcacatggtaacgtcttctgcccaactccgaatggggttccttttccaggatgtatgactgtggctgacttattattggagaatggggagtaggatctcccaaaattgaattggttgtatgattgaaacactggccattttgaaagagggatagtcttcaaggcaagggagggatcactgggtttggacaaaaaggaaccaaatggtaaattttccacaaacccaacttatcttttgcaggctcttgagagaagcccacaatgtcatgtcactctttctttgtggaacaaactttagaatagtaaaacgcatgagcgacaaacaatctcttttgcatcaaccacatcctcttccttgtagttatcaaaattaattacgatatggtggttatggaggaggctatgatgcttgcagcggtggcccttgatcatgttgggaaggtgctttgggctggtactaagcaggtgccttatgctaatgctcttgatcaggaagtagaatcttgtatgttggcgttggaacttgctgctaagaaaggtttataatttattattgtggagggtaattctgacattgtctttaaaaccgtcaatgggctaaactcgtgatgaaaaattgataactttgttactcagtatagatgccttatgaactcttttaagggatgcaacttttcaaagatgtctaggtcttttaaccatatagctcacaatttggctaagtagacatttaatcaaaatgtaactagtatgattggggcttcctcaataccagataacattatttgtagaggccaagtggcttgatttggtgcttatatctaattatgtttcttaaaaaaataatataatattcttttaataatttttagaggtgcttagagcactcacatcagtttttctactctattttttaaaattacctcatccaaatgttattttttttttttattttacctcatacttttacattatataatacattaggttctctattttttctatgtttaaatattatatattttaatatattttattatataaacaaaaacaataaaaattaaatgaaaaagaattaaaaatgtgagaaaaattattaaaataatatttgaagaatgaatagtaattctctacatatagagaatcactattcatgagataaaattttgagctattttagctcacttgacagagccccttttaataatatttctttatattttcacattttcaattattttagctcagatgtaagtgctcttacccttagaatatttaaaacaaaaagtgtcaataataatatagaatagagattaaataaaatattatatttttagattatggggaggtttttaacactttttaaaaaaatactatcattgaagatgcttttaacatttctcacctattaattactatccctgtagtttattttttttttctattttatttttgagctgaaatataactagaaattagaaaatgccttttctcaccactgtgacaagagaatattgtgattctcgttgtgattttttcaaatatacaaaattaattcatttgaacaaaccaattaaaggatttccaatcatgctctttaaacacatccattagctaacataggtaatggtcttagtgaacttagaaaaaagaagcttcatccatacaaaaataattctatcgagaatggataaagaactccttaaatgtagtagcttatattttaatcttttagctattgtagccttcaaaaaataaaaagtaacggttgaagatgcttttacaagagaaaaatatcatttgaacaaattaaaaaattacatttaccttaaaaaacaaaacatttttgtttctagctatgtgagtgagaagcaaaatttgaaagaataagaacaaatgatgtcaaattgcttgaatatcctttcactacgtatccagcaaagaaaaatttatatacagttctcttctcttctcttctcttcacttattatttatttattgttattatctctgtccagatttcacaaaccgagaatagcattccaatttccaaaagggaaatttgaatttgtatgcttatattattgaataatttttttcctaaacttaaaatagggaatattggtaaaatgggataacattttcttaattcccacaatacccccatttgaaaccatcagccct

SEQ ID NO: 17110 - DNA, 4123 bp, Cannabis sativa
  modified_base (2075)..(2078): a, c, t, g, unknown or other
agacgaatcggattcaagatcatcggagaggattgcatccttaccttgagcaataatctgagccgtccctttcaaaacggtgttcccaagctcatcaatggcgtgaccaaccgttcccaaagatccatgagccacctcgatctccttcttcagacccgaactgaactcctgcaaatcccgccggtaggtttcaatgacagattcggatttagtcgctagagtttggatcaaaccgccaaagctccatacaccaccaccaccgacggaagaaccggaatggtgggagtcgggaatcggatctgggtcttcacgttcttgatcgttggatgattttttgggagacccggatgtggattcgggttgaggaggatctgggctttcggaaaaaacggtcttgaagaaattcatggacgatctttgatgtgttttccgggtttgagaagatcggaaaaataaaaatgaagaaaaaagcaaatgaaaactttccctttcagaaaatgtcgtttttagaatcctaacacagtcggtggggagtacgcatcagtcagatgaaagaacaatatggtccttttgccttttgcgtcgttttgtttgcctgctctgccgaaacgacgtttgctcattgaaacgacaactccgtaaccaagccattttttttttttaagtagtgattaaaattactcgaatttacgatgcagatattcgcaaacagcatataaatcaccttgaacctagatagttcatcgtttaactaaaaagcatgctttgtcaaactctgttaaagttggcaagcaatatgagacaaatctgcctctaaaaaattagataagaaagttataacgtactcaaatagcaaaatgcacacccgaagagttagatagcttgtttcactgaatgctacatgttaattcaataacatatcgagaatggtctttaaaatatctacaaaataaaataagataaaaaaaaactaattaatctcttagcgatgatattaaaaataataaaaaaattctcaatagtaaaaaagataataactcttaaacaaaatatatttaaaataaacttataaacaaaatctcaataatcaaatcacttttagttcgttatattgtatagtatttttttaaggtaaatattaatttagcctctgcaatttacaaaaattatcgatttgattttttgttttgttaaatgataaaatagaccatgtaatttcgaaaatggtacaaataggaccctaaaccgatttttttgtcaaaataaaatttaataataacccgatctaaagatgttatgacaaaatagttgtattttctgcatatgttcatgctaagaattattttcaagttggttatattaaaaaaaaaaacatcaaaaattgagctcagagtcttatttataccaatttagaaaaaaatatatattttatcatttaacaaaacagagagtataatcaataatttttacaaaacataggattcaaaatgatatttatcataatttttatataaaattatatatgatatcaaattttatggatatataaatatatgatattttattataaattaaaatttaacataatattaaatatctaaaattaatataaatacaatataatataataccacctaataaatacaaatgagtcctaaatcaatagtttagtaaaacggcaattttatatagatgtcccaattccaagtaagaaggacagtaatcataatgtgcagtttaattttaattttctttttactaaaaaatgttattgtagtcattatatatgatttataattttaaaacaaactgcaaagtattttaaaaaaatttataataagtacgcatacaataaactatttcaatcttattttcagtattttaaattattcttatagttttgaaaattcgcaagatactttaaatatacatcgtcatataaaaagagactaattagaatttttgccccctgaactttgacatgtatcaaatcatgccactgaacttttaaggtcgttaaaaatgccccctgaactattgagattgttagttttaaggacttttgtctaatttcnnnnaattttactatttcagtaattgtttatgtactaaactatgctccccaaactttgatatctaccaaatgatgcccattgtactttaacatgtactaaatcatatcccctaaatttttatctatgttagatttttttactaaaattgaaaaaaaaatccttaaaacaataacataaagaaataaacaataactcatcaaatctatacaataacattaaaaaaataatcttcaaatccatacaaaataagaaataaacaatattaattatcaaaaaataagtgcacaaatgtgcactcattaactttttgctaggggatgcattattgaagctctcactagatattatgaatcttttcttttgacatatgatgtcatagtttgatatattttttgataagatagtttgattaatatgcagaaattttgattttattgttttttttttctttgtatctgagacagaaaataaaggaacaaaatagtccatgaaaagtgagttttttttttttgtttttttttttttgaagtgaggcaggcaatattgccatttcttaatgaaaaatgaggtgactttgggaccaagtagatgttggctatttgatgccattgtttattttatgttgggctgctggtacataattaagaatcaaattttgttgaagcaaagttagatattctaattcaaatcatctacttttattataccctgtcattatttttaaacttatggtacacctttaaagatatacaaaagaaaagaaaagaattttaattttcccatcaaatcaagttattttctccttttcaataccccacatcccaagtatggaataatagattatcttttcttttgttgttgttgaattatattatatatacacaccataacaataaaacctttggttttggatttgagcaaaaaccaaaaaaaaaaaactctttgtatacttctctcctaaagacccaaaaaaaaatgcaaaagaagaagagcaaccttttccaaccccttgtgattttcttcaggctatttagtttcatcatggacagtctaattcccagaggtttgaagcgcgtggtcaccacgagccagtccatgcaccatcaagcctcaaccgtcgtcccaatggtctctagtaagcccaatatgaagagggttgagctccaaccacaagcccattacattaaccattcagatgacttcggctcttcttgggctgaagctactcggcccaaaattcagaaatcggcccaattatatcaacacagtgaggatgaggacgagagtaacaactacgagttgtttgtagatagtaagatcaattttgaagaggaagagagaaagagaataaggaaagggaagagtgtgacagtagagttagagaagcctgaagatgtgaaattaccaaattgtcctccaaggcagaggcagaggcaggtgaggcctctttttgatgttgctgtaaatattaatgagaaatctgatgcgtttattcgtagtaggaaggaagccatgagaaggaattttacatgagattaatcaacatatttggtatattggtaatttggtatggatgaaaaaatctatatactattgtatgtaatcttctacttccttccatatttgacctctgctttgaattgagatgattctgtttgttatgtctcatctcatcaatatgtaagcgttttttaatgctgtaaaaattaacttaaaactaagaaaagaataaaacatttgagcccttctttcttctttcaaagaaaaaagaaaatgatgagactcccgcaatagatagattatagataatcattattcagataattgtaatctaaatttaaatatctcccttcatgcaattttatttgagtcaaataaaatgttaatcttctattttagagtcaaattacatctcgaattatatgacttttgttttgctttattgctctctctctatctccatcacccatgattttgcctccgaaagcaatcaccaagaccaccatccattacaatcacatatttgttaagaatttaggtggcttttg

SEQ ID NO: 17111 - DNA, 8261 bp, Cannabis sativa
catgcctaaattaaatcatataatgctataaaggttattagaagtgtaaaaatatacaagtgtaaatttcacacatgaacatataataacaacaataaaaggtgttcacttcatattcagattccaatggcatcaagtagttgggagtgttgagacacagaaactaaagaattagcaacaatggcaccactagcagcaactgcagggactcctataccaggaaaagttgaatccccacaacaataaagctgcgggataggactcgaatgcccgggaaagcttcctttcccagcttcaatggctggtccatatgttcctctatttctcctaagaaatctttcatgtgtcaatggagatccaaccaacttaacctcacacttttccctgctaaatcccgaaccaactgctcgttccaccgctttccacatcacctgaaagcattgcattgttagctaacaaaaactcaaatcttcaatgaatgttaaaaggtgaattcatgtacctctgatctttgcgattttaggttcttgtattcggtgcttcgtcggtcaagtcctttccataggtcataaggttcggtccctggaagataagcatgtagaacatgtttcccaggtggtgcaagatcaggacttagtacacttggtatagatatcaaaactacattttgatcagcatcaactcctctatcccaatcatttacaacaatatgatgtattcctaagtcttctcttatgccctgattcacaattcattatgttaaaagcaaaaccaaataatctgatatgcaatcatttatgtatcaacatttcacctctgcatcaaatcccaaatggagatgcatgaacgattcgcactgcggtgttgtgttgactcggtctgcatatgatttcggaacaacatcacttggcaatagttttacagtgtcccacatagatgcattgctaacaaccgccttcttagcgcgaataaactacaacatagtccaaatgttagaaagagctatttcttgccccctaaatttttcacgctgttaaaaattcatcatgaattattgagattgttggatttaatgacttttttccaactatactaacgaaagtctaatgtagatgaaagtttagagaacacgatttagtaaatatcaaagttcggggggcatagttcagtacatgaacaacttctgcattagtaaaattatttgaaattgcacaaaaatctttaaattccaacaatcttaatagtctagggagaatttttaacagcttaaaaagttcgaggcacatagtttggtacatgtcaacagaggcaaaaattctaattagcattttatctgaagtttaatgatttagtacttacttgaccgctttttagcttgactccagtggctcggccattttcaacaacaatttgttctacgtgactccctagagaaaggcgtccgccaaacttctgcaatcctcgtacaagagcttcaacaatagccgcacttccatgaagagggtactctagacaacaacccggcttgtaccattctgcaaacatataaatctaaaaacaacaacaatgtaaagtgtgttgctataaatggttcatacatatctctaggacttaagttaaaatcattaccatctctgctgagagaatgccattagatttgaccccagcaagcaagaatgccagtaagtcgatccagttccttataaaggggtctttaagtcctaatgagtcaacaatttccgagaaaggccttagtagctttgtagcaccaagagctccctttggtcccatttcgatgaaagatttgaggagtgagggagtgtatctggctgcagcggttgaaagaacaccgaaatcccctcttatggatagaggaggcagtgccattgcagctgcagatagtggaagaactgcatcctgttgaagagtttcatcttccatatgagaacaataacaaagcaacaagtaagacttatgcaaaattagaacacaacacaagcttaaaccaatttccttatcatgatttccaagctaatgatagcttaattcccctgttttacattattgaagtatgtcatgcatagttagctaatcatattacaccatatatactaaacaataaataagatttttacccccaaactataacacttatataattttgctctttccctcgaactttggaaataatagcaaattcgcacctttggttgcgtttgtttcatttttccaagttgttttttgatgttagactgatccaaggctagtttactgtatgagtgtttaaggtcattatacttgattatacacgtcgtggcttgtggtcacatcaataaattatctcaaaaaatgagcaaaatgcaactgaaggagaatatttgcaattatagtttcaggggatttttttttcaataaaattaatttcagggaaaaaccctacaagcatcatagtttagggagttaaaattctatttattctatactaaattgaaagaattaaaattgacaagaaagatgaaagagccaactatagttatgcttaccaggagtatttgccattctctaacagcatttggacttgcatgtttttcaaggtcctgaaagagtgagataacatttcacataggtctgcataagtgatatgaagaaacactcagatcaggtaaaaattgaaaaaaaactagttagaacagaacattgacgtgaagaagcatattttgactgttgtgcttattgggtattcaaaatcatatcccaatagagtatggtatttgagaaatctctctaactaagtgtcaaagagcataagttcaatactaaagaagacaaaacaaactacataatttactaacataaggttcactaatataatcatcatatcattaaggctttgtttactaattgtattgtatagtattatattaaatattgaattgtgctgtatattgatacgaaatcaattgtatcagaacacactctttgagtccatgccaatactcctaattgtaattcattttccttttcattgattccctatttttaaaatgattttacatatttatactaactacacaatttactattaactccttatacactttcatgtaacatatatcatatttttatataagtgaaattttgatacgataaaattcaatatgatattatattatacaacaacatgagataattaagtatcagagaattccaccttaaaaaactcagtggggccaatacgtgacaagaattcaccttcaggaacataaaccatccaagaatcataagaaacacaaggaattctctcatccaaagcatcaagaacctaattaattaaaccccccaaaacaaaaaatcactcaaaatcaaaacaattacttgaattgaaattgaaattgaaattaaaagtgaagtcatttcattacttacttgtgcaagaggattggcctgaggacctctagactgaaacccagaaaacaaagaaggaccagaatcgaacttaaaccctttgatatcaaaagagtgagctgccccacctggcaaatcatggctttcaagaacaataacatcttcttcgtaccttgccaagagtccaccgcagcagagtccagcaatgccacttccgattactacaacatctgcctctggctttcctgggaatgagctcttctctttcactgtcactgccccacttgaaaaagttgatgaagatggtgaagatgaggttcgagctaatatggggtttgttctttttggacgaggatgacgaaagttgtaaactttaggggtgagattgagaagaagagaggtggtcgccatggatatggattgaagcttttttcggttaagttcagttatggtggtaactggtaaccaactaatgataagtgttgttttgtttgtagttatgaagatagccacgtcacccaaccaaaccaaaccagtcatcttttctttttattcatatatataaacgacattgattttgaaaaacgacattgatgttggaaacgacatcactagattgcattaaacgacactagttcttgaaatgaatccgttttttctgttttgctaacaaacgacaattatcgtatgaaaacgacactaataagtgttgttttgtttgtagttatgaagatagccacgtcacccaatcaaaaccaaatcacacattgattttggaaaacgacattactagattgcattaaacgacaataattcttgaaaatgaaattaatccgttttctctgttttactaagaaacgacaattattgtatgaaaacgacatcacaatgaaagaggtatgttattgttagtcctcttactaccatccatgattgtaatgccaataatttttttttgaaaagataaataaataaatagtatgacatgtgatatatattctatgtgctgttgaaaattgtaatcaaattcgttaattctatctaattagtcaatctatgataattataagataaattatatatgaatataatatggtttttggtaaacttgctttttttgttgtagagtgtaacttattggtaacaaacaacacaaaaggtactatgatttgtttttgtcatataaaattcaaataatgatgtgtcccatactttaatatgagaatgttaaatcacacctatattacctaatcaacttgatcacatatggtatttattattatagaataggaaaattattgtatatgctattttttaatttttttttttaaatttaccgtttgagttgctttggtaatttttacgtaagttgctatgtgaattttggttgcgatttaaattgctccgttgattattatgtaaattttcgtaaaaatatataaaaaagtactttaaagtgtaaaaataaaagaaaaatcctataaaatatctctaactatttgtaagatattacttatgcttctaggtatcagtgtaccaaataaaaatactcactttatcaattacttctactactatttggtgggctaatttttctaagatcattgttattgggaatcatagtacctaatattttttattagttaatgatattctttaaaaattattatcttaaattatataaaatttaatattaattatactaaattactaataccaatataataccaaagggaagaaagttgtaagctctaagctagcatttctgtttttctaatagtattcttatattattttgacacaactttgaatgattttagtttgttgtcgaccccttcaatcttttactcacaaggcactataaatggcatggcccccaccattcattactatgtgtttgtctcaatacaattccgtgagttactaaaacagagtttaaacgtatatctactctagtcccttcttcttcttaatgctctgtccaaaataacttaacaaacaaaatatccttaactaattataaaacgttatttatagaaagtataaaatagcacgtacaatatcaaaaacagttaaacaacgtgtctgatgaagattgattctaaaaggttccattttttccccttttatcttctcaaaatcagtccaagaaggctgcttcgtttcaaagtacacaacaagcaacacaataccattcaatggttttcttattattataatagtttaaagctatatacaatacaggtaacattaattatcttagaccaaatatgtaagtttcaactttgaaaagaaatatacaattttcaacgatcatatttatatatataatatgaaattggtgatgaacaagtttaagactaagactatggcttcacaaactacattaatactcttactattcatgttcttgttcttgttcttggcaccattcaaatccaaagcccaaacttctactcttccacaagatgaaggtaattaaaataataaaggggttcatattctttaatttctttcttattttctgatttcttttatagaaagttacaatttttattttaattatgtttttgcagtggaagctattaaagaaatagctacacaactcaacaaaacagattggaatttcaatgatccttgtagtaacaaatcaactaataacatcccacgtacagatcagtacaccaatgtcattacttgcaattgttccatttctcctaataataatttatgccatatccaaaccatgtaataaaaaactcatctttatatttaagtacatgtattttcattgtcattagtgaaaattattagattttgttttgacttggaaaaatttgtttttgtctatatatgcagtgcttttacaggacaagatcttgatggggagcttccgaaatcgatatggaaactacctcatcttaaggaagtgtatgtaaaaatcaaatagaatgatttttttatcatttcgatggaatgactattctaatatattgagttttcaatatgctaattgtgtgttttttttcttcaactttgtagtaaattagaccgaaacttcctcagcggttcaataccgcgagaatgggcttcaacaaaattggaaagtctgtaagtttctatttttaataatactcatttggtaagctgtattagattatattatattgtattaaattgagttatatatcatatatttatataatataatgttaaattttaatttgtactaaaatattatatatttaaattctcataaaaatcaatacaacatataattttaaataaaaatataaaagataaatttcccttaatttaatattatataatacaatacaatgcggtgtaccaaacgaaacttaaaagatgagatgaatgaatgaatgtggtgatgcattgcagggtgattagtgtgaacaatttatcaggaacaatcccttcattcttatcaaacatgaccactctcaaacgtttgtatgttctttctttctttcttaattaaactcctttgatagttgtttgttttgtttatcataataaactcttaattaactaattaagaacatcattaggtccatggagagcaacatgttttctggaactattccaactgagcttgggaaattagtcaacttggaatatttgtgagtatccttattcttttcaaactaactaattaattaattatatcttaattaaaatatttgtgtggtttcaggaatcttaatgcaaacaatctcactggacaattccctttggctctcactaatctcaccaacttaaaagaactgtaagtgttaagatattgttccttaaaatccaaaaaccgttaattcagttaggttcttcaacctaacttgctgacagttataactaacttaacttggctctcactaatctcacaagagcaggcccggtcctaggcataagcaagctaggctctcactaatctctttttaaaaatacatatattttttttactgattttgaaaatactatattttttttttctaaataatggcccaaaattttctttttctatagcccactaaagttcaggatcgactctgagagaaattttctgagagattagagagctggggattgaaaaattgtatcgagcaacacatctgtttgaaagtgttggctcgaggtgagagtttctcgagtttcgtgaataaagattggtgatagtgctttcaaactcgattacacacatacttgtgttctgttttgttaagctgttcatgtttttcttttgaacaataattactaacattatgtcacacttttaatctcattgcagtagaatcagtagtaacaacttttcaggaaaaatgcctgagtttaacaattggaaacaacttcaaaaattgtaagacatattattatctcattggttttcgaaattcatcatgaccccaatttatactgatttttacataatctcaacagagagatggaagcaagtggtttcaatagctcaattccttctagtctatctaatttgaattccttaacagaattgtaagttgtcttcattttagtaactagttacttgaaattttgaatatgtttattaacttgaaaaattatcattatgttactctttgcagaaggattagtgacttaaatggggagatgagctcaaattttccagacttaagaaaaatgacaaatcttgaaagattgtgagctaaatacatgtttttctataagcttttatggttgaaaaacaactcaatatttgaacattttaacatataagacttttgtttgaaatttcaggatgttgaggagttgtaatctaagaggaaatattccaaattatattcgaactttgacgaatctaactg

SEQ ID NO: 17112 - DNA, 3440 bp, Cannabis sativa
  modified_base (2242)..(2248): a, c, t, g, unknown or other
aaattttaattacagggcaatttgggtatcttagaaaattataggtattattttgtacaaattagtgtagggtataaattttgatatggggtttttattagttattaataatgaaaattttcttttaaaatgatacaaaatagactatcaatttaattttcctcaaattaaaatttaataataactagatttgttatattttttacatctatttggactagaaatttagcctcaagttgattatattgaaaaattaaattaccgaaaattaagttcagtatctattttaattattttatactattttaaaaaatacaaaatttagctacattgtcatttaacaaaacaaatgatctactctataaattttacaaaacagcatatgatgtccagtcatatagaaattgagtaatatataacttctggaaagtaaacctccaccaaaaaaaaaacaccaaactttcacattatatatagatccagtagctagatttctgcaaccatattattcctcactgaaaatcatccccacaacatatccttgcatagtttacaacacacatatcatatataataaatacaaacacataattaagaaactatataaatatataattaagggctataatagagcttcttctttagctctaggcagtagaagtggtagtagtagtacaaacacaacttttttcagcacattcatagtaaggtttagccatatcaggcccttcaagcttagaaatcacacacttccacccttctccacactcacaatatgcctctcccttcttaccaccctcttccacaatattcaactcttggcacactgtcccatctgcactactgcacatattatttatattttaaaaattaaaaaatattatatataaagaaatattacagtcaatctcttattacaatcttttaatcaatcttcgtattcaaatacacatgtcagaatattttttttttggcagtgttcgttatacttataacatcatccctgtaaaattgtaaactattcggaatttttataaaatttacagaaataatactgtaactataatgaataccgcaatgaaaaaaaaaatattgcgatatgcaattttggacgtgaaaattaactaaaaaagtaataagattgcttccgaacaaatattgcggtatgacactacctaaaaaatttaatgtaatttaatttaaatagcttccgaaaaaaaattttttgcattagaagaaatctcaaattcaaatcatctcgtcttaatatcaaaaaataaaaagaaaaacgtggacatacacagtacaacagcatcctccgccgcatttggcgaagattttgccagcgtcgggccccaccgtgcgagtgatcacacagctccacccttcactgcacttgcaaaatgcttttccactgcaaaaattaatattaattcatcaaattaaattaggattttagtttacacaaaatcaaactattatctatatatattattttttttatcaagaccgaacaattttcgttaatcacaaacaaatacaatctttacaaagcaaagttaggaaaaaaaacctgttttttacataaaaattctctccgtgtatctctttttatgagcttccaagtttctatatatttttagcgatttttaatttatagtacactatttttagctttcaggatatatatacatatataaatatatatattatttaagaagaaaaacctgagagattgattgaggctggaaccctgggcttccattttgtgtatatatctttacttgattttttctctatgatatttattatattgtgagcaaattctaatttcttattgagatgtggtgtgaatatattgaggtctactccaatccaaaagtcaattatgcccttgattattcaaggtgggaaacatattatcaattgggttaagttgtcattttaccttttttgtctttttttttctttttctttaaggtctcgaatatgagtcccatagttatcattatagaggaagaaagtgacaagagtattattaaaattattcatcaaagaaaagattcggagaataaaagataatataattaataaccataatgataatcaaacccgcaattattttagggaaacttacaaaatgctgaaatttaagttaatttttataaaattattgtcatacggaagagttttcaaaaatatgtgttttcataaaacattagtagaacacaaaacagaacannnnnnnacaatagtagaacaactaaaaaacaccagtaaaaacttaacacagtatactgcgtgtatgaaatttataaaaaaaatactacctgacaatatttttgtaaaaaaaatgataaaaattaatatatcatgtaaatttcccattattttacgagtaatggtataaactcacaaattatcctccaaaacttgactcataatggtgtattagtctttgtggtgacctatcaagaattaaataaaaccaagaattgtagtactctaatgacaaaaaacataaattaaaatataaaagtgaattaaacttgactcatactagtgtgttagtttacaatacaatagtgtcttgcatttataaatacacacaacctcttttaacaaaccctcctccctctcaatacaaattgaattatcatcttaattcttttctaaaaggtcatttaaaaagagtaatacacaagatcttatgtaggcaactcaatataaaggatacctgaattagttaattgacttaactacctcatgaattaattatagacaaacctgctccatctaaccaactactaaatgagtctaaaagagtatcaaattactcattcacaatcttttttatctaattatatctaattaacaggttttatatattttagggtaaatatgattttagacaatgtattttacaaaagttattaattagaccttctgttttgttaaatgacaaaatagatcctaaattttccagacggtaaaaataggacccaaagatcaattttcaaaaattttatttttaaatataactaactttaagacaatttctaacacgaacagatatagaaaatgtactcaattttgtcataacatctttaaatcagattattattaagttttattgtaacaaaaattagtttagggtcctacctatttatacaattttagaaaatacgaggtttattttgtcatttaacaaaataaaaaatccaattaataacttttacaaaacacagtgtccaaaatagtatttatattatattttattttaataatcattataaaatatcattaaccatagtagtactactaattaatttatgagtgtatatcatcattactatacatcttatattattccactatttcatttttttagcattattttgttggtgcttattttggtggcctttttttttttttttttt

SEQ ID NO: 17113 - DNA, 7101 bp, Cannabis sativa
ataatttatttttatttaatgccataaaaagtaaactataccctcaattctcatatttatgaaaattccccaaccataaaatatatttaaattctctccatgtctttttttaagaaatatatttagaaacaaataaatgaaaagtgattactgctggagttgccaccttcagttattggtgtggaaaagttgttaaagttactattggtaccgaaaaaatcactggagttgctacaattgtcgaaaaagtcgacagagttgatgtcgataccaaaaaagttaccgaaattagtataattgacggaaaaaattaccgaaaagtcattagaattgtcaccgttcttggagtttgacggtgaaatcgtcactgaagttagacgtagaaatgtaactctggcacaacgaaactaatttcttaaaataacaaaaaaaaaaaaaaacttaaaccttaattacgtaaaataataaaccaacaattaaacacgaagatcagtttaaaaagctacaagtaaacatataaaactataagaggataaattgaaacaaattaatatacttaaaaaaaaagtcatgaaaaatgaacccttaaaacttgagttagattttttttttccttgtgaataacctttttacgaatttttaattggaggaagttcttctcacagttagcacttgaatatttagcaacatcttttattgcatttttattggaggaattatattctatctgaacaaaaacataaaaagtagaccgaacccaatttcatcatacaacaacaatgaacactataaaaaccaaacaaaaactaatttcgtcacacaacaacaataaagattataaaaacaaaacataaatgataaacaataaagataactgaaactagttttatcaatcaaccaaatggaagaaaaaaaatacacacacaaaaataccaaaaaaacaaatataatcaaaacaacacacaatgcacaacaataataatctaagaacggaatataagtgtgaaaaccagtttcaaacctaaaaacaaaataataataaaaaatttaaaataaaaaatatataataacatcataaaatgaagcaaccacattacataacctttaatgtgaaacctatttcgaacatgcaaaaccagtttcgaacatgtaaatcctgtgaaacaagttttaaccaaatgaaactagtttcgaccctatgaaaaatcataactaaaatataacaaaatctgtgaaaccataacaaaagttctgaactcatacaaaatcataacaaaatttgaaaaaccaatttcaattatataaaaaaataatatgacaaacttgaaatgaaaaatagattaaatactacaaaaaatggagcaatcccattacaacaaaatataaaaaccaaatatacattgttgggcctcgttcttcttccttgttgggttgccatctcaccttgactcctacattagtatgatatattgtccgctttgggcctaagccctgacggtttgtttttgagcaccttcctaaaatgcctcatactaatagagaatgtggaacacttatatccaagacaactcttgtctattcttccaatgtgggacttaggttgataccccaacaattctcccctcaaaccaaggaccacatactcgtgccctcccctccagcgaaatcaccttacgtcaccgctatcaccaacgaaactcgccgcctgaccatcacctttgttaggttgactttcgacacaggtcctaacaccgatctccaccttgtaccgctgtaatcatcaacgagacacgccacatgactacctcaatatcaggtagactttcgatacaaggcaccatatagatcttcaatcgcgaactcatcacattgagggtttctttctcccacacattgcaaatgcagtccattaccccagtactcctaaacctttggcactgataccacttgttggaccccattcttctacctagtcgggtcgctacctaacctcgactcccacattagtatgatattgtctgctttgggcctaagtcttcacaagttttcttttggggtttttacaaaaatattagattttaggcaaaagtttacaattttactatcacacagatttttttacaaaagtaatatttttttttataaaacaacaaaacagaacaacaacactaaacaactaaaaaacaactgtgacaacttaacacagtatatagtataaagcttacacaaaatttttgaaaaaaacacaatatttttaataaaaattcaatcccacgataaaaaagtaaaaaaactgaaaattttagtatgtactgtaaaaatcctaaaaattaataattaatattcattacatagattgtttgggccataggatgattacccttaaaattccatttgttctttgctttgattaacggtccagattattccctgctctaatcggaattcggagctgcaacgtaattcgcacgtgccccacacgtgtacaacctatccctgccaatgccatgcgacaatctttctcccccaaaagggtcaaatcaaattgttgaaccttcaaagtccaatcgagcagagagacccttacgcctcgcccaaccctcgataccatccgagtcccgacaatctcagggcgtcactattcgcagttcatcgccatgtacagagccacagcttcacgcctcagggccctaagggttagtaatttattttatccccaaaaactcccaatccgtaaccctacgggttaatctttagctcgaatccatgtttactcatacacatctttcatttgtacatttgcgaatgattctatgtatgtccaatcttattcgtagaaatttatggttatttgcgtatctattgcttattagatctctcgtttgattctatagaacttttgatagttgttttatatgattttaacgtagtgtttgtttccagaaatatgtcaggaatgtagaaaaattatgaatttagaaatcttgaaattagtttaattcatttacttaagcctaatgcaagttttccatgaacttgagttgaatcatttagttcttttgtttacgcacctgtttttcgaatgttaatgatgtaaatggatagcaaagaaaatgtgttttgtttgtagattacactgggctttacttgttactcctgttttggggtttggtgccttttattacaattgagtagttagattgattggcaatgggttaatgacatcttaccaaacaatggttattagggtcgtagctgccatagggaactcgtccgttttgcaagttcaagtgctgtttcaacaagtcagtcctcatccacttctggaggtctatttggatggcttttcggtggaggttctaggactttacctcctctagacttcccactaccgggtgtcaatctgccttctccattgccagaccacgttcaaccagattccaccaaaattacaactcttcctaatggcctcaaaatagcttcccaaacatcagcggtaagtgggtttttgggaataaatgttttgtgatatattttctatatttttcattggctatcatgagccatcgtgctttaaaactaattaattggagttggattctgttgctttaacagactcctactgcttcaattggcgtatatgttgattgtggttctatatatgaaacaccattatcatttggtgcctcccacttgctggagcgtatggcctttaagagtacaagaaataggagtcacttgcgtgttgtgcgtgaggtggaggcaattggtgggcatgtacaagcctcagcttctcgagaacagatgggttatacatttgatgctttaaagacttatgttccccaaatggttgagcttcttgctgactctgttaggaatcctgttttcctggattgggaggtcaatgagcaggtaaattatcgtaatcattgtatgatagaaagatagttacttctctgatgtatggctaatcatatttagttttcacagcttcagaaggtgaaatctgagattagtgaagcttccaacaaccctgacgctttagttctggaagcaattcattccgctggttattcaggagctctggctaatcctcttttagctccagaatctgcaataactagattgaatggtacaattttggaggaatttgttgctgtaagttccataactatcttcttgcaggtttcactatatcaaatcatcttctagttactttacgtatgcatatctgggtgtttgtacagaatgttctgagacttgcatgtttatagtttatatgttaactttaaaggtggcctctttacgtggactgatttcaatgaaaattacaggaaaattatacagctcccaggattgtacttgctggttatggggttgatcatgaggagctagtatccattgctgaaccacttttgtctgatctacctagtgtccctcgtcctgaagagccaaagtctttgtatacaggaggtgactatcgctgtcatgttgattctggggtatgtctatccatcaagtaatctttgttctcagtacattttcaaaaatttaaaatgtaattatcttacttcaccagagaacccattttgctcttgcgtttgagtttcctggtggctggcacaaggagaaggaagctatgcaattgactgttctacaggttttgctactgaattctttaattatttgatgtgtctaatattctttggttcccttcttttaatgtactactgtttgttctctaaattccttaagcatgtctacatgttttttttgggtgatatttgcgggaaataataataatattccgtcattgtagatgctattgggaggaggtggatctttctcagcaggtggacctggaaaagggatgcactctcggctttgtaagttgtccaagatacattacttgctgcaactgaatgtataaaattctgttttttattcctccaagcaataaaatctattatctgggtggatttgtagttttttttttatattttttattcgtggttctgttttgattcttggactattcatcatgctctctctccataagtaataaaatgaatagccttgacatctgaatgcacgtgctgatatgatgatcagatgtacgtgtcttgaatgagcaaccacaatttcagtctatttcagcattcaataacatctacaacaatactggcatttttggtatccaagctaccactgtaagcagcccttttctccaagtttaaattttttatcagaaaagaaaatgatagtgggcatgctaatattgttatacgtacacatactatttggtatccaatctaccaatgtaagcaggctttttcttcaagtttcaaagttcttattagagaagaaaatatcatttgcatactaatatagtttatgtatacacatataacaatactgatttttttgttatccaacctatcactgtaagcacccatttcctttgaattaattatttaaaattagaaaatgatagttgcatagtagtattgtgatgtatagacatacaactgtactggcatattttggtatccaatctaccactgtatgtggactttttctttagcttattttttttaattagaggagaaaatgatagtttgcatactcgtacagtcataatatatacacatacacaccacattggctgttacagaaaaaaagtttggataaagagtttattctgaagctacatgaatgaaccaattgcttctgtccctctgtatacaggactctggttttgctgcaaaagcagttgatatagtagctaatgagcttattgcacttgctaaacctggcgaaggtatttatattattgtttcttgactaatcaacttcactttggatcctacttcttatacattttcccctcatgtacgcagttgaccaagtacagctagatcgtgctaaaaagtcgacgaaatctgccattctaatgaatttggaatctagagtatgcatgccatttgtcatgaaatttttccagctacatggtagctcatgtgcattttgagtttataaatttcttaattgctcattgacaatttgtttttttatagatgattgcatcagaagatatagggagacaagtcctgacttatgggaagcggtatgacctgattcataaaataactggacctgtttgactttagcaccacgtttgcacattagtgcataaaaaattgttgtctttacctggctaagctttattttgaaaaagacattgtgtactgtgataggatgcaagtggagcatttcttgaaggttgtagatgaagtcactccaaaagatattgcttcaattgcccaaaagcttctatcgtctcctctcacgatggcatcacacggagatggtacttatccaatcttttaattatcttgctgtttatgattttatggttatctgcttttcttaataggtctctttgcaattttatttgatttttctcattttatttttggtagtcatctatttcccaagctacgattcagttagcagcaagttcggtgcaaagtgattctattgtacaactaaaccggacactgggcaggcaccaatcttctgtgactaaagtgtttgagaattgcttatcgtgtcaagttccttttacagaaaaaatctgttttaaataaggagaaatttctaattgtcaattactcaataaattggtggttctggcaagcagcccactaggcccgagttattggtggtaggctttgtcagacaatgggtttgaattccagcttttggcttagtgtaatttttttgccattagaaaaaaaggctttcctatttttttgttcagggttaaatatttcctcaagccgaattgcaggcataactatatcagttatatacaccattggattgttacattaaattccaagaatgccaggaattttggatgaaagatctccattgttggtaagagcatcgatattgatgtattgcctttatttttttgctgctagttgcaattatcttatctttatctttcttcttcgaaaattgatggtgagtaagtaggttaagacatttttgatctgagttgaaagttggatacatatttaagcacacacatat

SEQ ID NO: 17114 - DNA, 3802 bp, Cannabis sativa
ttttttttgatcttttccatttttgtattactctcaagtttaggaagaaaacgaacatgtttttagtcaaactgacttgcagagatcctgtcagaagagagctctttccttttatcaactacctgaactagaaaaaatccagttacttatcttgttaaaaacttgattctaaatgcagaaattgaagagcacagagaacaggcaagcttcagtttcaatgagagagatcagtgatgctgaatatgtatcagttggaggagaagcacatccccctatgagtaataatatcaagaaagtctcagttttacctctggttttcttgatattctacgaggtttctggagggccatttggagtggaggacagtgttggggctgctgggcctcttctagctcttgctggtttcttggtctttccattgatatggagtgtcccagaggcgttgatcactgcagagatgggtaccatgttccctgagaatgggggttatgtggtctgggtatcatctgcactgggccccttctggggtttccagcaaggttggatgaaatggttgagtggtgttatagataatgctttgtatccagttctgtttctggactatttaaagtctgcaattccggcaataggtggtggcttaccaagaatcatagcagtgttaattttgacagtcattcttacctatatgaactttaggggtttaaccattgttggatgggtagctgttctcctgggtatcttttcaatccttccttttgtggtcatgggagttatagggatcccaaagttggagccttcaagatggttggaggtagatctacacaatgtgaattggaacttgtatctcaacactctgttttggaaccttaattattgggattcaataagtacacttgcaggcgaagtacataacccaaagaaaactctgccgaaggctttgttttatgctttgatcttggtagttgttgcctacttcttccccctcttgatcggtactggggctgttccggttgatcgtcatttatggactgatgggtacttctcggatattgctaaaatcattgggggagtttggcttagatggtggatccagggggctgcagcaatgtcaaatatggggatgtttgtcgctgaaatgagcagtgactcgtttcaacttttaggaatggcagaaagagggatgctgcctgagttctttgcccatagatctcgttatggaaccccactggttggcatattgttctcagcttctggggtgctattgttatcctggatgagctttcaagagattgtagctgcagaaaacttcttgtactgctttggaatgattttggagttcatagcgtttattttgataagaattaaacacccagctgcatcccgtcctttcaagataccagtgggaactgttggagccattcttatgtgtgtccctccaaccattttaatatgtgttgtgttggttctttcttctgtcaaggtgatgttggtgagcctaggcgctatagctataggctttatgattgagccctgtctcaaacatactgagaaaaagggatggcttaagttctccaccagcactgatctgccagatcttaatgttgctcgtcaagaaagtgacgccataatagatgaccaagttcttagaccatgaaaatgtgaaaccccaacactactttggtgttactactaccttcgtgaagcgatctacaacagcttttctttaagtgatcaagctagtaaacaagtacggagttacatgtctgtattataaagctgttggtcgtcttagtatttagaatgatgataaacctgtttgtcatcttagtttttagattgatgataaatagaaatgtttgtgaaacctttaaaaatcaggcactaggataccatggtgatggtgtagcgttgtgaacttggttttagtggagtggtgatttgccttaggccaaatcaaatacatatatgtacattagacttcataactggcacagatctgtaatgtgtaaccttttgttatggttgttattcatggaagagctttaatgcagctaagtaactgttcctttctctattactagttcaagtttataagcaacttcttcctaaattggattattatgacttcctaaacatactacctgtgattcttaccctcgcaaaagttttgcgtttttctgaagtgtaacaactatacatgaacttgttcattaatttagttatatgtatttaaatgtccacaaaatttgtttattttcccaggatatgcaaaagtgaaagttcttgcagtaagattggtgtaaattttgtcctaaatatggcataaacaaacaaggtaacagtatattggactcaattttacaattgtactcaaaaaatatcaataaagacattatttctatgaaaaaaatacacgttaggaggctttcaattaataaatagtatttatatagttacaaaaggtaaatttctcaaacaaaaaaaaaaagttaaatagaaatggtaaatatcagtctgtcttcttttattcactttacagcaatgaatgtgttttatacttgtagagtactttttttatttccagattgcataaggaaaaggggtcaaatggtagtggctatgcttagtgactatatgctgcatagtcatcagttaaaaattatcacttgtctactggaatgataagaattataaaaaaggtattcaatgaaacgatttttgattaaagttatacatcagttgagctagtatctgatactactaatacacattttttaatgtggaagagattagattccaaatacatctggctctccgctcatgaatcgtgttcctcaagacattggatacatacatcacactagtttgctttaaggaatcaaacaaaactgtaaaaaccatgagataacaagaaattgtaaaacaacttacaatttcattaaaggtatgtggaaaattacgactaaggctgcaaaattaaattaactaagctttaaagaatcaaacaattagtaatgacaagatttacaaaaattaaaccgagaaatcggagaaaaatagagcaaacaaagtatataatttcaggaacaataaatgcagaaaataaaaaaattaacaccaagatatatattgattcaagtccaataaatcgatgtaatctatggctctactgcagttctcgaacaccaccaaaatcctctttattgatttagtaagaataagtacaatgcagttgagacgagattctctgttgagttctcactaagtgttttaactctcacacttactcctaagaattttcttcatcaacaaaagattcttcatacaaaactcaaacccaatctctctcttttcttagcatatctctctctacctctcaatcttttctctctcaaactctcaaactcatctgaactgagttctcaatctcgtgttacgaaaatagcagctcaagatggtatttataggctacggatcaacatcctaaagtcggtggctgcaagaaacgagattgataagttagttagaaataactaacttaactaactcctctttgagcgaagtctccccgccagcttaagtatcagagcctctaagaacatatatgagcttccggactcacggactacggacatacgttgatgacgcttttggataggattgagccagctgaagttgactatctggaactaccattccaggagggacaactagccaactagaactccatcccagagtgaggctagctatcttgaagactgaacacaagtggacatgatagtcattgttgggttttatgccc

SEQ ID NO: 17115 - DNA, 7485 bp, Cannabis sativa
  modified_base (4373)..(4379): a, c, t, g, unknown or other
  modified_base (7363)..(7379): a, c, t, g, unknown or other
  modified_base (7424)..(7440): a, c, t, g, unknown or other
ttattaagtcagctcaaaggatatactataaggtaagtctgcaaagaaaagaatgcaacagttgatgcactcactcgactagccagtaacaccttgatagacatggcaaacttggtgtccattaagttcttaaaagaactaagcatcactatttcagaagaaatagacatgttgaatgacaccccaacatggatgacacccataacggtatacctctagacaggaatcttgccaaaaaacaaaaatgaagcaagaaaaataaggaggaaagctactcagtatctaatcctgaatagggttatgtacagacgtggtttctcaatgccacttctcagatgtgtcaccaagatagaagctcaacgactataaataaaaaaggaatgaaggcttctgtggaaatcatgtcggggggcaaagcctttccaaaaagatactcaggcaagggtctttttggcctactatgatcgaggattcaatggactgtcaaaaaatgtgacaagtgccaaagattctcaaagatcccgagagcttcaccaaatgagctcattctaatacagtctccttggccctttactgtgtgggggatagacctaatcagtcaactccctaagggaaaaggaggagtacaatgtgctgtggtcgtagatgactatttcactaaatggacagaagctaaaccaatgatgacaataacttccaagaaagtccttgactttgttgtcaagaacatcatatgtcagtttggactcccatagaagattgtatcagacaatgggaaacaatttgatagtgacatgttcactgacttctgcaacaaacaagtcattattaaaaagcttctccgcagttgcgcaccctcaaatgaatgggcaagttgaagccttaaataagaccctcaaaggacactatgaaaaggcatctagaagaggcaaaaggcaatgggtctgacttactcccatatgtactttggtcacacaggaccatcgagaagacagccactgggcagacaccctttgcattaacctatggctatgaagcaatgctacccattgaattggaaccaccatcccattagaggatagcctatgacaaagatgtagaccacacaatgctagcagaatcccttgaccaaatagatgaaaaaacagaccaagccaacttaaagctgcatgcctaccaacaaaaagtttccaggtatttcaataaacaagtcaaggaaagaaaattctttgtaggagacttagtgcttcgaagagtattcttgaataccaaagaccctgcaacaggagtgtttggaccaaactgggaaggtctgtacaaagttacagagataacaagcaaatgtgcgtacaagcttggcaggaacaataaacacatggaactagttatcctaccaagatactcgaatgatgaacatctcaaaaagtactatcaataaccaacttgcaaaaacaacactcttcattagtggttcttgtataactcaccgtacaagaattaggataaaagagctaagtttccaccactcttcagtggtggcccctacccggcatgccgcacaggggtagccaaaatgatgaataaaagaagactttataattgtaagcttttataatcaaaaaaatgtacgttgcacaagaacaacacatatgtaagaccaattagtgaataaaaacattttttcagttcaaaattgtgtcaaacaacttgctaacgagtgaacttcttaaagttaatctttattttttagtttaacatgcgtacaaataggtccctctaagaaaatacacagggaaaggtctatagtattttgtgaatttcaagtgatcaagagaccataagtttgctcgatcacttgggggcacctacaccgtacaacatcaaacaagcactgctaaacttaagcaaaatttaaagccttgttaagaaacaaattgaaagaaaagtaagtgcaaatggcatacttctgattagacataaaaagcatatgttcgagattaaaagttgcccagttagctacatgtctaacaaaagatattaaagtctggatttaagactccctggtcgatcatctgtttaaaagtacaaggctttaaggccatacacgaacattgtttgaaagtaaagggccttaaggccatacaagaacaaaaaagtatgcaaaataaaagcataaaaacaaacaacaaagtcctgaattgtctttagaataaaaacttgagatagagggttcaaagttgtattagaatgactagttgtccagactaagtaagtctttgccaatccatttgtcacctccctaaaagttgtgtgggttcatctatgcaaaaaggcagagggaggtgaacaaccagagaacataaaagacttaaataaaaaataggttaactgaccaaaacccaagggtattaaccatatagccttgaaatacaaagctattaatcgacaaagtataaaattaagactcgtgaatcaaacaacctatgtatcaaaggccattgatcggcaagggaagatttggcccgagatgtactagacaaagttcctacataggatctaagtgctagatagatttcctagcaaggatttaagcactggatagagttcttagacatgatttaagtactaggtagagttccaagacaagatctatgagccagatagggtctctaacagacacaaagtactagtccaagaatcgatcttgttcatcaaaaagtcatacattatgcatcctaaaagctatcaagtggattacaacgtataaagactatcctaaaatgtgagaataaaaaacttttctaaagctttaaaaatctagaaactcatcaatgacagattcaaagaaagagagaaatttcaaagaagagaaaatgaggagagtaaaaagcacacatgggagagagaagatcaaaggtttaaacatgggaaaatgtacaaccatcacacacccataattgattgacaataaagtctttttgtcataaaagcacgtcatctaaagaatctaatacttggccaagtaaggctgaacggtaaaggcttcaagatctaagacaagagctaaaaggcccctatccgttcaggcgtccaaataaggacttgggggaaaatgttatcctagttttagcccacctgatgtggcatgtccacatagtcaaaacagaagacacatggaatataacctttcaacaaccagacaggtacactccatgcagcttaaaagtcaagaacaagatagaggtccacaagtattgacaaaactctggtaggatgaccagcatgtcggacaacttacagcccgtggaagaaaagtgtaagataactcaccatgaaccagcaagggtagcgttgtacagttcatgaactctcaagatgtcataatcacaagatagagtcaaacaagggaagtctttagaccctggcctaaccatagatggccggccaaggaggtttgtctaaccaagaaggtctatccaaccaaggaggcctggccaaccaaggaaggttcgctggccaagctgaacaagaaagctgtatgaacatcccctaaagatagggctatacaaacatgtcgaacaacccccaaagacaaggctagtcagccagaacgtgcagacagctcccaacaggctgaacaaatcatggggtccacaataagccttctagaagattcgtaatttcacctaccattgttggacaagttcaacaacccatgaagatagggatattcccttaggatattagtcctatattctagggatttagttatccttttttgtatttcatacaaaagataaaaaaagatattaatatccctacttttgagggataactcttcctctttgaattataatatcttgtgagccctatactatataaagggcattagatcacatgaaaaacaaccccaatcctaagctacatgcctatagctctctctctccctctatggtccacacgcacctaaggcctcatagactctaagtctattttcttcatagaatcttatcggttcttcatctgtaacacattgttatcacaattgtaataatgaagaattccatagctagaaattataagctctaagcctgtaatctgcatggtattatctcaagagtaaatacaactaaaaggggagtaggtcattactcattcatcaaggaggccgaacctctataaatttgtgtgttatttttatgatttattattcttatttactcgtggtgataatcaaaaattaataaggatccgttgtcagttggctaaatttcaagtcaacaagaagtattggctatacatctgattggactgatattgaccgtggaaaatatatcataaacttgtaattatatcttttctaagtcaatgtnnnnnnnttgatcatagatcatttgatctccatcttgagattattgagctcttgcttaattgtatctcatgggttctttgacttattcgttaccaacttacgtgtaggactagcccatgcttacatcttgggaactcagtagtggaattgagtggagtgttaatcatagatatggacatcttagcctctatgtttattagaagtgaaacgatagttttctttgagtttggataaaggcgttaaatggttgaacgttcatttcaataactatattagtttcgcaaaatatcatttacaagtagctaagtgttgccatacaagttatagaatataaagctcaatttcataaaagcaactcataatgaaatccttttaaagagaaaaatttaaattaatactttcaaaaatgtcacaatgaattatctacaataatatgaaatagggaataaaattctcaaactaaaattgaaactgaattgttcgagaaataaaacaactaattcaaaaataataaatcaagcttcatctttaagcttggacaatctccacccctttgtccaactatccgtcacaactcgctaggagaataacccatgtttaagtaactggagcttaaataagaagaacataaacatggttagtagatctagaattaataatccaaagggatagtaactctcaaacacatgaattcacaacaaagttagaaataccttgattctttgccaaaaagttaagacactgaggtttccagtggcctttttctttgcaataaaagcatttctatttttcttttgcttttggattagtagcctttttacccttattagctgtgttaatagctttgagaggctttttgttgttgttccacttttttttttctttgcgggtttcgaagtagaggtaatgtttgtatcatgttttttacgtactaactatagaattactagaacttgtagctttgttacctcctttctatggacctctgatcaaattctcaaacgtctaaacattgttgatcaactcgtgaaattcaaaagtcaacttgttcatgacgtaatctgaagtaaggggtagaaaagctagagttaaattgttcaagataaaactcacttgagtttcttgatcaatgatatgatgaagacactaaggctaagagattcaaagaggaacttaacatcctagtccacaaaattctaaaacaagaggagatcgtggtcaacactaaaggagaacataaatttgtgcttctcattaaagtagactcaatttagactcaacttaggagtgatctaaggctgatcacgtttttgatagctatgggcaactttcctttttttaattttgtttcctttattctctttatttaatttggaaattgtctttgttttagtttccatttttcttggttgtaagttggctatataaagccttgtaaacactttgaaaaatcagattgttatgaataaaaattgagaggctttcttcttgagtttttgaaagaactattcaaattcataaaggagtattccttgtggcattcaacctgacttatcaaatggatttccatcactgtttatggcatcttccttcataccaaggttcatgcttaactaagcatcaggtcgcgactccacatcccaaaattcaagagttcttggatgccaatataattggtgtcgggtttcatcacaactattggtgtggttcgtatcatttggtaacagagcttaggatcatcgagttttgtctatctttcatttttttttattcaattcatgttctataaacatgttaacttcgtgatctatattcatgttcaattcatgtttcgtgttctctgtttttccttgtcaaatctgaaactactagagcattgacaattctctagtgtctttctttagtttcccttcttttcttaaaaaaaaaagtccaaaattaaaattctagagccataatttgatttttgttgatttcttgtttctattttttttttcttgttttcattagtttcccttaattttcttgaaattcaaaaattcaaaattctcaagctccaatttgttaatgttaaattctttgtttcgttatttgtgtcataaatcactttccttgttttgtttcacaaatcttgtttctacagtttccataattgtttcacagagcttgtctaattggtttccttttttgtgtcattagctagaaagaattgtcgaactccttgatttgttttcttgaaaaaaaagaagagaaaagaaagaaaaggaaactgagagaaaaaaaaagcctggaaacctctcttcaatttttttttgtctcttttagttcccatggtctagaggcctgtttgccaaaaccccacaaaagtgctctaaaaatcatcatttttttttttagttttcattgttgtttgtttggtttgtttggttggtattgctacttgagtcttctcttgtaccatttgattagtttttaaagatcttaaagaagaatacgagtggaaaaagacagaggtgtgagcttatttaagggtaaaagccatcgaatttaagtgaaacacgggtgtatttgagtgacaactttttttgagtgaagcccgtgagggagtgtggtgtggtatttctatatctgttctaactttatttttgcagaattcaatcatgtcagaaaatctagaagaaaatataggcaatgaaactacaccacctacggttccaaatctacaaattcaagttttaatgggagatatgaggatgatgatgagagaggagtgtgaaaaaatacatgaagtagatggggaaggggtagtttctaatgaagagtttgataggacgtcagcaggtaaccataggacgtatggtcgagatatagaagctaggaagcagctacataactatttaggaaatataaagatgaaaattcttgccttttaggggaagagtgaacctgaagcataccttggtgggagaagtgttggaaatttattttacnnnnnnnnnnnnnnnnntcacaagtatgtttattaacacccaaaatatgaactttctaaaannnnnnnnnnnnnnnnnataaagtttaggaaaccttaaattgggtgcagcggaacataatga

SEQ ID NO: 17116 - DNA, 2736 bp, Cannabis sativa
gggatgtgcaattggcaatccctcttgggatgtgtactcatggttcgctgtagaatcatagtaggaatgtgagatgttacctgcaggccagacatcatcattacaggatacctgtactccctcactgacggcaacatcagcagtgttcacagctcccgagtactcggacggatccaaaataacaggatccgacttagagacagtatgttcttcagaatcactatcagtggagtttacgtcaccagatacaaagttctcttgagactgtttctctggggagccagatagagacttttcatcatgctccactgttgagacgtggtcttctgcaatacagactgtttctatatgatcctgaagggcagactcatgactcccaccatcctcatcatcctaaaatacccattacagattaacatgttatagacaacggtgccactaaatacacaattaaagcaaaacaaaaaggacggtaagaacacatttgagcaaaacagagcctaattcacaaacctctgtcaccattttgaatttttcattcagctcttgttccaaagacatcctcatttggcttctctgggtatgtaagtctttccaattagcaaatgctgctgggagagctttagttgctaattgtatcctgtatgaataatgttacgcttagaggagggaaaagctaaactatatatgattttttttctttttagaacaagacagagtattataagtcctttcaaagcactaaccaatgttcacgcaacttcttctgttcttcttgaataaacacctcgtacggttgtacattaaaactattaaggttacctagaactcggttcagagacctagactggatgcttttgccagactgcttcatgttcttaacaatgtcatgttgcttcttgctaatctgaaatataagaaggcacaaagttaatagcaggcaaaactcttacaggaaaaaaagaacacttgaagttgaaacttcatatgatttttcttaaaactcacagtagcttaagaatacctaaataataaagaaaacctaaccaaacaattaaaatttagaaacttagaaacaattagaattttgcatagcatcacatcaaattcagtgtttcctgcacacactcagctattgaatcaaccagctctgctgtaaccatatctaaatagtaagcagaaatcaggtggtatccaatgattgtaatttcttgtggaaacccatagaaataaaattacactttataaactgttataatccagataagataatacacaaaagaatgatcctcagtatagcctgcgaagttgctgattggggtggcagaaactaaacactttgttactaaatgtgaatacaatttctaaaagatgaatgtatatatatatatatatatattcaagaaactctaaccttaaaatatgacatatacatagcaccatcatttgaaaggacattctgatgttgctgcttgtctccttttttaaattttgttccaacatcaaggacatcatctgaaacaatcgatgggcttcgaccattaagagagcctttcttatgcaccctgaaaccagtagaaagtagaagaaactaataagatttatgcactgcaaaaatatattcgagaccatatgaacgaagccgtaaactgaccatatttcaacaaatgaacatagccataaaatgaccatttcgacaactggtttctgtcactagccatataccttctttttttttactctccccttccctttttttaatgtagacaggaaaaaaaatgaaagataaaaattgtaattgttaattagagttgagaaaagattcaaaatcaggatatcaaatcatcaaggaaacttaacccctctgcccaaatataaaaggaagaaacatatcattgtaatatttggacatatgaacaaccatgaatgtcgtactaatatacaaagttttaaacacttttctgaatcagatgagatcctattctctagttcccatatgaaaaggtaaaatgctcatagagaatcattttgcttaaacaggggagaaacaaaaatactacaaacaggaaatatatttatgtaatgcacatccgaattacaactgttcaaattaccaagtttcgtactttttgtgaccataaatacttgaattaacattgtcaatacaaataactgaattcctacctgttcttatggtctgcacctttaaccaggaaagaattctggttgtcactgctgcatgctttctcatccgcagcccaagaacacgaatcagatgaagcagcaacatttccctcaagaacacgaaatctagagtcatttgcagatactgaaattcttctgtccatttgattttttgatctgcatagaattagatactatgaaataagtttggaaaaaaaattaaaaaagcaaatggatctactagagaaataaggcattgcacaagccagacgcacagagcttgaaaaagaacaaaagacagtcaacagcaaagcaataagcagaggcttaatatacagagtgttcctccataactgctcagaattttagacaattaatttatacagaatgacagccaaaaatgtttctcatcagaatttgaccacctaaaagtatattatgtgagcagaatgctcttcagcaaacttgaagataatggaagactccaggataacttgctactttattaaaacaggaaaaaaaaaacaagatataatttcaataaaatgcaga

SEQ ID NO: 17117 - DNA, 3308 bp, Cannabis sativa
ttcttgctctaactgctgctttaggcgctctttaatttgccacaaaattctatattaaccttctttcttattaggtttacaaaattcattttctaatttgggttttggttggatcatggagctaacaattcttgttgtttggaatacaatatttgtaattaatataagttcttatttattcaatatatactttagatttccatttatgatgctgatcttttattattatttttttttggtagtgttatttctctcacaaatttttggagtattgttaactggtacctcaaacatgtgttgataatataattataacattttttttttgacaaaatataataaaataaagaggttttttcatttttacagttcaaaacaattgaaatagtggaaactctaccaatttggtatggattgttgtttccattctttacaagtggtatgtatgtataaatttattgaagctcttatatttgttattcaattgtggagtttgcttttttttatattaggtatacaatttttatttaacaaaaattaaaattatttatactagctaaattataaattggatttttttcaatttttttttaagtctagagtagacttcgattttatcaaaaaccttgtgttttgatgggagactaatgctattcttcatctgagtgaaagaataagggctggtaaaaaggctaataattttaggtcattgaagaatcgtgttgaggattgtggtttgttagatgttaaaagttttgggtgtttttatacttggactaacaaacaagatagctcgtgtttttgcaaagttggattagttctggaaaatcaaaagtggttagattgctatcctactgctgctttttacttcttcattgaaggggatttcgatcattatttggtgttgcttactgcctaccctgtcaacaatgagggggcaaacctttctgcttctttaatatgtggcaagctcacccaaattttaaaacaaaagttcaagagagctggaaggaacctatcatggggactatgtttcgattaagcacaaaaaaaaaaaacaaaaaaaaaataaaaggcttaaaccagttttgaaagaacttaacaaatctggttttggagatgtcgatatcaagaacaatgtatgttggagcaaccttcgtgagattcaagaagatgtgcataattacccattgaaccttgctctaatagaaaaagaaactgaggctaggaagaactatatgcaggctcataaactttatcaatccttcttaaagcaaaaaaaaaaaaaaaaattgattcgcttaaagatggtggtatgaattctaaacttcttcatagaagtttaaaaataagaagatcctaaaacactattttttccataactaataaataaggagcatgggtagatgagccaacgactgttaaagaattatttctttttatcaaaatttgtttggtgtaatagaatgaagcataggagaaaggttctgaattctgctattaaggagggtcctgttgtacctccctctcaagcttcatttttcaattggccttattctaaggaagaaatcaagaatgctcttttttcaattttggaggataaagccaggtcctgatggcttaagtagtggtttctttcaaaaaaaattgaaagttggtttaaattgattgttcagaagcggtctaattagttcttcacttgagtgagcttttgaaggtagaaaatgctacaactattatccttatacctaaaaggaaatgtctgaatcatatgaatgattattgacccatctcttcctacaacgtggtctataaaactataactaaagctatttgcaataggttaaggtatattcttcctcacattattgccaaaaattaaggtggttttgtgcatggtttattgctcataatatcatagtgggccaagacattgtgagacattgttgaaggaagcatacctctccatcttgtatggtaaatatggacttaaaagaagcttattatactcttgattggagatttatagaagagttgctcaccactcttcagtttccccaaaagttcattaaattggttatggtttgcatttatactcttaaattcttcattcttttcaatggtttcatgaatggctattttgcttccaagagaggtgttcgccaaggaaattctatgtcaactcttctctttgttataggcttggaatacctttgaagattgttggcaaagattttcaatcgtctagatttcagctatcaccctcagtgcaaagatctgaaacttactcgtctttgctttgctgatgacaaacttggatattcaatatatactgagcttcgggttttatagtatgcctatttgtgcaaaaaatctttcaaaagctgattgtgctagtattcttgagaaaatagttgcgcgaatcaaaatttagagttcaaaaaatatgtcttaagcaggtaggtgtgtacttataaatttggtactcatcttaattcatacttattgggctcaaatttctattctcccaagtctattttaactacacatttgtagagctttttgtggaaaagtagctatgattatttggccccgagttgtatttcgtgggaacatgtgtaccaatgcaaggcagcaggtggaatggatttttattgcattaaaaatggaatcgagctgctataggcagatatgtttggaacatagccttgaaaaaatacaacctttgggttcgttggctgcactcagtgtatataaagaatgatgattggtgggatcatgaggtcccataaagaagtagttggtattagaaacaagtggtgagggtaaaaaacttgattaaagatagaattgatattgctgattttatgcactagaatttttctattggaaagctttaccccaaaagctctatcaaaatagccacgaaaagaagtggaacagattggagtagaatgagtactccaaagcatagaatgatagcttggcttgctatgtgggaaagacttccaactagagaccggttattgaaatttggttgtatcaaagagaactactacatgatttgttatagtgaaactgaatctcatgagcatctcttcttcaagtgcaattacagccagagaatagtgaagttgttgatgcatgggttggtattggctacaggaattaaaagtcttttaaagtggatcaaaaggtgtcaagagtgaaaattcaaacgggaggtgtatatttcaattcttaatgttgttgtatacaatattaggatagctagaaaagatattctttggaaccaaaaagttccgctt

SEQ ID NO: 17118 - DNA, 5373 bp, Cannabis sativa
ttttttgataaaaaatattgtagtaaactttgtaaattttctttgctaagtcagcaatgattgctttttcttttgttgttttgtaaattttccataatgcgtgtcaattattggctattgtgtcaagattgtgacattttggactaatgcaattctgccgtgttacgacatataacaagtattatcttatttattttccttgatttatactctccctttgtaaaatatgctaattctactgaatttatatttatattatacgcaagcattaaagtcaaataaataaatattatcattattgaaaaggtcggtggaatttcaagttgtaaattacaatttctgtggagcaagtttgacaacaagagatattaattaaccaaggtcaggtgctatctccaactgtgtgagtaacttttatttatttatataacaaaaaaaaaaaatgtctcaacacagctgatattaaaacagaaatgatcaatatgcatgttccataatttctaacgaatcaaacaatggcgtccattaacaaaagaatagaacctatatacctaagatccaccatgaacgtacgtattaactccaaaaaaacaagaggatatttctccaacctcctttcttcttacttttcttttaaaaaataaatgaaaaaaaagtaactacatgtgttcaccttgaaagaattatacaataccaatgttagaacctttcttttttttttccctgtctaaacattcaaaatcccctattggagaagattaaaagggaggttaccataaggaacgagacaattcctcaaatagtaacaaaagggcaacaaagccaagatgagatcatccataatattgttcttaaaaaccatccatcatcatcatcatgatcaccagcatcgtatgcataaatcaacggccctgatccatattaattgcatctcaccaaatccgataaacaatctcaatcatatccaccaagaaaattgatacgatcgattagttgttactatcgaagaaatcaactatatatatatatttgatctaaaaaaatgataaaaaataaaaaagtatttcaatcggacggctgccacgctgacgcagtcaacagagacaaatccttccaacccaatttcaagcacccactttcttctaccaatgtgtatcctttccaagggtacatcccaagcaacaagctagcctgggcggccgggttaccgccaagcgaaatgggtttaaacccgacccgtttaagctcctcaccccacctatccaccttaacctcgccagtcctcttcggcccacccacggccacgatgttcctaatctcacatccaaacaactgctgctccaccatatgtctctctaggctgtccgcacccgatacgtctcctaacgcatcgaacaacgcgctgtagtaatgcaaggcctccacgaacctgcctaagaagcttccgccatggctgaggtcctgttccactatggtgattagtttcggtctcagcaaactcagcagtctcaacgtgcctaaatcgctccctgtgatgtcgtacaggcagtggtgcatccagtggacgaccgtggcctcgttcggcctcacgtccagttggctcgggtcggtgatgcttccgattttcccttctagcgggtggaattcgaaagggagaccgagtgagcttgcaaaatcggcgagtctcctcccggtcgactcgagtaactcggtggaggatccgaacccggtgattctcatggacctgatcttcctcgaccgggaagctaggatgtggaacaatcctggccattggaggccttgcattatatccaaatcgatgacgtggacgcgatccacgccgtccagtgcctggaagatcgcctggttcgccgtgaagtgggagaatttcaccaaggggctgatagagttgtaagactgcaaagcattgaagatccgatgggactgagttaggtttatggttttggtagtaagcggtgagtatcttcccaagtaggagctgatcacacgcgcttgaagagcgtgtgcgaagtaagctcccacgcgctcaggcgacgttccgaaaggggaggatagctcagcaatctccgggagtaggtcaccggcgttgttgaggttatccatagctacgctctcggcgcattgaaggagaagcccgaggagtctcagaccgcttgactcgccttcgacaacgagttcctcctcttgatcgttgaccgccttgtcaccggatatagtggcgtcgtcggagaaatttctggctgagttagctggccttttggtggaagggtcttcggagacagtttcgccgggtgctgaaagttcacgttcgacacgcttggtcttcatggacgaggaggaattagaagggtcggagtttggattcgaagtactgtgtaatggagattgagtgactaagctctgaagcatgatcaaaaatcagacgtaggatagagaaagagagggagagaatcaatagtggtaggaaagttttggtgagaaatggacaaaacaaagtgatcaagagaagaaagaaacaggcaaaggctgtagagagttgcagaagctttttgtcagagagagagagagagagaaagaaagaggggtgtttgggaagagagaaaattgagggggagaaaattgagagaaagtgacagaaagtttggtaactttttagtagtcgttttgttggatcagaaaaacgataatatgataatgatattgagatgagttactaaaaataataataacaagttaattgattacttattattaataattaaagtgtgtgtgtgttttgtttgggttgtgtcgttttgttcgttttattatgtgtgggttaaggggttaagacaaaagtcaagataaagggtgttagatttaattagtctattcatagattatgattaatcttttgattaattaactaaagtttttcgctaatggcatcatttatctaattttttgtatttttcggataaaaaaaattaaaatatataactatcatgatgaataatatatattttttacccacgacatattttcacttaattttcttacgcaaaaatgtgaacaaaaatatgccaattcttttttcacacttcccaaattacttccaaaacaactcactcctttttctcttcactcaaatcactctattcaatttggaatcacataatctcatcacactctacccaaccccaccaccagtcttgacagtgccacctcgaaaccctctctttctcagtttcgcacactctccctctctctttaattccctctatagttttcttttatatatccttctctctcttgttttttttagggaaggattctcttaagagaagagaagatttttgaggttacaaaggtcatttccaatttagatagaagcttcatctaatcccaaagttaattttgctaatttgtgggcaaaagtattagtagagcacttgacatacgtgatagtgacgttgagaaaatgagataaagcagcctgaagagatctccgaacagagaaatgtcttccttggaggccacaagagcatcgatgatggtcttgtagttagtttcaacctagtgaatgggaaagttatcttcggtgcaccaatgaagcaaaaaaaggagagacattgcttcaaggatggccgcatctccgccaactgtgtgaggagaagcaacaacgctaccactttgccatcgctattgcaaatgaccccacctaaaccagctgaaggatgattcttcgagatagctgcatcagtattcaacttgagaaggccttgtggaggaggtgtccagctagtagcaacaggaggtctcgatccaagaatgggtgcattgtgctccgcaactgaaattctatagtcagccaaaaagtttcccgctatatctaggatagcatgagtttgatccgacgagtgatatctaatttccttgttcctgttgtgccaaacaaaccaagcagcacaaagaaagaattctatttcttctttgcttaaattagtaaaaatagtgtaaataatattatgaaaagagaaaaaaatttgaagaaaatatgtaagggtaaaaaattgtacctttccacattcttcgaactctcttgcaaaagaacagggcatgagaaacagattcaacgtcttgaccacaacgggaacacaaggtaaattggataatctttttataggtcagattcttgtttgtcgataaagttgaattagaagctctataggaaaaatgtttaatctttgaggggagattaaggtgccaaaggcgtttccaccaggggaataaaggaggaggaaaggtggttgagaaacttaaatggtatcccaatttaaccaagtaagttctagattttgtgagtatccaaataaggttatctttgatagggtgggggaaggggaatggttagaatgtcttggactatgtgaggagagtaatactggttgagacagttagtatcccacatcatgttatttgagatgaaagaggtcacaagattggggacagggttatttgagatatcttagccatggccaagccagggatccaataattgtgaatgggagaagtgtttcaccattgccaatttctgagatgagacctttttgcagtaattcttttccccaaaaaatactatgccaaacaaaagaaggggaatggccaagggagcagttcaagaaagatgagtttgggtggtatttgattgctaagattctagccacgatggagtttggacgtttaaggatttaccaagtttgcttagcaagaagagcttggttgaagtgaattaaagaccgaaaaccaagacctccatctctttttgacttgcacaacttttgagtccaacaagaagagttagggaatgcacgatcactcccgattccacgtgcattattcttgtggtaccaaagtctcaaaccttcctcgtcttctccataagaaaatctagggttttttttacaatcgattacacagatcaatcacacacacgatatctaaaagcaaccaaacacactcatcaagaacacatccagacacattcaaaatagatattagagttggtgatgaaaagaaacaaacacaaataagagagaatatgaacaccacgatatgatttcagagttcaccccaaatcagtgggctacgtcttcgttaagctaccttagagtgtttcattttcactatgaacatataggtaattacaatgtttccttttagatttcaaaccaagatctttggttgataatctattgattttctctctgtttttgtttattttctctcgacttactctctttctttttctttctttaatttgtttacaactgagctcaaaagagctatttctcacctctctctctctctctc

SEQ ID NO: 17119 - DNA, 6738 bp, Cannabis sativa
  modified_base (4218)..(4228): a, c, t, g, unknown or other
gcttagctgcaagagccccaagttcaacccgccggtgaattctgcatgcatttaacaaagcaccccatatggctgcgtctagatttataggcattttctgtataaacgcatgagcatcatctaagtgcccagatctgccaagtagatcaaccacgcaagcatagtgcttcagattaggagtgattgagtatttatgcttcatatcattaaaatactccaagccttcagtgaccatatgtgatctactacaagcacataatagtgaaacaaaagttatttcatctggatttaccttggagttcaccattttcataaaagtctccacagcaagactcccttgctttcgctgggcataaccattgataagagtattccacgccacaacatctttttcgttggagttaaactggttcaaagcaggacccatccttccacagcatatatacatattcaaaagggcattgggtaaaaaaccctctaaagctataccagtcctcaaaacatgagcatgaatctcctttccagccatcaaaagtcctattttaccacaagcagataggacagtagccaaggtaatcgaatttggtttcaccacaagattcatttgccgaaaaagaatcaaagtctcaaagcactgatcattgattctaagtccaaatataattgaagtccatgatatgacattcttctctgggatgcgatggaacacttccaaagccttatcgatgcgtttacacttggaatacatatcaatcagtgtgtttgcaactatgacatatgaaataagcccagtccttatagcaagctcatgaagtttgacacccatatctaaattccctaaacatgcacaagcagttaaaacactagctatggtgatttcgtctggtgtgataccttgtaactccatcatttcgtaagtttcaacagccttatcaggcagcgcattattctcataactggaaaccatagatgtccatgacacaacatctttagatgtcattcttgaaaagactttctctgcctcccccagataaccaacactcgagtacatcttaaccaaactgttttgtaccgaaacatcatcaaactttgttttaatcacataagcatggatttccttccccaacctctcattgccaagaatctcacaagcagatatcaaactagtcatagtcatcaaatctggtaatactgataattgggccatcactaagaacagtttaaatccttctaaacacaagccattttcaaaatagccagagatcattgcattccatgatatcctatccctcttgggcattgtatcaaacactaagcgtgcattaaccacatcaccacatttaacatacatggtgatcaaggcattgtttacatcgacatccgactcaaacccgaatctaataacatggacgtgaatctccctacccctaattaagtcaggtataccgccacaagttcttagaacacaaggaaaagtataaacatcgggcctaattccaacccacaacattttatggtacaaattcaaagcttcatcaaaaaaacctgttttagcatacccaccaagcaaaacattccaagaaaaaacattcctttcctccattctcccaaacacgtaccaagcatcaaccaaattcccaaaccttacaaacatacttaacaacgaattccccagccgaacgctcaaatgggtctttgaatttagaatatgatagtggacacgagtaccttcatcgcgcgctttcttccactcacacagccttattagagcaatataaacgtcttcttctacaaaaatgtcaagttcttccatagaatccaacagttccaaagctttttccaatttcccatggaggcaaaggtctttcaaatcatagtttgggttatgggagtttatagaggaagtgctaaggactgatgtctcctgcgtttttctaaaggaaagttggcgagtttgaagagtacaagagaagctaagggttcctagcttttgcgtcctatggagttgagaatagggcatttttgggtaaggaggaacgtgagaagctttgctgaaaccgccattgttggagttggagatacagagcattgctttttaagagggttttgggagaggtttaacggccaacaaataaagatgaagaagttataattttaggggtgaaacggcaccgtatttaaattcctcaccacaaaaaaaacgtgcatttgtcaaattcaatatgcttaatagcatatactccccaatctccactgtataaattaacttcacattagataggtcccttcaaataaaaatcaagtacatacaaattacaagtgtaagtacctttctatgttttgaggaatgttagatggcctttgacatggagacaaactcattggtgagttctctattgcttcatctattacttgtgttgcgagacaccatgaatgaagtgctttggataacctatgttataattcagcaagacatgacaataaattttactctttcacaataattcattgaacacacaatggtctcatacttaacaatgttacttaagtttgtatgcagctaagtgagatactactgagtactgacctttggtacatgataaggtttgttttcactcttgatggaaggatggtttcttattgttttttcttgtttttaatagatagataaaggatggattccatgtctatcacatggtttagctattcaaattgtcagttagtttacaaccaaactaactagaacatacctagctttgtaatttgtgatctcattagctatgtagaatgaaaagttataatcgtatatacatcattcctgtcctcatcattagtgtccagaatcataggcgcagttataggacaaattatttatcacataaatttattcttttagtttgtgatatttaatgggttaacataattgttctattatttgctcgtgatttcagcccattagacaatggacaatgagttgaaaaaagttggtgaaatcaaatatagtttaagattcatattttcatgtattgacaaacgcaagaaagaagcatacataaacaaaattgtattttatttctaattccaagtatcatgaatattcccaattttcagactatttgctatcagtgtataaatatatatatatgtaaaaataacaaaaagaaatttaacctcaacaagataaatcgaaccactccaaagccaggactgagacaaacatgactgaaatcaaagaggaaatccataaaacacctttaaaaacaaagaaaacaaaaagtaaaaaactcaaatgggaagaatccgataaacatagaaagatatagaggtgttgagaatgcaactagctgagaataaattttgggagcttacttaccctttgtgccttgacggcttcgcagccaccactagtgtctggcgtctgtcgtagcctaggagtcacggcagagcagaccgacggggaggaaagggacggggggtgtggccgtgtgggtcgatcggcagggaaggagagggtgggtctggctcaacactgccacgcctggatataagatttaggtttatcttcttttaatttgtaatatgtaataggaaatataatagaaaattattaaaaattaaagaaaaagagttagattccgtgccatatatttttaaaaaagatttttgtctaaaaaaaataaataaaagaaatctaaaaaaaaaagttaatattaaaataggttggaagaatgatgtttgataacatgcatatatttttaacattttttttaattgatacttactattggaatgaaaaaaaatgccaccaaaaaataacataccatagtattttttttttaaatcttctctttcgtaattttttttattattaatttatcaagaaaatttgtttatttaatgtatattaaacaataatataataatataaattttttaaaaaaaaaataatataatattattttaataatttttaaaaatacttagtattggattatttcagaacaaaaaatgttaaaaataatgtagaaaagaaataaaataaaataatatatttttaagtgatgaaaattttttatactattaaaaaatactattattagagatgctctaatagtatttaatattttttaaatgtgtcactttaccattaactgacaatactttttttttattcttattaaaaggaattacctagtatacaataataataataataannnnnnnnnnnataataataataataaacatattaaaaggaaatatattagtaaaaggatttgattccgtaccataaatttttaaaaaagatttttataaaaaaataatagaaaaaaagatagtatttaaacgggttatcctaattggtatacaactataattttgtaatttttcctttataaagggatgaaaccaattcaagttttcaacaaactataagcaagaaataaatagagaaagaaagaaatagagaaaaagagatgcagcggttaaggttggaagttgaagattttgttacattggcaactatagtactatatgtcatcattgcaatctttgaagacttcattggattccgtaataacattcaagccaaacaagcatggagcggcttggctacacttactgcaatcgttactattatttatgtgttgtttgcgttgttaacaatttggtatggtcgtctaataacaatctcaccttataggggcgttgacactagaaaaatggagatagtgattataaatgtcttgttggctattttcactgggtatcatacgtttgtgtcttttcaacggatttttccaaatttgacagagaacaaaattttgttcaggatgcattcaatatcgacattgtccattgctcttttattcttaaaatgtgtattcatacacatggattatatcattgagaattctaaagaagagatttatgtatcttcaatagagtgctcattgttaacaacaaataacgatgaaggcgatattgacgaccaatacctggaagacatttttctttaggaaattttattgtttcttctttgtttctacaaattttagaagcactgtttttttttttatatataacattgttagagaagttgagttagttaatttgctgtaattagaaattctcacctacattcattattatcttttgttcttgatttcttaattattgagtttatgttaagcttttggaacttactttgccatcaattaatttgctaatattctcaaaatatattagtttcgagaaataacattgtctattcaaatataaagattctcattcggaaaacttgtattttagaataaataattcaactattttttttcctttatatatatgctaaagcttagttttataaataaactaagtaaacccttattagctttgcaaaacaaaaactcagcaaatacatgatcctcataaatttaaattatactcccagctagttcaagaatgaaaaaagataaataaagaaatataacagaaaagatattaattataattgtgagcagagaaagagaagatattaaaaagggttaattgcatcaaaacttttaatactttcattttatttgtacttacctcagaacttaaagtttggcggtaaaacctctaaaattaggaaacagttagcgatttacagtttatatctattttaggtgttaaatgtaatgttggactgtccatgtgtatatctatataggacgtacaatacaattttattggtccacgtaaaaaattattaaaaaaaaattaaaaaattaaaactaaatcaatttgaaatcaaaaaattataaataaaaaatatacttttttgtctctttttttcttttcatttgcagttctctctcttctctctttctcctaacccttcccatacccatcctaaaagtttagggtttgattggtttgtgatttagaaatgtgttttggaaacaaaaatttaaattttgtaagtgaaaatttgtttttaaatatgtgattggttgtagtgtgatttaatatttttgaatttaaaaaaagtgaatatgtgattggttgggaatctcaaaataaaaaaaaataagagaataattggagagttttttaatttaatgatttgaaaacacaaaaaacataaaaatggtgttttcattttttttagcctaaaactcaaaatagtactcaaattttgtttttgaaaacactttttaggtggacccaccattttaattttttttgaaaccaccattaatattgtcaatactactacctttgcagctaccaccacgacagcccaatttagatctaaaattaacatataattctcaaaatctaaatctaaaagacaaaatttcaaccatctaatattttaaatacattaataatgaggcttcagatctgaaactagaagaaaaagctagagattttgaatagaaagcccttattctcttattcttgttcgtcggctttaatggcggatcgagaacctctgcctcattgtcaatctagaaaatgaacgtccaaccacgtcgaagctacatctttgttcgctggctttaatggcgaatctaagatggaagagttagagctagcgtgttataaggcttcgacgtcagcggaggaggaggaggttggggttcaacggtggttgtggaggaggacgtcggggacagaagaagaagaagaggaagagatgggcagtggtcggagaaacgccgaggtggcctgtgctggtgctcggga

SEQ ID NO: 17120 - DNA, 10506 bp, Cannabis sativa
aaaaaaaaaaaaaaaaggtttaacgtgtcaaaaataagtttcagacagttaaaccatactttcaattattctaaatttttagaaactttgcaagatatctcaaataattactaggacattattataactatttaaatatccaaaacacatcaatataactattcaaatatagaaaacacatcaatacacctatttttagaggatgcactattatatgcagtagcaactaaaacagagcatatttgtgtgtgtatatacatatacatacatatatatacacattcaagtaaagcacaatacttttgatcattcatcaacaaatatcatgcataattatatattgaaaaactgaatttaaaatgctaattaccactggtttacttcttttgggtctagacctccttagctccctcaagttatgaacactactcacacccaaaaccgcagactcaaaggtcccaatattcccaacaatcttcttatcagactccaaactcagataagcatcgacccgattcggcacagccgggtcaacccactgccgagaattgaacaacaaacccatctcagccggaacagaatcaaacccacaagccgaaacaaccaaagaacccgaatccaccgccttctggtgatacctagcctccattagctccataaactcaggctctcctgtaatatccaaataatcggtcccaatctcaacgcaggccgcaacgaccgggtcgccgtggaggcgaaatggacccacgcagttgaggatgatcttggtttgggaacagaggtggtggagtgatgagacgtcgtttgtgtcggctgtgaggatgggaattggaggtggggggtttgggtgggttgcccatttgagggtttgagtgagttttgctgggtttctaccggctaaggctatggagttgagaggtgaagatggtgtgttgaggaattttaaggcttctttgactacgtatttgcctgtgaagcctgaagctccgagtatgatgaggtcgtatggtggtggtgggttttgggtattggtatgaagatctgccattgttggagatggagatggaatggaactactgaaaattgtgaaccgtttggaattggcatttattatattacttcactcactcaactcacaaagtgtttacttgaaatgtgtgccattttatttagttgtgaaattgctaagagatgagtaataccgttaacttcttattataattttttaataatttagaatattttttttctcaatatttttttaccgtcatagtttgaatgttttttctgtaaattttttaaaaaacttgagttatctacactgctaaaaataaatttgaaatttttaaaatacgtgtggttaattaaaatttcattttcggtactataaactattcagaattaactaaccaaaaatttcgaaaatttagtctagttatcccgctcaactaatctttatttttctaaggtaaatagcagtacaaatatctaaagttttaatgtttatttttaaccgtataagtacttaatgtttataaaattctattattgtcttaaacacaccatatataaaacccaaattttaaaggaaaatttaattttttatgcttacatatacttaaatttttttccctaaactcataatatttgatatttgtggaatatgacacattttataatatctctaaaatatccccccatttacatcaccccctctctcttcttctctctttttatttcactccactgtcgagccattgggccccatcgagccatataaattctatttttttacacaggcatcgggccatatcagattctatttttttacacaggcatcgggcccaccatcagacccatcgggcccaccatcggacccactatcgggccatatcaaattctattatttttacacaggaatcgggccccattgggccaaccatcaaacccatcgggcctttgtcttcctcatttttcctgcgataccatcggaccggtgtcgggcctgcatcaagctgcatcgggcccgacgaaatcaaaccctaaacccaaattttttccaaatcacatccgacaaaaataaaataaaaaaagatctgaaggcttgccttcgacatttctgttcgaagctcggtggtagagggttggagtcgcgtctcacggtggtcggtggtctgggtaggcggtgatttggtgcttggtagtggtgatttggtgctgggtgagggtgagatgatgagagaacaacgagagagatagaggaagagagagagagagagagttgaggtttgaaaaatgagaggagtatttttgggtttaatgtaaagtgatcatatttttttaattttgaaatgcataagtttagggaaataattttccccattagtaagcatatataatcaaatttctcattttaaattattaaaatatataatatcagttactttcgaatattctgacaaaatttacaaaataaagtaaacataaaaaaattttaccacaaaaaaaaaatagttaaatataataaatcataagtttctccacaaataactcaagaaaaataaacagtaaaaattacaactcaaagactttgtatgtataatttactttacattaaatgtgttttgtgttatagagttgtaccactaaaataatatatgtatagttacaatagaaataggtaacttgtgtcttaaaaatcatgtgatgagtattgagtacattagtagttgatccgatataaaagcatgattactactcctcaataatacaagttatttaagatgaaccatacaaattcacttaataaaaataccaaagaaaagaaagtctaagaagtcaaattaggagtacacatttacattgaagaacttcttggcataaaaagacaagagtaaatatgagaacgtttttgacacatttataaaaatacgagtcactccactcatcattaattgatttcaaaataaaacatcatcgtaaatcttttaactcgattattcaaaccaacattctgtttaaataatgagctaaccacttgttgtgatccgattcaagactggtgaatcaaaaataaaagaatcaccaccaccttgagacgacgacataagagttctcacattgataatatttttttttctcttttctctttttgagctcatttgagagggagaagcgaattactcaatggacacctctgcctcggggggcgccttgtcctcttcccccacccagtaaggctactttcatcgagtcccgactccttagaatcaggttgttgagcttgcacattgcaagctgcagcgacgggagctggaggagaaggagcacacctcctcctccctctcccaccaccatttttaccgccatttctcgttgtcaaactgggctgccaagtcccgccagtggttctaaccatcccttcaattatctggagatcctcagtcacctcatttcttgacagagacaccaaaccaggtagaacatctctttggaaatccttcttttgcctcccccgcctggcgtgacctcttctaggccttcttgttgccggtgtgtcttcttccttcagattatctagattctccgaaatctgaggctggtaacagcactcttccactttggtttctggaagatttagtattatgtactcaaagtcatcaatgtcatcagcaactgactcttcatcacatacattagtcttatttgtacctgtctcatcatacgatgagacaaagtctgcaaaccagagaagggaattatcgagggaagaatccgattgaagatcgagtgtagcactgtcgtcatgcagataatctacttgaactgaagaaatggcaattaaagcctctgctgcaagctcatcgattttatcatgaggcaaaggctttgtcagttcgctttcttgagattcttcctcagaagtaatcccagtttctgagtccacaataactggagcctccaaatctatcccagttgtgggttttgcaactgaaactgctggagtcacttgatcttcttcttcctcggttatacactcatttaagtctatttcatgtctcacataagacctgtctttctcgacttccttcctcgaatcgatgactttgagctgctcttgagatctaggtgatacagaatcacaagccaaatcacttttgactgacccaacattgataggactattattaccagagacagatgaaacagaaccatgtgttgatgggaagtcaaaaatgggaacaccaagaatccttttaacacttgagcagtcacttgttccagcttttcggtgctcagtatcatggccacgcgtcgtcaaccaagaatcctgaataggactctgtgacggacccctcctcgtgtcagtttggttcaggcactgctgcttagaatagctttgtgtgaagtcgattttcatctgatgagatccttcactttcttcttttagagatttgctattaacaggtggtgcttttctgagccaaggcaatcctccttgtggtgcctccattttcctgggctcatttcttggacctgactggtatccttgaggatcatattgagcaccaccttgaaatgaaatcatgttctggttgaagcatgaaatggatgataaatcagatttggctgcgtcagatttaggaacagatgacatgttctgtagattaattcctttgggaggagcaaaaacagacgaattattattttcttcggagacttctacaccaaatattctccttgtaatctgcttccctgcagtattcggatcagaagggatacatgtaacaaactcattggttttactagcttcagctttagacatgtcacatggtttccggaaatcttgaagatgaaatctatcactgatagatctcttactttcaatttgggctgaaaggatatgtcaaatacaagaggttagtttaaatgaaaacccttcaacctatctctcaatagatataagtacagtaaaacgcggtgtaatttggattaagagttaaccatgaaaataaataagtaatttggattattgtgagatttcttatgcagaacggtacctgagtatgcctgtgtcgattcaggtcgagttttgtcgcccatagtatcaacagaagctgatgctgccacttcctcaacctctatgggttcattcagatcagccaagtaatgggttctccttggatacagattacatgtcaacttattaccattatcatcagtatgattgaacacatttttatctgcagctagagtaacttcactgctattgttaataagacaactttctgttcttgacatttcaacttctccatccggttcggtttcatcatctacatactcatcagcaggaacttcaagatcaaacaatcttctttgagtcttcttgcatttgaaatccaaagattcacaatctttcaaccttgcactgttttggttgagaccataggtggacaaagtggtcctctcatgcatagaactttgatgagtttgaatcacatcagcgctagacgaagaaggtctaccacaaacagaactagacccggacaaatttgagatgtaccaacttcttttatcgtcttcagttgaaaatccagacggaaacaaacttgattgggatgtcccactaggtatcaaatgtttggtttgttctttgctttggaattcattcatcatgtctctttgtattttgtaaagacgatggagttcatggacctggataacaaacaccgcgttaacagattattatattaagggcgtgtttggaaagccaacaaggaactggaattgggtttaagtgaaggtaattacacaatttgtgtgtttatctaaccacgtaattacactatccaattctcatacaccccaataagaattgggtgtaattactaactattttttcaaacaaaatattaggaattcataagtaattatcacctcatatccaaacacatcttatactttaaaatagagtgtaattactatgctatgaaattactaccttagttattacacaattacttccaaacgcaccttaaaatattttaagcctcacacaattgatatggtcctttagatactcaaaacaaagaccttccacaaacccaagcaataacttgaacaagataactaggaaagaagccaatcttcttaaagtgatcaaatatcaccatttcatacctgatgtctcaatatggattcatgcttcaatatggtttgtctcaacttttccttatcacatgcataataatccattccctccattgctggtttcgacgaaaacatggcataatgctggccattcttcgaagaactactttcatgatgcaaagaccaaccaccatagctagccttattattgcttatgtcttttgtggaataatatcccggtagatacatcttcgattgtacttcagttcccattcctgaatctaaccgaaaacaataccaaactcgaattagaaattgaatatgactaatgtctaatggcctaccaattcatcaaaaaaacaattatcacatttggtgtttcaataaaaatgatcattgaacatttcagatagttgcataagaacaatctaaagcaatatgtaatcaaaaaccccatcatccattctccatattagacaacccgttaattatatacttcccaattcaccttaatgaaaacaactgcatttcaaactagagcatatacattaaaaaagttgaataaaggaaacacattcaatctcccactcaaaacaaaaataggactttcacacatttaattaacagctttcaattcccctaattttgataattaactgaacaaagataaaatcccaccaatttagatgagtgggaagcttaatgttaaacttggttttgcagagactggtttataagattccctacagatcctaaaataaactcaaaatcaaaactacttgaacctatcacaatatctaacaaagaaaattatcataaaacatattctattatccaaactaatctggatagattttggtagaatatttaaataatacaattcaaactctgaaattacagccaaaaaatcttacagaaacaaaaaatcaaacagttaatctacacaagggaaagtaaaatcaaagatacaaatacaatcaaatcaccaaaccatgaaatttcaaagataacccaaaaacaattaaattgcaaaattacctcataagtataaaaaaaaagcttatcagaaagcttctcctaaattcaacgaacttggcaaaagaaacccataaattatttcagagccgcaacagagagaagaacaagaacaagaacagttgagtgagcaataataaaaaaccagaaaaccccattaacctaaaagacaaacacagctacctcaaaaagccaagtgggtttatctgaacaaccattaaagaaagcttagatcaacctcaaaaataatatttttaaaaaatcaaaaaaaaaaaattcagatttgctgagccagaatctgatgagaaaatagagagatcccacaacccagatagaagatcttccctatagaaaagcaactcatgacttcttcaagaacaacaatgacttcaattttgtcaacttgtggtctgccattattctatataccttgctttctctaataaagctttcatttttatttttttttatttttgaaattttatatttattttatatttttatttttctggttttttgaggatgtgaaagatatgggtattgttttattaatattataattattaatttccacattttctagattctctccaccttccatgctttttgggtacacatatttatatattaggaaagtacttaagaaaatatatagacacctgggtttactcacccaacaacaacctaacactaacacacttctctaatctaactcattcagtgtcggactcagaattttaattaaattaaaattaatgtaaatttatgtttttgttagcggagtttagttgatattttatttagttgtaatcaataatgttagatacatatttaaattgggatcatattaattaaattaattgtgtggttcaaattaattatactttgttatatgcgatttgagtgtatctcaatcattaatagtatctgcgttcttatattataaatgtagtgatactaccataattgatgatcttgttaaattacttttatcttcagatcacgttatgatttagtagtcgggtctttttaacagtttgtgagtcttgtaatcgttttttttttatagataccgtttaatgataatttcatttctttaaaaagaattgtgtattttattgtattaactataatttaaagtaaatataaaattataaaaagtttgtaaggaaaataatataaactactatttttttgataaaaaaaaattacatttttatgtttaaagttttttttatatatttttatggtattttataaaaacacaagaaaataacaaaaaattacataaaaaacataaaaaataataaaaaattaattaaaagtacaatataaaaatatattaaaagatcgtattttatgtaaataaaattctatataactatatcttagtaatttttatatttttttgaaataattccaaatttgaatctaatgattaaggtagtaaatatgagtcttaatggtaagagtttaaattttttttaaaaaaatatcacttttataattaaaaatacatgttataattaattaaaatattatatatatttttagggtcggttacacccatggtctctatgtggaccctcttctcttcactagacagtacattccacgcgctgttttactcgattgagttctgtgtctctctaaagtacattaatactgtactaagttatcaactctaattgtgacatctttggtttgattattttccacgcgttttctttagagcgtggcttaggattatttcctttctaattaaaaaacactttttttagttagtaaaaggaagtttttttaaaaaaagaaaaaaaaacattctttttaattaataaaagttaggatttcattgagtttgtaatttatatatgtaattaataattatacgttgagaaatgaaaaaaatctgttggctaataagtttggtatgttcttttctgtctatttttcatttggcttaatattatttttaaaataaaattaaaaaataaaaaattggctactttcacctttttataatggccactattagtcaacttttttaaatagaacgtagaatatctctctcaatgagaaagagggtaagataagagtcattaaacaaaatttaatgacataaataaatgcttatgttaatgatttgagtcttttttattgaatattagtggtatttagtatattattagacaagttttttttttaatgaattgatacttcttaagatttattatattaagattaattaagatttttatctttttgaactttgacatctactaattcatgttcctaaatgtttaagaacattaaaaaaaaatttagactattttaataatttttgtctaattttaataaaaaaagtctaacatttcagggttcataatttgatacatctcaaagttcgagggacatgatttgatagacattaaaggttggaggacatgatttagtacataacaaccaacgaattagtaaaattgaatgaaattaaacaaaagtctttaattcaacaatgtcaatagtttagggaatatttttagtagtcattaaaattcggaagcatgatttggtatatatcaaagtttaattaattagccttatattaaattatatagatcttaatacttaattatataacactgataaaatgctagacattattagcattttttaatatttctttaattattttgatatatctaaagataaatgctaaatacatataaatttttggagcactcaaaataagtgatttcaaatgagttcttttttctttaaaagggatcaaaaataaagtatgaaatttactccaaataagttatgcaacaaataataatgtattttatatttttcttaataataaatagtaactaaggtcctccctctaagcataattacgcggccaagaggcttaaaaaaatagtgtgcgaagaaagtgatatgggtgctaccctaaagggctgggtgctcgacccaacgccaagatatcctctgcgtgctcagccaaatcgtgtttcgtgatgcacagctgagtttcatctatatacaacttttttggtttcaaatcgagtagtccaactcattgagttggttgagctaacatttaaccataaaacctttcatctaagagaaacggatactagttacttgtaactaaatacacgattttgtttgtttgcctttgttgtgatatctttacaacttttttgaataattgcctaatatttagggcatttggttcctatgaaaaaaatcatatccaccttaagaaataaaagtagaagggaaccaaaaagttattgaagattagcatga

SEQ ID NO: 17121 - DNA, 9350 bp, Cannabis sativa
tctccctctggaattccaccaattgttctccatccaaatcaccccttctcttgttatgcttggtccaattgttacatcacatatcgccccacctaactctcctcatctccacccctactcctccttaaattccatcaactcttgacaaccttgtcaattttctagttgaatatgcaacttccttgcttcaatctgcacctatcactaatgtttctaatgttgatttatatgatattactaaatatttgcctacaacaactacatatatcgtaatagtttcttctcatcctatgacaaccaggttaaaggctggcatttgaaacccaaaagcatacttggtgtattggaaaccaaaaatagttaaagctgctttttaggatccttaccggttcaatgcaatgtccactgaaaataaggctctattcaaaaacaagacatgggatatggttgttcttcctcctaacaggactaccataggtgcaagtgggtatacataatcaatgttcaagtctatgtcgatgacatctttgtcatggacattgatgaatgatttagtcactgcactcatcactaaactaagctccacatttgctctcaatgatcttggtctagttgactatctttaaggcattcaagtcacaagaactttagaaggtgttctcttgtctcaaatgaaatacttttaggatcttttaaccaaaactgatacgcagaatgtcaatatactcagtctacactcatgaatagtggcttataattatttaactataaaagtgaacatgttgaagatgtgaccttttacaggtttattgtcagtgctcttcaatatgctgatattacaaggcatgagctagcttattgtgtcaacaatgtgtgacaatatatgaaagcttccctggtttcacattggactgttgttaaaagaattttgaagtacattacaaaaactcttgactatgaattacacctcaaattagctcctcatttttcccttgaagtgtcctgtgatgctaaatggatttcaagcctagatcatagaagatccaccactggttattgtgtttactttggtggaaatcttgtagcttggaagccacgaatatatgtcacattatctcgatccttaaccgaagttgaatttcgaagttcaactagtgttatatctgaagtggtctagattcaatctcttcttcagtagcttcacattaaaacaccagctcttccatgtatatggtgtgatgttcaaagtactgttttattagctactaatattgttctacaagcttgtactaagcatataaaaattgacttgtactttgtgttactgtagcaaattcaagtgaagtatgttctagtcattgcgcaactttgtaaattttttcacaaagccaatcagcagtaagtaaccggtttagtgatctgagattcaaagtcaatgttgcttctctagctaccttgagtttgagagaggttgtcaaagaagaaagttaatttattcgattgtgcactgttgctcttgttaggtacacggttagttagaaagtgattagattgttagaggttattttgtatctacatcttgtataataagactgaataagactcttctcttactaaacctcatagtgtaataaatggtttttatttcatgatgaaattgattaatagtttgatttgatgtaaacaaaatattagaggggtttgctttagtaacaccctaaactcactttccaaccccattgtatgaagtatgtatatcagtcgtggtcacgctataaaaggttcattatttttaataatcataataacattattatggaaatgagcaccgacacctctttctctttgaaatatgaaattgaaaacaagtagtgcaaagcgctaaaccattttaatttatgagattgcaatcaagccaagcaaacaaaaacagggacaaaaatatacctgctctgcctctgccagctaatgcatgatgaagtaacgacaaggaaagccaagggaaaagacacatatatacaagttacattacaaccctcttattattattattattattttcattcataacaaataaataaaaatataaatctctttcttttttgtgtgtggggttagatcggttggtggattttgccagatatatgcatgtacgacaggtggtggaaatggctagaacaagtgaacaacacaccggccgaggcgactttacacccaagacaagcatgttaatttagaggagggtctactaccataccagtatttggatcctccttatattaacattactactcctttcgttttagactatatcaattaattatatttggatttttatatatgtgcctgtgccttcctatccaatccaactattattatgtcatgccatatttaactatcttatattattattatttttgggtcagaactgaactgaacacaaaataaatgacagtgaaaaatagtcaaagtaacactactcagttaggttcaattcctatactttctatctatccctgcttcattaagcaaagtataaagttcattttctttcacgttgttaagagaagcgtaaagatggcatgggaatcagttggaggacagaccacgagtctgtatcaccacccaccttattacaactacaagttgtctaaacaaagacacttttagtaccaccaggaccaactaggaaggaaccttgggaaaaaacactaataattaaagaaattggaaaagaatggtctaatggaatataaagttcgagtattttctttccctttttttgtaagattgtgtagtataccatattaatatgacagaacacaaaccctcaaaagctgcaaaggctgcaaagttaaagcacgggatgaaagaaagaacaagctccaagaccaagcatttcataatattttctatctttaatttcactaagtaaaacaaaatgattagtgaactttttttactttttttaacaacattgggttttgcccaaacaaaacacaaggacaatgacccaaatctcatcaacccagaacccacaagccaaacatgtattccacctctagaaaaaaaaaaaattaaaaaagttggggaaaggaaccaaaacttagttaatcatacatctaaaatgtcattttacttcccctatattcttctccccccctacaatccttctccctagtttctcaaacacactgtacatgcaattaattatggaaatcaatacccaagaaagaaaaaagaaaaaaaaaagggagaacaagccaacttccctatatacatgaacaaccaaccacactgtatataatctcctctctaaattatgaagtttaattctccttcgtcctctttcaaggacttgaagaagaggcagcttcttgttgccttggttctctcaaatacccaagtagagtttcagcctacaacaagttataaacaccattaaaattgaaactaaaaatcaaaacccaaatcacattaaatgacatcatgtaatatataaatggcaatgttcaaatatttgacaacattaacaaatttaactccaagtctcaaatgtatcataacaattacaatgcctataaaacggcacactaaatagaataatattatagaatttaaaagctgggaaaaattgagtatagctaactgaccttatgcttagctcgaacactaccggactgagaaagagccaccagtggaggaatcccacattccctgacaagaagccctctatttctaacactgtcaacgcaaagttgaagcaaagtcaacaccgcaaattccttccctttaacagaaccatcctcgatcgcttcaaccagagccgcaatcccaccctcttccacaatagcctcctttccctcttccaccgccgccaaactactcaaaactaccatcgctttctcagctaaccccgttccctgctccgctaccagctcaactaacggcttcaccactccggcgcttacggctctctccttgttctgtttcaccgaacagagcttgtataatgttgttagtgcgtccttcttccctctggtggagccgttaagcaagagcgaaaccagaggaggaatcgcgccacaagctccgattgaagtcttgttctcctctaccagggcaagactgagcagagcacacgccgcgttctgtttcgaggtctctgtacctgtcttgagaacgtagactaaagattttatcgctccggcattggtgattagggctttgttttcttcgtggagagagaggttcagcaaggccgtcacagcatgttcttgagtccacgggtcgctgcaccggaggagaggaatcagagcagggaccgcaccggactcaccaattaaggctctgttgtcggaacgattcttcgctaatagacggagttttgcggcagctgagcgtttcacggcgatcgaagttgattggagaccgtcgacgcagatcttgactgtcggttgtagatcttcaggagatatgctctcaattatctcggttgagaaagtatctctctgtagaaacccttggcatggttcaggctcggctcgggattcctcagtttcgctcttgggcacgttttccggcgacggcaagcacgcgagtctctgcaactcgcccgagatatcgctgctacaggcagaaaaatcactgaaagcctgagaaagctcgagaaattcctcctcagtcgatgtagacttggccggtttgttagtccgggaagcgagttcgccgagcctcatgtcgataacggattccgttaaattctcggaaacacagcgagagacttcggagcagctatggtcttcttggaagatggtggagcgtatggttcgcatcgaacggccagtatttctgttaattctggtagacgagcttggcgacgccatgtaatagtttcgggtcaggtggaaccgggtcgacccggaatgcgaatcttgaagagacaccattggggttaactagccaagtttcagagcttcgagagtttaaggtttcagatatttaccagtttattttggatatgagattttttgttatttaaacattaaaattttctcaaatgaaatctcaggtttgagagtaaagcgaagctagaggttgaagaagatgatgaggcagtggatttaaagttgcagtttattattattttttaagtgttaatgcggctcttgggttcgtgataaaataacgaggcggttttgattcttgtccatcacagaccacataaataatacacatggtctgcttaggtcttgtcaggtgggggctactcgagttagatcaaagatctgatgctcagaagacacgatgattattcagatatcgacggtcagaaacgtcgactgatttgactgtgatcacagtcctgtttcattttctagtggctattcagtgggaccgtcggccgaaaacccatacgacgtcgtttatttatgtctttagatcaaattacagttaagtccttggcgaaatacccctttaattttatttttttttataatttaagtgaaaaagagtgggagaatgaggtggtaagattctgcgttgggggttacgacaagagtcagttacaactgttaatttctgtatgtttgccacgtggtatttaactcccgtagtttttattttaccgccgtgatggttttttgatcgtcgattatccacatcctacggtgattagggtgtttgagaagtgagcccgagtcaaaccttttacttttaataattcttaaattttatccgtgtgtggtttgcgtctagaatcatttgtactcacacgtcaaccacacgtggcttcacgagaaaatctaccgcacgtgcttggatagcccaaaggcaaagccacctatatggttgtactagttacactagtacgagtactgagtacataaagaacgcgttactgattttatcgaggaattaatgcattaacaataaaaccaaaagaaataataaaaaagttgtaccaaccaaatgaccaatctaaccatatacgacatcatttcaataaatatatatatgaaaaaaaaaacatatacgacatatacaaataggagtggattttcgaagtacaataacagaaccgtatatataccaaaattaacctacacataataaaagctcacctaattaatacctaaataatatgcttaatattttatttaaattgtaattatgtccgcctttggtttgctcttataatatttttctttctaatcaatagtctaatttaatttttgggtgaagtagccacttacttgttcaacttgtctatataacaaacaactcattataatttatttgccataatgtcatctataaattaatattttgggttggcaatgagatatatataaattaattattccgaaaataatatctacttaaatgcatacgcctttaattatctaaagattcacgtacaaacaatgtacatggccatatatgatatataagatccaaaaattgtatattaaatactatctcaatatgaccatatatattaaggatatgatcaatcatatatagtgtatgttcatacatattaattaaacgaaccttttgtggacatgcatttttaaacaaatatatatttcatatcattttttaaattgctttttttttttttcattatccaacactcttagctgtttagcaccttagcttcgatttttataataggaattatatatatatatataatcaagaaaagattgagtttgtctttgtcgaatagttctgtgtaagattattagcaacacaaatacatatcaaaaaagtcatatataataaatatagatgattggtatcttggcgcagtacgaaatttatatttatatgttttattttaagtgacgagattataatatttaatagttaggctagcaatagaagccaattaataatattgattattattgatagttacctctgcaataaaacaaataaatatttatttatttataaattaaatgttcaacttcggatgatgtaagatctttgaattttcatacagtgggaaaaaaaaaactaaaaaggtttaagaatatatttgtttaatttttaatttgaattgttccttgctttgtatgtctatagcctttaatttcttcaacatttgattaggaacagtaaccaatgtaatttgtaagcagttctaatgattgtttggttgaagttttaactttaagtagtgttgatcatgattcaacgcgtaagacttatagaatgtttaattagcacactaataataataataatataaacccacttcacttaaaaaaaaaaaaaagagttacacaattttcattattagctcttttcacacacgcatgcaaagaatcatgtggcttttgtattcgtcttatgatcttttatataaataactcacttaataatttcatttttaagaaaaagattatttatttgctaataagagtggggttaggcttcatccaacttaggacttgtaatactcaaactaagattatttgtattgaatatctctgttaagagcctcatcaatcatcacgatggcctacaataattaatgattatttgtgaattgtggatcacattacccagttaggctcatcaaagttcaaagttcaaactgtttattatgtggactccgccatgatatgagccacacatgaggtcagttcattttttcactctcttgttttttgaattttatatatataagaaaaaaaaagtgacaatgacagtgacagtgataattgaatgcctttttttaatgctacatataattaatcaattgtttccagaagggtattaattgaatgttacagatagcgaatttacattgactcaatttggataaagtaagtaatatatgtttaggaaattgggttaacaaaaaaaaaaaaaagagtagaaatcgatcggaaaaccctttttcattaatatagataaattaaatagtcggcgcatcaacttggcacgccaaatttgaaacttaagaagaaaaagttaagacttgaaagataaaagttggtcatataaaagaaaaaatcaattgaaggacaacgacgccgtattagtatatgattggacaaattaccgtagatgagaattaattttacaagtaaacaatcttagttatattataagtttggacacatgagagagagtgcttggaaaaaatcttttattttttttgtttaaaaaaaaagaactttatgttattttattgatactttaggttactaaaagagcttccaaagtttaagaaaactttaaattaatgaagtagattggatgtagctactatttggtggtttaatgagaaattaatagtccatggttgaccttcaatatcacaaaaatgtgtggcagttaaaataggatggaaaatatatatttaacagaatacttccgaagagtacttacgcagctacgctgccaattaaattcttaattgatatttttggcatttagttaggatcttgctgctctttcctcatcttttttctcactacaattcttttattttatcttattatttttttattaaaaaaaaaaaaaaaaaataaaaaaaattatttttactcagaataaaatttgtatctaaaaattaaaaaaaatcataacattataaattattattgctatgttgtgattaaaaaatttgtggctaaaaacattagtcacaaaaattataatttgttgtgtctaatttattttaaaattaaattaataacaaattgtatctagctaaataatatattttaagtaactttttgttataattaaaaatcacatctaatcacaaaaactttatattataactaaaaaattatcattaatgataacttttatttttgtaatgtttatacttacaaccttactaaaaaaaataataaattatacttacaaaattatatataccattatccacaatctaaagttactcttttttaagaaaaaaaagttaatctctatacaactttattaaaaagaaaagccactgtaatatataatataatattttattattagaattaatgtgtatttggtgaaaataatattttgtagataattattattaagcacatacaaatataatataacttaaaattgtataatgtttttttaatttaaatgaattattttacataagggcacccctatcagtttgttgaaactaaagaatttttaaagaaatatagctaaatatttgtttacatcagtgctttatatagcatatctttattttctttgtatttcatataggttaatgttacgtgcaatacacatataattaattttctttttaattaggtttaattaagtaatattaagtacaatacatgtatgtaatttttttt

SEQ ID NO: 17122 - DNA, 6810 bp, Cannabis sativa
ttttttttttgaaaaatgattatattttgtattttatcaaagaggttttattatttaactagaggtcataacacttgaataaaatttgaaaaataaagacaatgtagacttgtcaaaggtgtgttattagagttaaaagcaataaatgtatgttcacaagattgatgaaaaacattaatgggaaatttgcttgtgtgagcataacatggtttatatgagattaatgttcacacataaagatgttagaaaacttattatgttacaagtagagtagagtactttgacccaatattttcaacttgggtatataattacacgaatggtttccaaaacccaatgcttcattttggaatagactatcaatagaaaaatggtaaaaggaatttgtaattagtatcgtaatcggtattatattgttattaatgtaattgagaattagattataagaaaataaattttaaaaaattatcgctaactaattataaggtgacacttatcaaaaatgttgaataacatatttagtactcaatataaatgctcacaatcaatataatattttatggaattccactagattttggagtccccaattgctaaatatttgactcttgatttttcaactatttattaatggcttctttgctttgttatccatatagcagacatgtttagcaaactcatgtgattaacaattatttaaagaaaaaaaaattgcatctctaatttctatttatagttattagctagtggtttttgtttttgtttttgttttatttagttgattgtaaaatgacaagaatgtgcatggatttaattgaccagcacagtgtaaaaagatgggtagaattgtttttttttagcataaatggaagtaaaaaagttcagctgagtccatcaccactggcacaaatgcggcatcttaaaaccgatgaaaattcaatgcggtcttaaaaatcaagattttcattaaaaaaaattttgctcgaagaaactcgataggaactctatgactacttgatatcatttttacaaaaatttgaggtgtttctttcttttttccttctaaatttaagtattttttttttcaaaatttacatgtgggtgatatgaacataatatttgagaagtatatataaaaacttatttttacataaaaaaaaaagtatatattgtattgaagtttattatttattctaaacaaaatgtataaatttctagcaatacaacttttttgtaaaacgtttacaaatttgtaagtatatattacaattttgtaaaaactgttccaaataaccttaatttatcatagaggagcttgttaataggtctttctttgtaactctttccccttttataggtcattttattttgagttttggtctaaaattttgatacatttttcatattcatgaatcatgatgtcagatattatacaccaaagcaaagactttagtagtagtagttgaactatccagaaatttaccttaaaaatgtagaaatgcacaaacacaactgtttgcctacccttgtcatcacctatactaacttttcatttgtttcttcctataattatatttcattgtagaacaaaagagacaaccttatatacctttttgtttgtgaactctcattccaactccaacctttttctttcttgttattttattttatgggaatgttgtaaatgtgtgaaataatctttaattttatattttctcttcataaatggggccataaccttatagtcttgattttagaataagtatatctacaatatttaataattgattagcaatttaaaatttaatattaaattgaaccaataataatatcacaatatttttgttttgcactttaaagtatcctttaacctttttttttttttggaatatatcataatttctgacatgtgcctattatttatttatgtgatgaaaaatggaaggtttggaaagaatgaaatgaaatagtcagtttctttggatcttgggaggtcaaaaatattaatatatagttctaaaagggggtgtaattaaatagagttttttttttcataaatacaagaatctatcaatctattaatctcctattagattgactctaaacttaaaagcttttgtatagtaagctggtccaccatatttttttattattcataaaaaaacaaaactttataaaaaaataataaaatgatttaaaagatcatgacatggattccttctttgtcatattgtcttgcttaaattgtagataaaatataagataagagacactagaagaagagattggtagtttttttatagtcccaacaatataaatttcttattttggagtctctttacatgatccttaatttggaagacatgaacaaaccccaataaaagggtttttttatttatttaattaatcaataagagaaatattcattaattaataacttcctattctctcttgactttagttcttaaaatttagcttattattaaagctctcttttttcttaacaaactcatcctaaaagagaaagcctaagcttcaaaatcaaaccccttttcagtatccatattaaaccacttaatattattattaataacaacttaaagggtagtcttttctttactttttttgataaaaaaactcataaagttgttacctttatcaatggaagagaatattaagaataatgagattatgttacctggttttagatttcatccaacagatgaggagttagttgggttttatctcaacagaaaaattcaacaacatcctcttcctctgcctattgagctcatcaaacaagttgatatatacaaatatgatccttgggatcttccaagtaagaaaagttccaacctttatttgttctctttaatcattattattatgacttaaagtgtgtaaataatttgagtttttttcttttggtttaagaagacttgggaagtagtacaggtgagaaagaatggtatttctactgtccaagagatagaaagtacagaaatagtgctaggcctaatagagtaactggagctgggttttggaaagcaacaggtacagataggcctatttattcatctgatggaactaagtgtattgggttgaaaaaatcacttgtgttctatagaggcagagctgctaaaggcatgaaaactgattggatgatgcatgagtttcgtttaccttctttgacagactcaacaacaacaacaacaccatcaccatctaagaatcataagctttttgataaaagctttcctgcccatgtaagtaaaaaccaacaagactcttattattatcattatatagcatttttatactcatttcttccatgtctattgtagtctttttctatcttatttggtcaaatacctagcgataaactcttatgttcctttcgttacagttttgtattttggaacaagttcatggataacaagcctaagggttttgtccgaaaatatattttgaatttttttcacttttcatgatggtgtttgttaaatttttaaaaaatttcgagtagtttattgtgtcaaaaatgtatttaaagttttttcaacacgtgtggtaaattaaaatattaaaactttatttttaatattattattataacgaatactattatgaaaaaaattattctgcatgtttttataagagtagagattggctaagaagttgtaataaatagttgtaattagtgtatttttttctttttaattttattttttgtgtgatggtctaataatgactacttcaggatgcatgggctatatgtaggatattcaagaaaacaaactcaatggcacaaagagctctttctcattcttgggtgtctagtcctttacaaggaattattacaccaggggagttactcatgtctcaaactccaaactttactcattttagtcctcaaaatattcacctacccaactcaacacccacttttacagctcaagaaatctctccttacaagcctcctattaactcttttccaaatggagagtttcccaatgaatttatgttctctcctccatcagagggacaaacaaagtcaacaacatttgactcagcttccatgctcttaatccctgaaagtacagtagatgagttcaatggcttctcagttaatatgcatacaaccatggagacaatatcaccagaagaagaagacttgagtggtttaaagaaaaacccagaagaaattgaggtcaataatcaatggggaagcattagatcaattggatttcctttcaatttgccacaaaatgatattaattggaaaccaactctgttttgggacacagaatcacctagtgatataatgtccacaagcaaatgttacaactagttaaagtttgattttgatgatacagaaaaatcttggggtaccaaaccggtactagtaagtagtaatgtagtgtactacccttttgagccttgaattaaattgtttatgtaagataagattatttattaggttcattagtacagtactactggtacctgttaggtaccttaattagatgatttcttatcttatcataaaaagctaattttgtgcttgttgattatgttttagaaaaaatatgttactgttttctcctattcttgtacagttgttgtctatatttgaatgtacatgttaggctatttatatgttgtgtttcagtgtgttggttcagttaaatgcatcattagaagaagttttatatatttataaaattttcaagaaggaaaaataaatcaacattttgtacagaccacaaactaaagttcccctcccaaaatttgtagaagccagatgtatgtggttgtgtatttataaagataaagaaagaaatcatgatataacatagtgtattcggtaagaaaattgaataaagtttattacatgaaaatatagctcgtaaagcaaatcaacaataatagagttattaaactatttaaggaacaaaatcttaacaacaacttcaactaagagtctaataagctaccagcgatcaagcataaaagaaaaagtgtgaaatatataagatttccaaactaaataaacatctaaaagaatccacctaccaatagctatgaatcaccgatctttcaataaaaattaaaaaataacaatctcgttgttcaaatagtaaacaagaaaaattattcattctgtttgctttaattaatttattttaagttggggttagtttttaaacttgaaaaaaatcatattttagaagtatttgcataaaaaataaaagtccattcccgacctaaaaattttataagttaatgagtagaacattgttattaggcatcagtaatgcacgaagtaacaccttaaaaatagctaataatattctaaaaaaattattacattaaattatgtgaaactaaataaatactatattaatataggtgatgtcttttagcatttctttaatgagtatcttgagtttgttgacatttctatgggaaattagcataatgcacttaaaattaaattttttttaaaaaaaatttacaaattctgtattttataggtttttcacttattttctattttttttttaaaaatatattttcacattactacaatgggaaagcaatgtgaaaaacaacattttataaaaaataagattccctacttttgtaaaaagataaaaattaaaattcgtaataatgttaaaaaattgtagatctttaaaaatataaaggttgtttgtctgtgttttcagtttttaattttcaaaattgtgttttcaaaaatgagaacagaaaacaatttttttatcattttaaaaatttaatggtgtttggctcaggttttttaaaactatttttagatttttttttactaaaaaaaatcaatattctacatcataccatgacatgaacccatccaatccgagaccgaatcatacacccaaacccaaacccggaccgagatgatattttatttaagatttataatgttacttagaaaaaaaagtttgcctaaaaaagttatcattgttcgggtcctggtcttaatcaggctgggatccggggtcgacgcccagtgttcgggctctgggtccggggtcaaggtccagtgttcgggctctgggtccggggtcgaggtccagtgtttaggctttgggtccggggtcaaggtccggtgtttggactctgggtccggggtctaggtccggtttgggtccgagttcgggtcctgggtctagggtctggggtttgggggtccaagattcgagtttggtctgggtcggggttcgggtccgatttgggtctaagtttgggtccagggtccagggtcctggtctgggtttgggggtcgaggtccgggtctaggttgaggtctgagtcaggtttggggtccagggtccaggtcggggttggggtctaaattcgggttcgagtctaggtctagggtctaggtttgggtccgagtcaagtctgggtcgggtcaggggtttggggtcttggtttagggtccagagtccaagtcaaggtcggtgttggggttagggtccgaatccggctccggggttcgggtttagtttcaggtctgagccagggtctggatccgagtttgagttttagtccagggtctaagccggggttcggggtccatggtccgggtttgggtccaggttgggtttgaggtctgcatctggcttcgagattcgatttttggagtccagagcctggggtctgggcctgggtctgggtctgagttccatgatctgaatccaagatccgagtatgtgagcaaaaatataaaatataatatattagataaaaaaaaaaaaaaaa

SEQ ID NO: 17123 - DNA, 4393 bp, Cannabis sativa
ggttttatgtaataaattttcaaaatgtataagtttttcaaataatttttttgcacattttttgtaattattttatttttgttgtacatttatgaaaaaagccttatctaaaatcaattccgtccccgcctctaatccctgctaagtcgggaaatccctgccccattaggggcgagtcccgcaggtccccgtccccgtggtgtttatgtgcaaccctacgcacaagttgattttaggactcacaaaatgtttttattttattttattttttattttttttaaaaaaaattgtttgctataaacggtaaccagccattttgagcgccaaaattttcttttgtggagcaagcattacttttgctccagttttcttctttctttctccttcaaagtttctctcagaacaacattcaaagctcaaatgcgagctcgttttccccacattgattacttccccaccattccctttcaactccacgaaaccctaagcttcctccaactcccactttctcaagtctctccctctcctccccttacctccaccttctccgacctcatcttcctccgatccgattccatccccgaactctcccttccaatcgaaaatttacccatccaaactgctctttccaagttcttctccaatgttattcctcagaagatcgtcacctctgtcgaagaattcgaggatgatgttccgtcatcgtgtcataaaagtttcaattccagaagccacgagactcatttatcggaggtaatgcattaggtctatgcgatatttcggtattagttcaacatgtagtttacgattattagaaagttcataggcgttcttcgattgtttggtaagcatttggttaataaatcaactccagaactgcaaatatggaaattgagattgttaactactcgaaatcgattagattttttttaaaaaaattgttaaatgtgaactaccgatcttttgttgcgtctattagttgacgcttttgaaaatttcatttggcaatgctctatattggcgtgctccaggatattggggctattaacgaggaaaaggaagtggagagttacagagcttctcaatctgaagttgttgaggtggaagttcttaatgtatggaactggcgttatcagattgttagtccttattgtggaggattagttagattatatgtttgatttaattggttttatttgcagaagagtaatgcaggtactgttgatgttaacgttccacgacgatatgaagtaattgaatttgaaacaccagagcttgatgacttcgtggtacaattattccttcctatactttagtgtatgtagatgcagtttggttctcatgcacgtgaaaaatctttagcttaagagaacttgcgtgattgcttttcctgcaggaagcatcttcattcgttgaaaacaaggggatccgcattctttccgaggttccagagattgaagaaagtttggtataccatatagttgaattcctctttgattttttattttcggcctgttatgttgttgatacatgagaagttatcctgaggcttttcaaatttctggaagagtgtgtgtggtatgtgtatgtgtgtgttttggtaagttctatgcaattggatgtcattttcattaattttcttatattttttttctttctttaattgctttctccctatccctggtttgacttttaactaggcttttggcaaatagtgtaacatattaatgaagataataaagttcaatcctccattaatttattgctgattgaattgctaattaaagttggttcttattgcaggatatgctcaatccaggacctgcaacttattatccttatgaagttcacaaatcagttttgactgtcgaagatattgcccttgagcatcccatagggcaaaaagataatccccccgaagatttccaggaccagattcactttaaaaaagtaaatttccaaattttagaagtggatgaaatagttctggagcatattgcagacttttctgtgaaggaaaagtttctttctattattgaaaatgctgaactacaacatttacaaacagatggcccggaatttaacaagaaagagcttttgggttctaaagattatgatgtatcagggtttatatcagaccatagtctatcccctcactcttgtggatatgaggtgggatccctggacaatttcccagaaataaacttgataagtcttgtcgaaatttcacagattaggatgagctctggaattcaaaggacatcagattgtgattgttttgtgtcagataaaccatttgtttatcaggaatttcaaatccttgatgaggactcgtctcaaatttttgaagaactctttaacagacaaacagtgtatgacacagagacttgtgactggatgttcaatgaagacatgaacttcaagaatttcaacaaattaattgttagtcatgagctagcacttgtagacgacacattcaaatcaatgcccgtacctgttctttctgatcatggaaaactgaggtcaatctacacagttattaaaagaaaacttgctcaactaaaaccgcagcccttatctgcactagatggaatatacttggactggcatattcttgaagaagttaactatgaccctaacactagtataaactacaagagagagttgcatgatatgggttcatacaacattgattttggttgggattcttttggtgatacaaatgtggtatatgatttcatcttctctgatgatggtacatatgcatttaataaggaggaaaacggagaatcaaaggaacttctctctaatgtctctatccctgttggaaccgaaccaagaaaattttcaggtgataatttcccacagccgaagaatgaagaatgcttggctagaaagaatgctgagagggcttcattattattcaagtctatgtcacattctaatgatcttgattttctcagaaaaactcagaaagtcactactggaaagaacagtgaaccgacagttaagacatttgataaaaatgctacatctcccaaagttgcagtgtgtaactcagtagcagatgtatctcaaggaggggaatcaattaacttttcacatagggatgagaatgttaacaatcagaagttctttcaccatccctctaaccaggagaaactctttgactatccatctaatcaggaaaagtgtaatgtcagatttgaagaggctgcagatattgtagaagcttgcagtatgccttcactggctccttctatgtcctttccagaagagtctaatcacaggagccctcaagaaagcaggtcatctcttcccaaaacagtgatacttgttaacacacaaaatcttgataaggaaatgatagtatccagaagaagtacctatcaaaaaattctcgcaatagagaaacatggtgcacaagttgtagaacgtgattcggatttacccgttgatgttgtgataaattctgcaatttgtttagtttggtatgattgcagaaacattggaaagaaaacaactgctgtggatgaagcttcttcaagcttacccttgtgcattgagaatattgcaacaaatgttttgacctcgctgagtttcactttcagtggctgtattctggtaaataacacttgttttcctcgtatgaattatatgaattataattactgtcactattgctgctataaaaacagaatgtaacatcagcattgggttgcagtgaaaatgctcattcttgtctcaggatggtcacagtaaagggactactaaaggaacccccagatcataagttcattgaattttagaaaacaacaacttactgttcgcatagaaacttcactgcctagtgacccaataccaagtagctcaatactctgcttcatgaagcttttatccagtactaaccataagaaaaatatcagtcatcttgttttttctgttaggttcttaaattcacaaacaaaaaagaaggtacgtcgtacgtgtcattgatgtgatgccctagcccaagaataacaaaaaattgatagtgatgatactatgctttgagctgatacgtagaaagcttttatttgtcttttgtctcatttacaccgaaggacgtgataggcccccaattcgatacacattttttttttgaaagaatccgatacacatgataggagcaagaattaggagggagggggaatagatgtatggcaggttttaactatgtggtagtcaatttgtttgtttaatatctattttgatatctgttttgtttggaaattttagggaataaatatgatgatagtgtagcgttaggttatgcttattcttatctcattcgaatttcctggaatatcaataactgtctctatttttctgttttcattatttatcctactg

SEQ ID NO: 17124 - DNA, 5834 bp, Cannabis sativa
  modified_base (1201)..(1224): a, c, t, g, unknown or other
  modified_base (5114)..(5114): a, c, t, g, unknown or other
  modified_base (5191)..(5191): a, c, t, g, unknown or other
tagaaaccctagagatagctacaacatcgaatctacagctgtacaaaactttcctaagaaaaacacgatctgcagcatcagattcggatgctgacgcaacagatcagaccagaaactacaaactttctataatcgggtccgatcctctattaattcttgattcctgccataaacagattagatattctgattgtattaagatacaatcgaatttaatgaggataagacatttaatcaagggttcctaatttatacaccaactttccataagagaaaatattctcttacaaaaaatttccaaacaaaggaaagttgagcattaaaagcatctttcctaaccaagaaaagagcaactaaatccgaatatacaaggtaagaaatcggtaataaatgcaaatcaatcttaccattaaataaaaaatattttgtcaactaacttgcaaaaaaagactttacaaaatgatataattgttagatatacaaaacaagtataagatatagaaaattgaaatgttgtgggaagttttaactaaaatagagtataaaacaccttcaaagaactaaggtggtgtttgattggaaggaatgaaaacataagaataataataagaatgggaattgcaataggaataggaataggaatggatttgaattaaatttaaaacgcataaaaaaattaataaaaaaattattaaaatttttctcatcttgtattggaatgatttttctttctattttaaaatggaatagatatttcaccaaaataatggaaatgtttctctattagaatgacatttcattactttaaaatacaattaaacaaatgattggaataaaaaatatttgtttattacatttcattactttcaaccaaacaccacttaaaatcaaaaaattagtattcaaacgaaatgtaaaagaaaaataagaataaaaacaccagaaattatccctggttcaaaaaaagctcaatgagaacttgctcgtaatccagcttggaacatcatctctcttctttatttatttttatctttatcagtacaatacaatttagagttttaatcaaagacctttcattctctcatgtgtttatctgtcaagaacactaaaactcgagcttatactttcataaagtcgaatagctctttacaattctccatacactcccaaactctctttgtattctctctctctctctctnnnnnnnnnnnnnnnnnnnnnnnnctctctctctctctctcaatcttgcttttttgttttttttttggtagaaattctcaatcttgcttgctgaaatcactttctgatgaaagtgttaatccttatagtggagtcgaacatagtttcataggcactaagaccaactaatttaggtagttagatcatttttaaaaaaaaaataggtagttagatggatcagttggttaatcagataagggtaactataataatggataggataaactaacgccagttccaccatagtttcttcttttcacaatttgacatttgctctacttgaagggatgatgattgtgttccatagtcaagcagtgaccatttttgagcaagttcatgcattacttaacttgttcacatggagaacttgattttcctcaatgttaactttctctattttgattatgtcacatttagtttttttctcttatccaaaattatcgaatgtcaatatgtatactcttctcatggtgaattggattcatgcataaatgaattaaaaattggttgtgtgaaaccattttcacttctcctcttagcatttctattcttgatgtcacgacatgggcttaagtcgtgatagatatgtaatatccataatttgggtggtcaaaagtcacactttgactcttgttgaaaaataactcttataagtgattttttttgatttatttaacaaaattacatatttaaaattaaaggaataacttctataattatacaacaaatgttagtaactaaaatcaggaccactcatcataataaaagaacaataatgtccccacagttatgtagttactagatatataaatttaatgtcataaaataccaaaataatatctagtgttcatcattcttcattcctcattcctaaccagtacatagctaattaagtcatccagaccatccattcaagtttaaatacaaaattagctttcaatgaaaagtttaataactagaataagactaaactaataacaacattattcctcaagggtaccatcctcatccactagcatcaaattgagttcttaaaatgggagaaaatagagagtgagcttataatcccaacaaaaaaacaattaatatcaaaggggatttttcatatatatgggcaaagaaattaaagtttacttttatatgacataaataaataatgcaaaaaattataagaccaaatagcaaatacgttttgaaatatgagaaaccaaacatatataaacaaaaataccataaaaatctgcataaatttctcaactaaaattttacactccacgatctcctcgattctctttgcaaatccaaaaaaaaattgcgattcatacatctccataatcgattattgcaaatcgatcaacaacttcttcttcaaatccagttggcttcgtcgtttgtcttcttcagcttcggtaggcgacggggatcattaagaaaactgttgataatcttctacaactctggtgatcatcttctctaccttcggcgacctgcaaagcaaaaaaaatatatagaattcgaaccaataatgtaacgcgctactggcttaagcgcactacagtaatttttaaattattgtgcgcgattaacaaaaactttaataataataatataataagctttactatttaaataataaaataaattacaaatctgggatcccgtaaacatttttcaaacattacaacaattatccacatttttgtaatcacgacgctaaaaagtcattagctggaccaacttcctcaattgacgctctaggaagataaaagcaccaactctgcgggatgagtttccgtgataggcagttccatgactgctagcaacacggagggtatccgtgcgccaaagtctccctcggttccaggaaccaaaaacattcattaccgcaaagagtatgggttttcctagaaaggccaaggcactttgaggatgcgtcagaccaggctacgcctttagcccacgaaggctgtgcctccatgtgtcaagctactgacctagtgattaggctttttcatgtacgatgccagaggttgtctcccgcgacatgctatcgtacagagcatgtgtgtccttgtgtacatgaccaagtgatccaacggctagggataaaggaaattcaaaaaggagaagtcctgggatgacacgcgtatgaggcttagcttgtacaacctgtacgatctgacacccttaatttccatatgggaaaaatgccacctaccaattcaactgccagattttgccccaacgatgatccatctaaggcaacacatgcaaagaagttgacctataaatactcctgtaaagcacacgagcaggggatgatttttctagagagagaaagaggacacatttttttcgggtgacaagattactctttcacttcttcttgaaaaatctctctgtaataagctagataatattacatcaaaaactccaaaatattcctaccagtttcggccaaagcgcctaataaaatggactcatggactatggatcatttatgcctgaaccacgtaaaaatatcctatttgttatcctattatttactttcttaagctctaaaaatatttaattgccaaaaatctcgttaaatattttggtactttcattgagagttgaagaaagaaacatgcacggtggtcaccgacgcaagtctatccaaaggagaacccgtgctagaaaagaaggaagaccgcctgatcttctgccgaggtccgaccagaggtcaagaacgcactgatcagaggcgtttcccggagtgaaggtctatgccctcatccacccaaagaaggtatcgaagatgcgtgcatacggtcttgaaactctccctgcacttatacttgtcccaaaaagcttagatctggccagccaactctctggaagggtgaccggccactagcatccttaagctcaaattccccgtcgtcagctaaggcacaactatgcaggcacaataggcgcaagaggtgttggggccaggtgaagaaattaagaccctgtacagttacgacaaacaactcacgaagggtcatcagatacaacgaccctatccagctcatgactccagtgtcggtgccggtgcaagggccagatccatcgctaacggctacttcccttgccttttcgataaagccgcagaagatagttggaaactaattctgtaatggtgatggctgagaggagaccatcaataccacccacacttgctgggtttccagtcaggcctagttatggtactattggacgaggccaaccatttttggcaaagtttgctgacagagatctctgtcattacgatgtaactatagctttggagttacatcggagaaagtagcggatgccattaaaaaccagttaagaagcctctaccggaatggtgattatcttgctggaagcccgagcctttacttcaaaagccacagtaagtgccttgcaatccactggaaaagacagatttccccagagatcttggagcaaaccaggttgcacgcgtctcttgggcctcccagagcccgggagacgcatacagtttttcgtgcgtgaaagatcactgggggtgtgataggtcttcaacctttcttctcggaatggaaggattgcttgaggtctgtcacacacccagcgatgctttcaccctttgatctttttaagtgaagtcatcggttgaatttttatgcaactttagccttccctcgaggaagctgaagcttacttcataaaaaatcaacttgactctcacatgcacgttgctttttgtgcatgaaagatcactgggggcatgacacgtcttcaaccctccttctcagaatggaaggactgcttgaagtctgtcttactccccgtgatgctttcaccctttgatcttttcaagcaangtcatcgattgaatttttatgcaactttagccttccttcgcgaaagccgaagcttgtttcataaaaattcaacatgnctctcgcatgcacgttgttttttgtgcaagaaagatcactgggggtatggcacatcttcaaccctccttccccgaatgggaggattgcttgaagtatatcttactccctgtgatgttttcaccctttgatcttttcaagcgaagtcatcgcttgaatttttatgcaactttagtcttccttcgcggaagccgaagcttgcttcataaaaattcaacatgactctcgcatgcacgtttttcgtgcaagaaagatcactgagagtatggcatgcttcaaccctccttccaagaatggagggactgcttgaggtctgtcttactctccgtgatgctttcaccctttgatctttttaagtgaagtcatcacttgaatttttatgcaaatttacccttccttcgcggaagctgaagcttgtttcataaaaattcaacatgactctcgcatgcacgttgctttttgtgcaagaaagatcactatgggtatgtcacgtcttcaaccctcctacccagaatggaaggactgcttgaagtctgtcttacgccccgtaatgctttcaccctttgatcttttcaagcaaagtcatcgcttgaatttttatgcaactttagccttcgttctcggaagtcgaagcttgcttcataa

SEQ ID NO: 17125 - DNA, 10677 bp, Cannabis sativa
  modified_base (10610)..(10646): a, c, t, g, unknown or other
ataataataattccccaattaactcataattatctagttagggttttgctaatccatttcttaattttgggtattacagtgtttgtctttattaaaattatttttgaaaaattgatttaatctttaaccagttgtaatacattaatcaaaatactataatataggcctgaaaataatttaattaatactacattactttttgatttttaaaaataccatattttgaaaaacattggttaattatgtggctaacccttgaaataagtcacttggtatgcattatcctgatttttgcccacctgatgtggcatgtctatgtggccaacattagtgccacgtggcaatatagctcatcaacaagaaggccaagttatctactcaacactttaatcaacgagggatccaagtagtcaagcgggagacaaagtgacgaaccagccaccttaagggggctggccagccctaatctagcataggctgaccagcttctggtcatcccatggccggcgagcatccagcctaaaggtgcatggccgaccagcctttggcctggcaggattttggtgcacagctttcatacgtggacaacaagccagaccacgaattgggccttaacaaaccacaaaaatagagggaaaatatctatttttgaggggcattttagtcatttatattttattaatttaatatgtaaatagcaacttattttacctatttctaagggatttgaagggtataacctctcctatataaaaagccttagtcaaaccctcaaatccaaagttctaagtcattaaggctcaaaccctaagctctaagtctgataactcatctctctctctctctcacacacgcccactactcttctcttgcttaagattttccaactttgatttttacaatgtaatccttagagagctacttcagatcctatcactatagtgattcgagtagtattatatgtcggtatcaatacaactaaaaagtagagtaggtcattacccactaactaagggggttgaacctatataaaatcctgtgtctatttactttattgttcttgttgttaacacgtggcaagcatcaccattaaatacgactctactatcatgaggtcaatagtttggtgctttcattgagagcaagttgataatttatctgatcaaatataatggttaacacgaggagaactctagctacagcctctaccccatcaggtctccctcaaaaccatatgactgtagaccttgatgtttgtgttctagtaattactgggatttccatggaccctacagatgtggccaatcttgccatctcgacagacaccatgaatctagccaccgcagctggccaggtcaacacatccatctcggtggacctaaataattggccattgcctctaaggaaagaccttccactggtgcctcccactgaaggaaggacttgcgtggaactacccctaggcacaacaaccggacctcgtccccagaattacataggagagatggggccgggaattcgcaagccatccattggcaaaccccatgtagacttaggaaaagacctcgagttagctagactaagagaggccgtctaccaagtcagccaaactgaagaaccacacgctattgattgcgatgtattcgcacaatagagttgcaaatttctgagatagataaatgaccaagagtacatcctctgatttcaccaggtagagctggactgccgcaacagagaagctagcaacctaataaggcggttcaatgaaaaaactattggcaaaggctaggatctcatcagagatcctctccaaggaagaataattgacaaattggtctcgtctacctacagactgtcaacctaggttcttcaggaaccaggacagaccttcccttacccgaagaagaactggccttgccacaaaggtcagttggtgagaatagccagatcctggcaactagtggtctgggggtcaggcagggatctcaagctctacaacacccccacttggatagcctttggccgaccaaaatcctgcaagtgcacccctaactggccagcagggtgaaatcccgtcccggggcctctaagagcaagtaatctagaggctaatcttcaattggctaggtctgagaacgggtggaaacacccaaaataacaacttgagaagtgagtctattaactttagatatctagatctacctaactctagcaacaagtgtgatctaccccctgtcaatacaccggctgtaccagtcaaataggggataatgagtggccagacactacctagcatagggttagccggccaaggccagttaccctatctaggagtggctgaccaaggccagcaacagaagacaaggatggtcatcctccaccatacgctctcacaaagtatggctggttaaacgttaccacatttaaggctacagcccattcaagaagggccagtcagccaagttcctacatcagtagatccttttgtgggagcacagttggaccaaataaaggacatgatcaagggcctagttggtcttaaacctttagaccttgaactagataggttaaggggatcaccattctcgacatacataaataccttgcccttgtccaagttcaagataccggtatggaagatgtatatcaggcaagaagacctactgacacacatcaagtattttgagatgcaactacatttctaaaaaaattactagtgatgtgtaatgtcgaatattcttggaaactttgtcagatttaactcagaaatggtacttcaagttggctccaggaagattcaattcaaggaatgagtttttctaagaattctacgcatagttctcatcctcaaggcttataccattgcagctacaagaccttgtcaaagtcaaacaacgacaaggagagcctttaaaggattacatcaaaggttcatggtcgaggccaccaaggtcaaaggccttataaaagaaggccaatataggaccatactggggggcatccttccactgagtgacttctagaaagatatctggaggatcttgaccaacaacatgaaggagttcctcgacagagtggacaactttatcaagctggaggaagctatttgacaagcccagacaaggcaagtcgacaataggcagttgtaaggcattttgcagctccacgatctgctaggtgcgcaagccaacaccagtaactctgcccaaaactctagtggcaacaacactaggggcaagcgcaacaacaatagctctagaagaaatagtggcaaaaaggggaagtacaatacttctaccacgccattaaaccaaaaagataaggaggagaagttcacatgcttcaccctcctgacgaagaaacctggggccatcttcatggccacccagggaacggttccatataagaagccccctcccatcaaaagggagttgagtaagagggacatgtcaaaattctgctagtttcacaacaacttcaaccatgacaccaacgagtgtcaaaatttgaagagggagatcaaattcctaataaagaagaataatccccacctgcatcgttttgtatagaatgaccagactcaggcacaaagtgccaagaatggagaacctatgccacctccaatggcaggtacttaggggtcattattgatagaccccacattgcgggagagaccagcaaattaagggagcactatgctcaaacactccgttacgatcccaaaagtgacatcctggtcgtcaaagaaaggggctctaagcaaccaaagcttagagagcccactatctctttcactaatggagatgctgctcaagtgagtttcccgcacaacgacccctggtcattactgcacaaattgggaatatgactgtggcaagatgcatggtggaaaatggagcctcctccaacattcttttcaaattaacataaataaagatggggctccaactaactgatttggcaccctacactcaagtgatgtatggattctttggccaaggtattacacccatggggtacatcagattgcccctcactattggagaaaattcaactaccagaactctgatggcgtagctcttcataatcgacgttccctcaatctttaacaccatcataggtcaaccaaccttgtatgacctaaaggcggtgacatcaatctaccatctatgcctaaaattcccaacaaggcatgggataggatgtttgagaagagaccaacaatctgcccatcattgctacaacttggccctgtccaaagccaagaaagagaagatgcccactaagagctctaaagaagagcccaacaaagggtaacaaagtccaacccaaagcggggacacatacatagatcctcgctttggggattctgcaaacagctttggacctgtagaagagctagaggaattggaggttgatcccacttctctagctagaagattgaagattgggaagggtttagcaccagaaataaaatcagtgctgataaaatttctaagggaaaacctagacctttttgtatgatcacatggagacatggtcagaatagacccctccatgatgacccatgccctcaacattgatccaaacttctgatctgtataacagaaaaggaggttgttggataaacaatgtgcccaagctcttaaagataaagttgagaggctacaggcccatgacttcatcaccgaggtattctacccactttgggtatccaagcctgtgctggtgcccaaaccaaacaaaaagtggagagtgtgcatagactttaccaacctaaacaaagcatgtccgcaagactactttcctcttccaagaattcactagctggtggacgccatagctggccatgatttttctaaatttcatagacgcgtacttaggttataaccaaatcaagatgaacccgtcagatcaggagcccacaagcttcataatagacgtaggcctgtactgctacaaagtcatgcccttcatgctaaaaaatgtaggggccacctactagaggcttgtgaacaaaatgttcaaagatctcattgggcacaatatggaggtgtatgtggacaacatgctaatatagtccaaaaaggttgggggcatgtggaggatctagacaaatgcttcaaggtcttctacaagtataacataaagctcaactccctcaaatgttctttcgtagtaagctcaggcaaattccttggcttcatagtcaatgccaggggaatagaagcaaacctaaataagatctaagcccttttggagatgaagtcgcccacaactattacagaagtacaaagcttgataagacgtatttctgcactaagtagatttatgtccaagtctatggacaagtgtgtacccttcaacattttcagaggcaacaaaaaatttgagtggacaaaggagtgtgaaaaggcattccaagagttaaaaaaataattggctcaaccacccgtgctatcaaaacccctagaaaatcaagagctaggcatgtacctagctatcacagtacttgtagtgaatgcggtcctaacaagagaagaagatggtgtataacatcctgtatactacatcactaagagactaatcgacattgaaaattggtacccactcatggagaagctgacttacagcttgctcttggccttcaaaaaactgaggtcatacttccaagcgcacccaataaaggtgtactccgaccaaccattgcggtaagttttacaaaaacctaaagcatttggccaactactcaagtgggccattgaacttggccaatttgatatcacatatcaactgagaataaccataaagggtcaagcctttgaagacttcatggccaagtgtaaaaacacatctcttgaaatctctcaagattcgggagaaaagcaatagccaaaaatgaaggagagcaagagcagcaaaaaaaaacctaaagaattaatatggaaactccatgttgatggaagctgcactgaccaattgtctggtgcaggcattgcactcataacacctaggggcacagctacatggagcaattaaattcggcttcaaagcctcaaacaacgaggctgaatatgaagccctgattgttggcctcaagctggcgcatgaagtacgagctgaccacttggacatatacaacgactctcaactagttgtgaatcaagtcctaggtgaatacacaactaggtgaaagaatgatggcctacttgagcaagatccaagacttagctcataagctatataataaagtagatccccagagaacagaatgccatagcagatgctatccgtatggtaagcatcaccattactgataaggcaaacctagtgccaatatagatcctaaaggaacgaagcattaccatccttgaaaaagtcgacatgttggatgacagtccaacatggatgacacctatggcagcttacctctaaactaaagccttgcctgaaaacaagaatgaggtaagaaagatgagtataaaggttgctagctatctaatcctagataaagtaatgtatagaaggatcttctcaatgtcgctcttaaagtgtgtcaccaaagctgaagtcgagctgttgatgatagaagtacatgaaggcttctacggtaatcatgcccagggcaaagcctatccaaaaagatactccgacaggggtatttattgccaacaatgatcgaggatttgattaactatgtcaaaaaatgtgacaagtgcccgaaattctcgaagatccctagagctccacctaacaagctcacgatgatgcagtctccttggcccttcatagtatgggggatatacctgattggtcaacttccaaagggaaaaggaggggtgcagttcgccctagtcgttgtagactactttaccaagtgggcagaagttgaacccctagcaacaatcacctccaagaaagtccttgactttgttgtcaagaacatcatatgtcaattcaaacttccatagaagattgtgtcagacaatagaaagcaatttgacaatgacatgtttactcatttctacaatagacatggcatcatcagaagcttcactattgtgtcccatccttaagcaaatggacaggtacaagctgttaacaagaccctcaatggcaccttgaagaagcaccttgaagaggcaaaaggcaattggcctaaattactcttagaggtcctatagtcgcacaagactactgagaagatggccatcaggcaaactccattcgctcaagcttatggctatgaggtgatgttgcctgtagagctggtgctaccgtctcacaagaggaaaacctatgaccacgatacaaacaacaacctgctggcagaatcccttgacaaaatagaagaaagaagagatcaagccaacctaaagtcgaagacctgccagcaaaaggttacaagtacttcaacaaacaagtcaaggatagaaaaattttcataagagacttggtgcttaagagtgttcctgaataccaaagatccaatagtaggagtgtttgaacccaactaggaagacccttaccaagttaagaaaataatacgtaagggagcctacaagctgggaaggtacaacgagaacatggagtttgttctcctaccaagatattggaatggggagcacctccacaagtactataagtgatcagcttacagaatgctactttgcagtagtagtttgaccaactcatcattagagtaaaaagagctagtagccacagcctttaggtgtgacctcccatcatttttcaacaatggcccctactttgcatgtcaactaggggtaattatttgatatctagaagcagactttttattatgtaggcttgtagattcaatttatgtaagtttcacagcaataaagaccaattaatgaacaaaaaataatgtctatgttcaaatatgttgtgtctaagtcacttgctaacaagattaacttcttaaagttattcttcttttagttccacatgcatacaacaggtagcaccataagaaatttttaggcaaggtctatgaaacttggtgaattgtaagtaaccaagagactgtaagtctgcgtgctcacttgggggcacctacattgtacaatgatcaaactagtacagagaacttatgcagagaaattttaacccttagtataagctactaaacctgcttctaagtcaagtgcaagcatactttagcttggcataaaaaaagtaaatctgaatacttacatatcaaggcaataagaagatagccaggattaaataccgtctagtcggtcaaacatccataataaaaagcttcagggctaaatagtagtaatgttgttcaaaagtagtagagtgcctataggtcaaaagtacaaacatgaaagccctaaggctaaaaatgagtagtgttcaaaagtaaaaggcaaataggccacacagaacatgaaataagatgtctatgctaataaaatcataaagctgaaatactaataaagtgacgctactgtgttcaggtgcaggtggggctgtgtcggaagctatagtgtccaaatcaccgaactgtgggccggtcatagcctctgtaggctgtccaactacctggttaaagtcctggttggccacctcctcagtgggtgggctagccatgccctcatcaaacttcctgatgacgatctttctggctggacagtggtctagtttgcttccaacctagtctcatatagtgctttcccttgggctagtgtgctcttaaggaaagaagaacccccatataagaaagattaactctgaggttatgcagcttgaactcgtatatgagctctaaaaaaagccaacatactcgtcctttatgaccagttggctatcaagggcaagcttaagcttttcatcacttctcttgagtttagtccctagcctggagatgtcagcagtaagtgaggtgttctcctaatttctagtgttgagcatgagctctaaatcggaaatcatgtcccagttctattggataagagcctccaagtttgtcacaacctcacccctaactaagagctcagcctccaaggtctttaccgtctcccaaagagcactcgaggaccccttggagttgccatgcaaaaatctaagcttcataaaggcctaaaaacaaaacaaggtcaagattagtgccaaaagacaacattggttagccaacctctctatggtgctaccaaggccggctagcctctcagagacactacaatggcaagccaacttcataccacaacccctatggtcagaaaccctcaataatattgaaaagtgtgtaaatttaaatgtgcaacttaccaaggccaactcctagagggtgacagaagatagcctctctgactcaccattaccaagctcttaaagctcattatccagaataggaaaggccctgtccagacgcctacaaagcgcttccatggctctctgccccatggtcaaacctgctcctcgactaggcttctatgttcccttacttgatgatcgattcctcctcaacgaagggtcaatgatcatgggttgcctacatggcgcaggttcaggaggaggaggaagagaagaacctacaacatgactagaacaagcggtccgagccaccttgaccctaggatgactcgaaggctcatttgaaggacctctaactaggcctctgaatctggaagacatatttgcaagaagaaagtaacaaagtcagcatacacgttacaaatattcaatgcaagacaagaatataaaagatgttgcaatcaactatcaaatactatcatcctcggaagaggaatcatttgaatcttcaactgttgccttgcccttgcctctagatgtaggcaagaggtgagtatgcccagtagaactctgacctccaggcctgattcgcaaagtagcatccccaacggtgcccctgtgagcccagtgctggcagaggaccctctctctcttctccaaattcctagctatatgggatagaggtacataatcatccatgtcaggagcatgcccaccactagggcaagcctcctcaatagttggggcttcatataaaccacctaatgggcccttagctcccgcaactccagacgcgaggggctacaagccgtatctctgaaagttgtccacgctggccaaccttagtatatttctcctctcaacggggagggacagtatgtggtttaccctatctctcatctagagggtaggaatggagcgcttgtaggtggacactcgctgaaaatggcagtgcaaaacctactggatgtcccatgcaatgaagtactggtcatatccccctacttttgataagggcgtgttgttggtgtcacccaaccactgatagccgacctcactgaagtataagtaccccgtccaactttgctttagagcagacttcaagtcaaaatagaatacaatttcatatgaagtaggttgaggctagcctagctctacatagagaataaacatcaccgaagtaagcagcaatgtccctgaaataggggtgcaaaggcaacaatgcccctactgaatatgatgctctgaccatgccatccaattgaaggccaaccggtgtgctcgcttgtcccttgatgacactattgggttttgtgccctannnnnnnnnnnnnnnnnnnnnnnnnnnnnnnnnnnnnaataaagatcaaaaatcattttatattgcat

SEQ ID NO: 17126 - DNA, 8799 bp, Cannabis sativa
tacccgtggtagtacggcaaacatgagagctctaatcttcaagagaacgatattcccactttgaatcaaggcttcaacttgagaaataatttcttgtaatgtcagtagctgttcaacagtatttcgatttgggggcgctgtaactctgaagggttctaagggcttccctttgttaaaatgccttcgccagagcatgataaccgcaacaaatagaaaaaggaatggcaatatatatctaatccaacccctgtacatcaaaattgaaaaccaactaacattagttctcttcatttaagctattggcagcaatgttcacatttcgattccaaaaatgaaagtaagatttagcagaaaaaattggaaagttaatcagcattcaaggataatatgcactggcgctagttattataaccttgaagaatcaaatcctatctttatctaataatttagacaatttattaatttgagaataataatatgagtattataaagcttttatggtagcgtttccatggcatataagcagtttattctgggttcaccacccacaaacaaaacaacccaaagcaatgtctttatgttaacatacactggtgtggaggctaaatatgacaaacctgaaaatacagtagcaggtgagcaacataaacattattgatttataagactcttcccatgaagccaaaagttggagccggctagctattgcaataaccggaaacagtagttcctgaaaaaaaaaatagaggccaaacacagtaatttggtgagtgacaagcagactacaatgcgaataatttttacagaaaaacagccactgaaatctattacagtctatgcgtatcctattatcctattatatatatttccaactaacgatttggcccaggtgcaaaacagcaaaatatgcaaacaacatacagactagtttacaccatgagttacactaaattcaatccttttttggaattgggtaagcaataatatcaagagctttatctcttattcagagataaaaaaatcacccaccttgctccaatcattaaagcaggataatcaaaccagtgaaaatggagtattaagttattttaataggaaaagaaaactgagcaggttaagttcatgattaaccttcatcactgcaacatttgtatcgattccttcaaccttcacttggtctatagttgcctgagcagcttcagcactacttgtgtctgacactgactgtttcaccgctgtttctaagggattggtctcaccaacacaaatgtccccaactattattgctttttcatcaagcattacctctttttgcaatatgaatccgagatgcagaagtgccagaagtgaaactggagatgcttttggcacctgttttgctgatgaactcccaccagaaacatcacgatgggtagtatcagcatttataaggatcaatctacttaacagagtttccaatataaaatctccccttggtagactttcagcgaggttataaggaagtaaggtcttgtattgtgatgaggaaaagcggaacgcttccctaattgcatgataccgaaagattcccagaatagcccgtgaaagagcttctgatttttgagttcctttcaggttatttttcctgataaaccggtgtgcataaaagatctccagaccaatatccaaccaataatcccggcgagaactccctttgaattcaggaaattcaaaataaacagggtctgctctgcataagaaaatgcagaacaaactcaacaacagcgataaataaataaataataaaaagaaaagaaaagaaaaagaagatgacagtacgttgcaaattcacaaatatatgctagtcacaaaatatgcatcattgacgataacatacatagatgttgatttgtacataaccgctttatcaaaaattcttgcacccaatggtccagtcatttcaggttttatgacctgcttcatatcggttgcgagatcatatctaacagctttatcatacaacccaactcccagtgattcaaagtacagagcataattagtcagtgtcagccgccctacaaaaaaccataacttgaataagaaaaaattgtgatgaaaatttagcagacacatcaaaattaaaattatcttgcattaggtcatcaaacaaaacacacaagttcaaactgatgaaaccttgaaagatagaccaccaattagtgagtagattcgggggaggggatatttatgtaagtttagtaaatttatgattttatttacttgcttggtttctgttttggcttttgcttctgtttggtttatgttttgttttgggtaagttaggaaaatagaaggggatgagatgaaaacgtgaggaaggtcagtattttttgtaattgagcagtaaccctttggagagttgaggtctctcaaacacctcattgttcttgtgttttcttgtctttatataattaaatattaaatacaatttttcccaagttgtttctattgcattcttcccaagtttctctacaattttgcctattatctctgtaattcatagatgcccctaggctgggggctggggttacatcaccaccgtaaggaaaccacatcaactccacattttgtggcattgcactttcacgagggtttctagaatcattatttaggcaagagaagtaactaacctaaaaagctaagccagcagtaatgtccatttcatctcatgacatagtggtatagttttttttcctttcaattatgtattagtggtatttatcttgctaaagaactatttagtaagcaaattttagttgcaaatgaaatcatgaaccctatttctgctttatttattggagtaaaatggaaagtcatatagaagaataaaatcactcaccaggccatgcagagataccgatatgttgcaaaactggttgtgtaggaactgaaccatcaacatcaaggacaatttctccctcagcaagcttgagatttccgatagaagagaccaatgcatttttcgcagccttaataatcctacaaaaaaaccttagtatgataaccttcactcacaatgattaactaaatcaagaaacaagaaattttaccccccacaccaccaccaccaccaaagagaaaaataaaataagagaaaaacaacaatgacattgaagattttttaataactgaggacatgtgggccacaccgccacttatcgaccaaggggttaccccacacaattctgcagctactaggaattgaccttgagatgcccgccacagtcaggcatactcccctcttgtctctacaccaatggcctgggggcaaggaaaatgtacttgtaattctactgtacagctaataatatctaacattccaacaattatggtgccctcttcatccccttttaaattttgttttgggggtgggcgaaggaggtccagttataacttttacagttaagtgagttacattggatctctggatgttagtttttggaagtatattaaagtcccagcactagaagcctaacaacaacagaaaaagtatcataatagtaaaaaaaaatatatgaactttctgacttgaatatttaaacagttttcttgagcagagagaatcaccatcttattgtattttcatattgagatgaaaggaccaaattgtagatattaacttaatcaacttgtcttttttaatatgtccattaaatgccaggaacttcaacaaaagaatttatcttaaagagttaataataataatagggcaaaaatggtaacaaatttaagaagttaagataaattcttcttaagaagtctggaatctagaaagtaacataatcaagatgtaacgtcttacttgtcaaggtttcttatgtatttgtcatatacaagaaaatgaagtcgatgaccagtagaagctgccagtgcatcaaaaagattgtgcaccgtgattatatcagcaacagctgcacaagcaggagctatccgtgcaaaagcctcaggtccaacagttttctcctcatcgacctaaaggagaaacaaaacgaagcaatatagccatcaataattcttggaaggtagacttgccaagccacaacatgcatacagggggaaaagtatatgaacagaacctgaacagccatgtttgtagaacttgaatagaaaagtgaccacccactttcatcctctacttcctgattaatgctggattcaatcacctgcagtcaaagaaaaattaatgcatcatctttaatccgaagaaaaataaaatcagaaatgtattaaagagtcctgttaattttttaaatttaacattaacataaaacactactattatgttacaaaatcaaaaggaaaagatatatttggctgtctcactttctgtaccggtttactcttaactacaggatcctcccatgcaagcatcatgtcaaaagtcaaacgacggaactccttatcgcttaagtaatctgagcgcttactcactatctgtaaagcttggtaagagcaaaattctaaaaaatgtcttgcataagtctgaagttctttagcattctcaggtggctctgttccaaaatgatgctgtaattcttcagtaggaatttgaagtattctgaaacaccacaagaacacatttgagaagccatgaaacttactagaagtacattgtttaagcagttaattaatatgcagtatgaacattttttattcttgaaaaatcacgaaaatttgccaacacaattccactccatctcaaaattaatctctctcatctacgccaactaaactaatcgatttaccaacttaaaatcttgctagagctatcaatcttgccatcgactaaacacatgaatgaagtgaatgcaaattataattcaagattcacccaaaattatatcccaactctcatgatcccccaatttcctcccctcgattccactccaattatattatagcaaattataattcaagattcaccaaaaattaccaaacatacacatgaaaccaaaatgtacattctcaatctttttaaaccaagttgatttgagagagttcattttattgtatactagtccacccgataaacacaacctcacatatgaaactgaacatatctaggtaagttactataaaaatcaaactgaacatatctagcttaaacagtccaccttacacctactcttaatgggaaaatctcccgagatcaagctcttagaaaatccgatcctaaacattttacttccctgaaactatacaccgatcaatattattacatagctagttcataatgtgagctatgctaacaaaagtcgatgttgctccccgcaaaatgattggtactgtaaatttcaaatcttcagcatcacccataacatataaagacaagaagtgcattttttttggtaataaacctggaagagcgagagacaacagagttggcgagcggagaaaaatgaggaatgcgaaactcttgggattcgttcgggtctccattactgctcttgcgactgaataaagctttaagcgacttttgatgggttttcatcagcccttcccacactccgactttggcaacctccattttctccgatttcactccactcggtcacttctttctctttttctgttatattcttacacggtacagcacgaaaaccaaaattcttccctttttttaacttaactgcaatgccaaggcaaaggcaatttgtatgggctgggctcgttcttttttaaagcccattaaatttgggcctaacatgtccaatcaagcccgtttgtgattttggttgacttgttgaccagtaactgtcttttgatctttcgctcggtcgcgccagcttcattcccatatattttaatcgctttcttgcctattctctctgaatctgaactagcaatgggtcaagctcaaagcgacgtcgcttcagaaacggcgactactcaggttcaaggccgcgatcaaacggtgtcgtctgctccaaaaccgacctcatcatcatcatcttctccgtctatggagtctcttcttgcaggtacagttctttcttcttttccttcgtattcaataacaattcagtgacctgatttcgttcttatctgattgtattctttgattagaattgtaatggtttgagttaatgtagttcatcttttatttgatctctgctcataagattgtgcggctcagttgtttgtgaaaatgcctacgagaaattttacgaagactgtgtaggtagttaagtaactctaagagtagttgggtcaggtggttgtaattttgcactaaccaaaagtgcctgaaatattataatatcaagtttgtagtatgtattcagcaaaaaagtatttaaattattttcttaacggcaaagatttacaaatatttatactcgtcgtacttaagtatctaaattacatgtttagcagctaaaatatttataacaattaagtactcaaagtctcaaagttatatttttggcgagggaatgcactaaactacaccaaattatggacaccgatttttctttttagcacttaatatctatattatatttaagctgcaaaaatatttagttataagcaaatttgacaccacataggcaacttaatagtggagccgatatctacaccataatgcaccaaaacatggaggcaaaaaaaatggatactcaattgctacaaatataataatttacaaacctaataatttaagtattttagttgctaaaatatagattgttctcccaaaataaaatgttagttgcttcagtttagttcatgtcataaataggtgtgatttttttcatgtatggaactttcattggccgttgtctgaaacttgataagaactgagtgcaaagcttttgtgtctaaagctatagaaatctacacatttgcgtttttgcttattcccttggattaatgaacaaaaaggattagatggttgaggaaataacggcttttgtgaacaagatgttatagagctgaattgtaagatctttgaggagattttacattccatttctctgggacatggggctctattcaccagtctagccacttttcagaaaatgttgcgaacacatgttcttggctgttgacgtatgcttggtttttactttgaaaccattgatgttaggaaaacaagctcttaaatggagccaaaaatacacgtggatttcactgggatgaaggaagttgtctatgtgtggcaagtgcttattatattctgtaaatgtccaaaggatgctctggatgattttttatgtttttaataaaaaagataagcaaatatgtgcattcttttatttggatgaaaactaaattagaaactggtgtgattatttaacacttctattgtctgctctaacagaagctgctgcatacggtgaagaaggtgatgaggaggttagtctatgcaaaagaattaagcctcatttttgtaaaagattttctttcgtcttactgttggaaaaggatacattcttaagattaatttaacatttttccctccagtctcttgatgcgaaagctcagaaagcattggaatgtccttgcatagctgatttgcgaaccggttcatgtggggatcaattttctgaggccttcctttgttttctaaagagtactgctgaagaaaaggtaactgatcacaattataattactaccctttctggcaagcaattgagaaacattgagtacgttagttaattgtcctttaattatgttgatatgcttttaaacattttttagggacttagaaatctcttactacacacacttcaccacccaatcacttagcctcaataatttaacagggataaaatatatgcattaacttgagctagcattaacaagtttctttacaaaacaaaaaacttgagctagtatggagactatctattttaaaatataattcaccttcttcttcttctactttaagttccagttcttttgaaggaaaagcatttcctccttttccttttgttttccttaattaactaacttgcttcctgggaaactggaagtcaagaggcaatattactgttacatttgctgttagtttatgttttcaatatttattttccttctgtttcttgcatccaattgatacagtataagatttttcgacctgcttcttttgactggttacaaatatctaccctttatttgctgtttgtggttaatttgttggatgttgctgacaatttaagggaataatgatctggttggccaatttggtgcagcccattaaaatttttcctatataatcacttccttttctgcagggttcagattgtgtgcatccatttgtggcactgcaaaactgtatcaaatctcatccagatgccttttctaaaggcattttagaggaagatgaagatgaagtcaagaaagtggaagaaccagtccaagactacaaaatttacccacccaaatgggccaaagaacctcagagtcccaagtcaaagctttagggtaaagttctattttgtttttcttcctcatcatctcctctgcactctaatctttttgtcttcggtttgtttttaacatatgaagcataaagcatcgaattattttgacaaataaacattgagagtgttgcttaaccaaagtccataaatgttaggaggttgaaatcattggcattgtaatcaacactttatagaaagttgtaacattgaggtgaaagatggccttatacttgatgtgatattgggaataaattttataatcttggatggtattggcaaattcaaaaatgataattaatttgttgtagtcataagtatagcctaatgttacaa

SEQ ID NO: 17127 - DNA, 4705 bp, Cannabis sativa
attacatgaggctaatactgaaagtttagagtctaattatgcatgtcactaaaaatcactcctaactatttagtgacccgcacttttgtgcgtgtcacgaaatagtgtcacgaaaaggctaaattatagtagtgacaacactaatagcaaatttctagtagctactcgtaaattttctctgatttgtttccttcttgttacaaaaataatgaagacacatggtttggcttgaggtaagaatttggttacggtggtgacagaagaagcatatacaaggcaactaaagttgtaaaaatgagtgtaaatgggtgacttttgatgcagttactcataagaagttttatcttgtaataggatagaaggaggccgctgtttaagatgtatactgcagtttgttaccaaatagctctagtaagttagttgtaattaaattcgattgaaaggcaacaactcgagccacattaaggaaatgttgatatttcctatcaactacagcattctaccgtggtctatcaacacaagaacaagtagtgagattcataactactttaacaagtggtctatcaacacaaggggttctacattatatgtagaaccccttttgttgcataactttaacaagtagtgagattcagtttatatgttcggacgaatttaacgtttactttatattaagtatatatgaaagtaaaaaaaatttgtattgcaaaaagagcatatgatttagctcttagtacatataattaagtgtgtcgtgaatagtcttgcactatggttaacatatatttatgtccctcaacaaaaggagtaatatggtcctcaaatatccatatgtacaagatcaaatatttcaggggagatattattgtttgaatgaaaatgtaatctttcttgttttgcaatatgacaagtaggataattataaggagtaaatatttcaaaaacttttaattatttattaattttattagtaataattacatatagatgtccaagacgagtatgtcattagagtttatctaatcaaacgtacaagtatgtatagtggaaccaacttttggaaggatttgttgttgctgataataaagatttccaaagtgtttagctgttccaaatctcaacgtcttagaaaggccctaaatgtaacagtaaaactcataaaattctgattgtgtttgaaaagtgcactaacagataatagattgaattaaaattgtagtacaaatagaacattgattagagtaatgttgaaattaaggacgacagtaaatattttttaattttgaccttagttcgattaggtaatgtgatagaattggccttgcgatttgaattaattgaagaataacatgtaagatgagaacagacgtgatgagtttcaccactatctacaatccatgatggagggttagtaagtaatacctaaaaaattattcacaacaacattttcattggatgttgaatcatcggtagaaagctacaattgttgtgttaacatggaaatcagttgttgacactgagctggagtgagttgtgtattgcttgaatcatgtaggtggtggaaatttgtgatgtatgtgggagatttctgttttgcaaggcagattctggtttacgaatggtgaaaacaagagaatcattaggctttcgagtgtcataactaggggaaaaccaattagaaaatagtatttatttatctctgtaatgacctggtttttgacagttggtacaatgtggatgagaccttttgtttcttgaggctacattagttgcaagagttgaatcttgaggcacagaaggagcattggttgctgtagggaatggttcaatttcccaaggttctttgtcattcttggttgatgactatagagaaaactttgttaagcaaaggacaaggatcaagaaggaagatttagtcacgaacaacatggtaggattcgtttaaacctttgaaaaattgaggaacctagtcatgattctattggtccttgttttgagcagtagcaacagatatacaaggtatacaaggcctcaactggttaatttcatcccacatgacagtgagatttgtgaaataggcgctgacagaatcacctccttaatggagataataagttagggtttcatttaattcaaaaattgttggaccattgccttggttgaacccataattcaaaataatccacatttcagagggaatatctaggtacataatgatacttttgatttcaggagaaaccgagtgcaagattaatgacatcaccatttggttacatctaatccatgaatcaagaagaggattattaatagggggttgagggagagtacctgcaagaaagggagtttttatttcttgctctaatggaaagtttgaagtcacgtttttattgttggaaattttgctccgtaagaacaggtgtaaccagtgccaatctggagtgatctgtaatgcttagattgtagagagatctaatatcttcataagcgggtttgtccaccagagttgagcgaggaactggagcagggagatctgttcttggaggaatactagtagaagtagttgatggtggaggaggcatgggagcatcgaccatggaatgattttcatcagtggtagtacttgaactggtggctcatgttcgcacaatgatttttggaagaggaaaacaaaatcttgaagcactacaagaaaggggacctttcatcccacttttttatgttacaaaaataaaaaaatgagataaaagatatattgagacttcttatcctacttttagatttggcgcctcaaatatggagcaaaaagttttttagacaagggccatgtttggtagaacgttaaaaaaaatatcaaaggtaaaaaaataagttcaaaattcaatttttataggtttgccaaacagggattaaggttttgggaaaaccttttatcctggttattagttaaaaccaggataaaagggtttagtgtgaaacccttttatcccagtttttaactaaataactaggataaaaagtgtttccctaaaaacacaatctcattaacagattatcacatatctctactattaacctcgatagaaacccacccaaacccagaaaccgtcgcccaaacccatgtgagcctcaatctcgcccattccagaatcgcccaaacccaacagctgatcaaacgaataaaggtatgctttttttttctttattacttccccctattttgcatttttttccacttttttttctggtttcaagaaaataaaaaatatgaatatttttttttttttttgtgaataatttcttctagtttagggattatttattatgtatcattttttaaatttctagttcttaaggatttgattttattaatatttgaatgagttattgatataattttttataaaatgatagaactttttgctatgataaaaaaatatttatatatatacttagtttggaacttttgaattatagtaattttaatagtcttgaccatggaatagtaattaaaatagctagtaatgtaatgtaatgagttatatagttttagttagaaacttttaatacttagtaaaaaatattcatgaacgaaaaattagtaataaggtgtttgttattgtaatgtaatagaaattgtaataagaatagtaatgtaatgtaataagaatatatagtaagtataaattaattgtagtgctaaataattatttaagtatgtagtcattagttatatattaattagttattaatattcttacttaattttaatttgaaaattttataaattgcctttaatagtgtaggttgtggattgttattagaaaatgaatcaaaatatcggtgatcattgattgctagctaaaggtacattattgaccaacaaatttttactaattataaaactattagaggagtttgaatatgatagatattcatccgtagtgaaataggttttgtgatataaatgtactgcggtcagatgggtgacaattattatatttttaattgcttttatgattattttgtcctgttatccaatttacttacctgcattgttagatagttattaaaaatgttatagaaagaggagatactgtggccactttttttaggattcttaaatgaacatgtttgttaatattcaattactaagcgtgtttaggatttttctacgaactattaattttttttttcaatcttgtttgttaggaatattatttttatttttaaatggataagtcatgcatggaagagaagagagaaaccccacaatttgtagaaagatttaaaaactttttagagttttccttaaagaattgtagcgatcttgaaaaaatctagtgtccttgtatctattgtggtaatatatcctagggaaatattattatgtcaaagaatcatgtattttgtcctgaaatcgataaaagttatactaaatggtattggcattctgaatcgatgaagggtgacccatatctgttgggtaggtgagggcgcgaagatcatttttaaagtaatcattgtgatgatcatcctacagaattgcttgatgatgctcaagaagagtttattcatgatcttgaaaaatttgatagcattgttacagatgctgataggtcgttatttagtggctgtgaaaaacgacgactatcaaccatggtgaaatattataacataaaggcagagaatggagtatgtgaaaagt

SEQ ID NO: 17128 - DNA, 3240 bp, Cannabis sativa
gttttcacaagaataattatataacgttgcaacaatataaaattgaaacaacataaaattataaaaattttaattaataaaaaatcataaaaatgtaaaaaaaattcatttttaggtgtatggtgtgtaaatttattgtttatttatatttaatttaaaatgagtaggagcgccccatatattaaaatgtactaataacaatatgtcaatttttatggtgcttgatatcttttagcattccaatacttaaatcttattctcattaacataccaatgatagaatgtcataaaacagataagatctaataatggagtttttgagtgtttatgtagtctttatgatatttaaaaagaaataataggtagagcctgttaagcaaatcatgtgtgatttaattaaacaatgtggggtcaatgttgagctgtgtaggaatttcattcttatacatcactactacttcgctctatataaatatatatgtatatataaattgcttgtatatattttgcaaacaataatttcaaattatcaaattagaaattaaagatttgttgaatttttattctttcttaaataacaataaataatacacaatattttctgagtataaaaggctttgatgacaaacagaaccggctaatttatcatgactactgaagataattttatcaatggcagcaagacattattgttaagttatgtatttaatatatatgagagttttatatatatctaactatggtctatacatgagctttcatatgtcaatttttttatgagtgccaaagttgatgattgaaggtggatgagtgattaatgtcgtcattaatccacaaaagagcactttatgaattaaaccagctaataaaccaaaagtggttgctcgtggctacttgatcttctgtaaaaggcttattcttttttgatttgagcaactagtttaaagcatgcaatggccaaaatatataacacaaatgtgcacgtacgattatggcaaacatgttttggtcaaagcaatatatatataatcagattgtagaagataatattatcctttcatcacaactagaatatgatactgagtaaagcagcagtacaagactgacctactctacatatatgcattttataaagctacttaatcatagtcatatatatatatacatatgtttcatgaggacaaaagtattaagagtgacatactgcaccgtgaaaaaatagtctgttttttgcatattgcacacatatcattaattactggaatattaaatctcataattaaagcaagaaagaaaaaaaaaaaggaattgaaggagcttaggatttggcataaaatatcaaccagcaataacgtcatgatcaacttctatctatctatctacacatataaactatataaggcaagacaaaatattatatttatgcattaatttttatatgtatttattaaatggaatggatataaagttcaaattaatatatatatatatagctatgcatcacttcatcagctagcagacatccattccagctcatatattgagttggttaatttggtattttatgaatagacatgaactacatacatatagaaactgcgtcatctttaatttatccaaattcatcatgatctgtcacttgtgggagatatttttccctttcaataaacagtagctagcttaacttgtattatataaagaaaatacgtttgataaaacttacaaggaaaatgccaacaaagaaaacatctaaattaaggaaaatttgaaattataattagggaaataattaggatacacttaaattatatacattttttacacacaataatgtgtaattaatttcaaccatacaattaaaataatatgattatacttaaaaatataaatgaataatatttattaattattgtgtgcaatttaaatgtgtatatatcattactccaataataattaagagtcactctctgttgtagatactacaccgaactaaagaatataaaagaaaaagtgtcggagtagggttatgctctgttgcagtttatttcgagtttccttccttgatgcccagaattgcttcctgatcaccttgatcatcccatgaactcccttaaccgcctacctccgaccctatttcaccatgatctccatcttcccctatttcatcctttcaccacaacacctatttattcttaggactaaagtatctttgccctgtttctttgctttttatttcattctccgattctttgtcttttatggattcaattatcaaagatatgaattcaaatttagccttttttgagaaggagcaagtacgtggttcacactttcactgaggctgatctcagtgactctaatcactccacaaaattctttttagttgctcgttgcctttcaaataccattaatcctaaaacctttatcaagaaaattggggaattctagactaaaaaatacagatttgaagtcattgtttcggaattacactctgaattatttttgttaactctttgtttgcagggaataagcttcagattcttgagggtgaacaatggcactccaacaacaaccttgttattttacactcaccatttgttctacataacgtctctaaaaaaattctgcacaaagttcaattctgggttcagactcatagactcccattcgttagtaaatctcgggctcttgctaaaaaggtcgaagaatgggttggtgaatatattgacgttcatgaagactcttcatgaaggatgggggtcgtttattcaaactagagcttggattgatatcaaccaaccacttatgagagaaaaactggttaatctcccaaagatttgggatgaacatttgctatagaatttccctatgaaaatctgcccattttcacttcaagtgtgatttattgggacacccttttgatcgttgtgcctctttccttgaattagttgatgatggaatcgacctcgaacttccttatgggcctgaaattattagggacaagttgcctaagtcggggtatgatcgatatagatatgatttcccaaggccaatgcttaccctctcttcatgacacaattttttacctttactaaacaaccttccttgtccaacattgcgactcagatgaggttcctcttgatctcaggaacattcctcacctattgtagttatatcaagcgacctcctgttgggttttatgccctaaataaaattccatttcaatgtaatccattttat

SEQ ID NO: 17129 - DNA, 5775 bp, Cannabis sativa
  modified_base (26)..(35): a, c, t, g, unknown or other
cctattcccattcccattcctattcnnnnnnnnnnattcctcccaaccaaacgcctcatcatttatctatataagatacaatattaataataaatcatacctgctgtttataaataatagcaagattactaaaaggagcagataatccagttgtcacactcaatgtggccttataatatgaagctgcagttggcaccatgttcctgttcatacacataatgtcaggaatggaatttatatgaactagatgatcaatgggtggcatcagggcaacataccattccatatatatattcccaaggtttgtaagcgcttgtggatggtttggttgtaatgtaaggcattgcttcagacattcaaatacagattcaagttatacagagagattaaacattgaacaacttcaaaacaaacacatccaaaatatgagatcaacatacattgtagcattgaattgcttcatccgccctgccaacatctttcagagcattaccctaaaaaaggtacaaaaatcaagtcaatcgataaaatcacatattcaatatcaagattgcatcattcaggcgacgagagagccaaccagattgttgtaagcttccaaaaatcttggatctgatgaaatggcttgtttgtagtgaagaatggccaaatccaattggccttgatcgtaatacgtactagccaagttacctgccattattatatgactgacttagttattgaaagaaataatgtgtgttcatgactactatcacataaaataaaggaaaaaacaaagatttatctaaattgaatttggccattcttcactacaaagatataccacaaatacattgcaattattgcataccacaatttagttttaatttatgaatcattgtcatccttgaaaccaaatattttgttgatcctttaggagaaaaagtggggtttatgcatattgaaaagacgtttggacacttggcagactttatctaagattttacaacttttgatgttccagtcattatttgagcatcaaaatgtgtactcctcttacagtgagatcaaaggatctcttaaacactaggcaccacactattttgtaaaagtttttgaatactatgtttcacatgccaaccttcaatgctgaaatatcaaaaccaagatgacaaaggatctcttaaacattaggcaccatactattttgtaaaagttttcgaatactatgtttcacctgccaactttcaacgatgaaatatcacacacacatggctcctcacccaaacctacaatatttgaggaacacacacacacgctaggctcctcacccaaacctacaatatttgaggaacatgaagaaattgtcttgcaagccaaaaattgatgaaatttaagggcagaaccaagaaataattctcccaacatttatcctccagaaaagactactttaccgaaagccatccaatagaccgaaataaaacacacacacacacacacgcactaggctcctcactcaaacgtacaatatttgaggaacacaaggatattacctcattcttgcatgctaaaatatgataaaatccaagggcagaaccaagaaaataattcccgaaatttaggaaggattattcaaaacatctgttcctcaatagtatcccatactttatatatggaataaatctaaaagggttaaaatagaaactacaagacgaataggaatcttacaaatgggaaaaataactaatagtgggaaaacatacataatacctcctttaaaaaaatatgcatgtgtattattactactttttcatacattaagggccttttaataaatatgcatacgttaaaggggacatgaaactcccactattcacttgagcaaacctcgtagggaaatttgtacgttagcaggactttgtggtggattttacttttagtttttcaagtgtgcaagtatgggtcttttaagacagcataaacatcaaaattttagctcaaatttatgtcttcaaatttataggctatgtcaaaaattaaaataatagctaaaacatgaagtatagaaatgccaggacagtctacaatgtatagaaacactcaccaaaagccattgcatagtttggttttgcctgtagagcccgctgataacacacaattgcctcttgaggcattccaagagcctggaaaagggcaaaagaaatatcgtgtttttctccaatacgattccatgcacttgtagctagccaaccatactggcacatacataactgcttaccttataaacattcccaaggttcaaatatgcatctggaaatgatggtttgagctttacagcctcctaataatcataattgtaacaaaaattcattaacaccgataacaaagcatatcaagcaagcaatttttttttggtcgaacaagaaaataaaagcaagaaaaaaagattaccttatagtattgaagggctctgttaagatcgcccgattccataaatatacccgcgagatttgaccatgcaatagcaaatgttggttgtatacgtaaagcatcaaggtagcaactgtatgcctgcataaaatgttagattctgactatttgcagtctcggaagtggaagtacaactagaagcaaccctcatctgacccctgccttgtagattatatctgtatcgaactgtgaatcacagttccacacatgaattactaacatcagtaattttactgtagtatcgtgaaagtctaattgtggaagggttcttccagatcttactacacccacatttttgtgggagcaggaaaagagttcggaacaggtgacttcaattggaagtcaactcaaaactgaggacaaattactttttcattacatccacaatactagcagaagtgagacaccagtaacccaattatagcttttcattgacgacaacaaaagaaagtataaaccatacaagcacttcatataaagcagaatttgtaattattttgtatttagaacttacttcttccacaaatccctgcgctttcattagattcccaaggttgctgtgggcatcaacctgtgtgcgaattcaataattaggatcattaatagcaaaaaaaaaatgtaaacaaaagactctagccaagattgaaggcaatgtggaaaacgctggagcaacataaagcgtgttatagataaggaaaaaaaaacagaaggcattttaccagaagcggattcagagcaagtgcctgacgacaacattgtgctgcttcatttagttttccttttcgcatgtaagcactacacaggtttgaccacgcatcacagaaattggggcgcagctgcagtcaaagaaaatcaaagatcaataactagccaagatgcataaactttaattcacggccacaaactaatattaaaaaaagacaactaagaaaaaaaaaagaaacaggtatatgcaaacctcaatagcaattaaatagtaatgaattgcaaggtcgatattgcctttttcctgcattatgaaaaaaaataccaaattgattattgaggtaaaatgtttagttcactacctaataaaggaccaagataaatacaccaatgatagtggaacatagtggtaaatatgaaaataccttccaggcattagccatgttaccataacactcagaaaaatgtggctgaattcgaacggcctcttcattcttagcaatgcacatatcaaaatcatgcaactgaaagaaagaaagaaaaaataaaaacattttcaacatacataacttaatcgaaatgctgtacagtaaactcaaatctgaacatttttgagctaagaaagaacctgataataaattgcacccaaaagaagcaaattatcagcccgagttggacttctttcgtaaacagaattgctatgttccagcgcctccttgtagttcccagccttgtacatgtgatgagctagagccaaatgcgtatcttcatcgactacaatacatacaaataaaacattattttacgcacttgcaacgacaagaagtgactaaaaaatcaaggcaagtctactgaaatcatttctacaacaataaaactgaaaaatctagctgcttcgtcacttcacattacccaaaaaaaaaaaaaactttaacagaaattgaacaaaccttcaatggaatcagaggccttgaaagtggcaagattgcgggaagacgattcagacttgagcgaaaaggaatcatcacgttccgtggcatataaagctcgagagctccccacctgaggctggtgttgacgaacctcgccatgcacagagatgacagccattatttttcagtgatcctattattccaaataaattaaaatcatcagaactacgatcctctctctatctacacccaaaaacaagaaatcaaaccctaggtttgagtattttccaaagttttggggtttttgagagagaaaaatctgttaggaaaaaagaaatgaaatgatggatattgagagagtaaaacgcgtggtgagagggatggaagcgtttaaataaggtcggaaagaatggctcagctttgggagtgtggagtgatctggaccgttgatcactccaaaataataatataaaaaaacaaagataagaacaagagttggccgttaggttgtactttattctttttaatattgacacgtatcttattccgatttatcgaacttaccggttttttttgctttcctcacgtgtcttttcaattttggacctttattctttttatttttattaattttttttcagcaaaaacaaaatgtagcaaatttgttatatctatcatatccttccataaaaatctgcctaaaataaaatatgtaatttacttttcaaaatctaatatattgactcgctggggttgtatgaatcttgacaatttattgtcaaaatttccttggcctaagtatcttatttttttggaaagatggcctatgaaaccaaaacatgctttgtcagcttatgaactaaagtattagtcgaacgcttcacatgcttgaccgaagcagtgaggaaatgagataaagtgttcttaatttgagtgattagttctccaaaaagtgagtggtcttctttgcttaaaagaatagcattttgtaattgctttgcaatctgcttcaatttgatgtagttggaaagcttccccaatgcaccaagacagggtttttagaaggaattttgcttcaaggataagaaaaggccatttctgcgataactttattacgaattacacctccaaagccagctttgtgttgttggactcatgtttctgcatcaatgttgagttttgactgccccagatcaggcgaaagggtccaaagttcatcagctaaaggccttttgtatgacaaaatagtgttgctattatagttggcggctttaaattcttacaaataactcttagccaaactaagaatggtagaatcctcatctgggagctaactccttcacgccttattcttattatgccaaataaaaagctacacagaaagaatttcacatcttgtgcacacatattagcattattattaaagatcatttcatgagaagatatgtgttgagaacgagacaataaaggatagaaaattgtacatttccagcctttctaacacagctacaaaagaacaaagtttccacatctccataacaatgtggacaagaaggtgaactaatgattttacgaaaagtaaggttcttagaggggcaaattaggggtttcaataaaatttacaaaccgccaaatccgaataaaccgccaaaaccaaaccgaataaacc

SEQ ID NO: 17130 - DNA, 4171 bp, Cannabis sativa
  modified_base (98)..(100): a, c, t, g, unknown or other
attttttaatatttaattaatgattataaatatcaaccattagatatttgatccaatggtcaagaataaaatacccatacatgggtaatacccattannngcatacccatatatatatataggatgtgttttcgtgtttgattttttttttttttcatggaatttcgtgtttgattaggatagactattttatataatcgaccatatatatattgaaatcaagcttgtgagatttaaaaatagtattttttaaaaaatatatattattgctagctttaattagtagatatttagttgaaggtggtgttaagattttataaatattttaattagtctgtttttgttgattgtgcttgattagcaacatcttcatataatgaaattttcctattcttatcagatgattttgtcatcttaatatgtaaatccaactccttgaaagaaaatgatgacatgtgaagtatataaaattccattaaaatgtttatccttacttccgagaagattgtgaccaagacatgttctagtcatacaattgtgcatcgcacaaccagaatccaaaagtagcacatgtacattctctcctgttcagttcctcataaggtcacactttcaccacagatggtccaaggatcgatcgaacatacgcagtaatccgtttgaactcgcgagctcatacttggccaatatacgaatgaccaatatgcaaccagtagtatagtcgcgctcgttccaaacttaagtatgaacaattaaaattgttcttccatttattttataaaagtttttattttatttaaatgaattaataattgtaacagtcttgtatatgattgattatgttattaaatgattatttattttctatataaatgaatgattaaaacaaaataaaattaatcacaaactttcttcaaaagtgaattaagcatgtcgagttcatgataactcgctatatatttctccaaatactcattgttttacgtttgatactcattactttcatttgagtattcgtcgttctaaatgaatacttgctactttttgtgttttttttgttcttattcgaataatactcacagtttattagtgttctcaattttcctccaacaacacctattcatgaaactcttcatctatatatctttttttttcattaaaaatatatattatacagtttcgaaataaatgtttaaatttaaagggatgaaattcagacaacttcattaattaaaaatgttattgaaaagtataataatgactttataggtaattactttttactaaaaaaaatgtttattataaaaatctcagagactatagacatgcatttatgcataaatcaattatatcagatatattttttttaaattgtgtcttattacgttataacaaggccatggccacccctaaaatacgtacgtactcctcctaatttaattgtaattaacgaatgatacctttatggaaaacacaataaaattaattaatccttcttaattaaccgcgtggatatctatttgtataattatgcgtggtccaatgtatttaaagatagaagtaaattatagtgaggcctactagtagattttgatgggttggatatatataagctaaaccagtagctacaagagctagtttggaattccacaaacaaagggttatctagatagataatatatcactgtttttccaagggagctagccacctagaaagagacacaacatcaaagtcttagcctaccaacacgtggtagtgccatgacgtaacagaccacacacgtatggataatcttaattattaaatataaatggacctcataatctgattcattcaacaaaagagatatatatatatttttctaataaattatctaattttattaataacaattaattaaaataaataaaggcaataaaaattattgaataaatatatttattctctttcaaaaaattgttgttttaattgataaatactgtaaagaattttttttcaagttcgaatggaaatcgtagtaaattttacctcgcttcttagaaaaaagtttatttacagaaaaagtttggtagaattggattttataaaggtcaaaaatgaaatatttatttgacggctaagtatatttgggttgcctctagcaagcaagacctattcattgaatagattaacttcatttatttaaaaggtgaaattttttggctagctctcttaaaaaatgacacaagctggtacattcgaaagcttatgaagcttagagatttatttgataaagatacagatacagtgactaatgcagcttggaaagggaatttcaaacctaacagttctatatctcccttatttctagtgagaaagtgaagtatgctgctacaatttggcatagaatgtgtatttccaaacatcgtttcattgcgtggtaggccttgaataatcagttatatcatctggtgctgtcctctaccctctgtcctatttgtgaagagagaataatgaatcgcgtcagcatgttttttttctgagtgtgtgtttgtaaggaaagttgttgctggtatttccttctggtttgatcatggtggccatcgactatatatggaggagtggcattcctggtgtgataacatgcggcatggtttagtggatcagagtgttcatgccatgatttatgctttgatttattttgtctacagaaattgaaactattgtgtttttgagaaaacttattattcggttaagatggccaatttgtcaattaaacttgccattaatgccaaaatgagaggtcttatttgttctctaagtaacaaaagagacactgatgtattgtacatgtacacgatctgtaacgacgcttaattttctggtttttgtgtggggctgccttaacgggtagttgcctttgtttgtaatttgctttgtttgaatgaagttttcctttccttaaaaaaaattagttaaaataatagtttgcgatctaatgaggacatctacacgtggtagacatgactaggattagaattagaaaaacaaattaaataattgaccacacaattccttagattatttgataaaaaagctaaaaaataaaattaatcaaatgaaaaagattgtagtttcacaatcaactttaaaaacacttatatttagtttcatctaccgctcaaaagacacaacagtaaaaattattacatcaggtttattcaacctcgtagcttaagcaatgttgtgcaaggtacacataacacctcctttaatctcagaaaacttgctattcacaactactaaaagtgatctaatcagaacatttacacgttgtagacataataaggattagaattaaaaaaataaattaaataattaactgcacaattccttagatcgtttcataaaaaaactaaaaataaaattaatcaaataaaaaagattgtagcatcacagtcaaccttaaaaatacctatattcaatttcacctattgctcataagacacaatagtaaaaattgttacagcaggtcaacctcatagtttgagcattattgtgcaaggtacgtaactgcactactaacaaccccttcagtcctagagaacttgttattcacaaccactaatagtgatttgatggcgagtcatcaaaaaataaagagaaccaacaatgaaataataaaacaaaacaaaattatgtcacacagagacaagaataaaatacttaaaattatgttgtagagacaaaactataccacagagtgaagactaattgcaatagcaaaaattgaatcgcaatagtaaagccctattggcacttattttgaggatcttaattaactaacatgtttgtttgattattacatagtaatctaacatcctaaatatgaaataacacataaaaggaaaaaaaattccttatcttgcaaaacaaaaaaggaaaagaacccttacattggttgcaacaaaaaatagtgactctttttgtttaatcactctaaccattgattcccttcctgtagtaggatatttccaagtgataaactttgattgcttcttttaactcgatatgcaacaagtcttcactttcttctacaaagatttgagtaccaccttgaatagtgtgggttggtacttaactcactaatatgttgaccaaatgttgattactcacttattttgatgataa

SEQ ID NO: 17131 - DNA, 5490 bp, Cannabis sativa
aaaataatattaagtttttttataaaaaaaaaattaaaataatgattaacataaatgaagatgattccttatttcccttattaagacaagaaatggttagtgaaatgcatatggtcaatgttttccttgttcaaagaatggaattttttgaaagaaagaatcttgattattctatgaaggaaggatacacaaatttttaaaatttagagtatgtttatattttcaaaaaattgatattttccttggatgtcacattttctcaaatattccaatattggaatttcaatattttaaccccaaaataaaaaaaataaaaagacattcccgaaatattacacattctttttcaaatatgtaatctttatcacatatcaaaattttaaaaatgtaatctttatcttttcaaaacaaaaaaaccaaaagaaaagaagatatttatacatgattataccatttttagcttacaaatctgtacttactcacaataaaaaataattagttcaaaaaaaattggatacgaatgaggggcccacacgtgttgaaaatgatatttgttttgttttataataatataaaggattcttattgtaacaaacaaaacgccaaactctagaagagagagcaaaggaaaagcccttcggaccagaaaaacctccaaaactgttaatgcttgcttgcacgatctctctctttctctctctgaaactcaatatttttcaacaaaaacaaaataatatgtagaaaagaaaaagtaggtgtggccctcttactcaactctctccaccgtcttcttctccatctcatctcctctcctcgaacgtctctcattcatattacctcttctttcttttctttcctttatcttcgctttctggttaaccacgcttatcatacaagacttcgttaaaaggaaaaaggtacgcgctttctgataatatttatctcattcattcacagcacagcacaccctctattaaagtttcacttttttagtttttaatcttcacaaactgagttctgagatgtgggttttgctctttattcccttttcacaaatgggttcgaaagaaagcttctcttgagctggtgtttttgctcaacttctttatatgatttgttgggttcgtcttagtttttcttgtgacattgttattgttcgaaaggtagcgtagtgacgacgctttgctatcaaatgtggtgttagtaatttttattttttatttttcgtttgcattttcgatttttctgatatgggttttgcatcaagttaagatctttatagtgtaaatctgtttatacttcctagctttattattgtttcaacatgaatttgcttacattaaagtttttctttttctttttctttttctgagatgaatctaacgaatttcattattatgggaacttattctcagttctcttctgattattaattttaattaaataaagattctcagttatctaacatcaactttgattttgtgtgtgttttgatctgtcaaggcttaaaaattttaatactagagatctttgattactattgaggttaatgcatatataggtatatatcttgaaatatcaaattaatcgatacattagttgatctcaaagtttcatttaatataaacgtttttcgatttcttagatttgaggcgatgatttcagtttccttttctctgttttctttattggtttcatcttgttcattatgtctttctattaaaaaatccttattttatggcaaaaggtgtaattctgtcatcattagtcatcagaatttcttgttattttttttttttgtttatgtgatgaggatgatttattttattcaaaagaaataacattttcactaaatttaaacttcagaagcaggaacaccttttctttatttatctttattattatacatcactactcagaaactcccttttttgcaaaatttggcataaggaaaatttacctcctttggaaaccactatatatttttttaataattttttgcccttttagttttcagtcaataatatgcttaactttttgttttgtaattgtatccccatcaattttgcatttgactttccattgtcatagctgctttgacaagtttctttttctattccttatatccctcataagaaaagtaaataataatgttcaatttgattggatgttaagtgtgtctactattattctttttggtcaatatcataagctagttttgattggtttcaggttttcttgttctgaaagtaagcttgacataaattgctcctttgtgatggctgaggagagcatcaccccacctatagggaagaaagaaaagttggttcctcattatctaagagcttctactggttcttgtcatgatttttgtaaatttgggaagaaacatgaagcagaggagttggcaaggtatcctataccgaaaagacttgctgcgaaacttagtgctagtcgacgttcaatagaaactgctgctgattcttcagcgaaaaggaactctaccacagtgaaactcaagaactctcctggttctagaactttttcgcctaaggatggcaacatttctaaccgaaaggcattgacgagatcacttgatagcctgaatgttgtcaagactgatgagaggaagaaaccatcttcggtcaaacatgaagctgcatctgcattaccttcaaaaccgcgaacacatgataccccgaaaactatgaagcaaaagctttcagcttctactgaaaagctggaactgtcttcaaagaaatcttcaacaacaaaagctaagccaaaaagcttttctggtaagaatcaaacttctccaaatttgaattctgttgcagtgaagccattgtcttctccagaatcctcaggaagattaaacggaaatggagagacaagaattggcaagagaactgggagtacagtggctccaaaaaaaggactagcatcaccaaaagtttcattgcccaataaaacctctccaaaaaaaagtgttgtaagcttaaacagaaagcagcaagggagcttaaagaaaaatgcttctcccctcgaaactaataatgaagtcagaatagctgagcctacagaatccaagaatggtgaagtcccagaaaaaactctgtatgtcatcaagatggagactgaaaagaaaactttagaatcgaatcagaatgaaacttgtgatgcaggagttgaatcattgccatatattttgtcattgtcacccaagtcttcacccctcccagaatgcctctcttcgccatcttcttcaccgctcccaggaggctgttcatcttcgtctccatattcatcacctcatgaagaggaagaagatgaaaaacaaaaacaagaaggtgacaatgaagaaagagaagaagatgaaatggagtctgagtgtacaataagtgaatcagaggattacactttctcagaggacagtgaaacagaaagcatggagaattcagatacactagactcgaacaacaagatgcgcagaagttcagggttggtttgtgaggaagaagatgatgacaaaggttcaaaattgaagttcagaagggggaaggtggtggatatgcacactgagaatgatgccccgaggaagctcaagttcaggagagggagagtgttggagaaccaaaatgttactgcagacgcgaggaggagaaggtttaagaagagagaagaagttgatgacacgaatgctgaagccggctcagaaaaagtggttttgaaacatcaagatgtgcaggggaagaaagatgctcaaggtttgttcaacaatgtcattgaagaaacagcaagcaaactagctgaaacccgaaagagcaaagttaaggccttggttggagcttttgaaacagtgatatcgcttcaagacaaaaaaccttcaaacacagccagttaaggtggaacaaatcttcttttaattaacatacaaatgatcataaaaaaaaaaaacagtgaagaataagcttaagcttgtatgggaaagtttttgtattctacaagcttttggaactttgagaaattgtaaagatagattgcttcagctgacttcattcctgggttggtgagatgtgtagaattgaatttgagttgagttgaatatgagtggtgagtgtacttactgatctttggcacccttcatacacaaaacaaaagggtatatgcgtttgcttctgaatttgatactttctattattatttcattgtttgtgaataaaaacagttaaaagaaaaaactcttatattgattgatgtacttagttcatgaaaagagagaagataaatgcttgcatttgtcttgtaataatgtctctcttttaataccagtgagaataaaccataacattacagtggctttttattctttaacaatggcttttttttctcttttctttaacagcactaaaacagtggcattatattttcatactttatttttaacttgttatttcagattatatttgtattttttttctaaataatgttagtcagctcaatgtggggagtatcaaagttggaatttgtagtccataggttatatctttgtaaatcaagtggacaaatgacctattaaattaagagaaaaagaagaagtataattaagaaaaattctaatattttaatgaaaacctatacaataatgtaattatatatgcaagcaagtgccactaacttacaaattgacccatttattaacgctaatttttgtttttggggaagtcttaccaagaaccttgtatctaacagtgatgtattaatgactgtatttactgcattcacaatgagccacttgtaaatttccttttttttttgttggaactgctaaattatttcttttttttttcgaaaaaaaaatatgcatagatttatagtagagaaatattaaaggattaatgtaatttaatatggaattataaaatgtcacttcactacatgtagttgacaagggtatatatttccacgccaccctagttgtggccagtcacatcatagtactatctttttattagataaataaataaagagtgtagattcattatattagatgcatacacagaccaatgaatttagtatagcgtgttggttagtgcaattagtagtactattggttattactaattaattctacttaatattctggtggtaaatacagtaaaaaaaaaaaaaaaaagagggacacgtgtcactttcctaattaaaatactataaattactaataatagaatctttgggcagacggagaagtccaccttcgactattattttatactccttactcttctcttccggccatttttaaaacaaaaacagtaaaagaaacgccaatgcccttaccttgtcaccaccaatcacgttactgccacgtcatacatactggtccccacactccacttgtagacacgtggcgcattttcactcgttatttatctactcgtaaggtgactttgatcttcccaccaatttttattatttactttttttttt

SEQ ID NO: 17132 - DNA, 3759 bp, Cannabis sativa
  modified_base (2366)..(2385): a, c, t, g, unknown or other
actttacttttgctttggattaaaggaatttcaaacatacaggtgttcgggtcattagctgctttgctttctgaaatagatgtcttgctgagctttgcggatttagcgtcttcttgtccaactccctacactagaccagaaatcactacatcggtaaccgattactaataattatttaatgttgactcttcaattcctctttttcttctcatggaaaatggttttgagacttttccttttttctcattttaacaaacaggatgagggtgatatcatattgcaagggagtagacacccttgtgttgaagcccaggactgggtgaactttataccaaatgattgtgaactagtgagtattcatgcaaaggaaatataaatatctctttccagatttttaaattaaattgttgaagtccttaccgttttcatttcatcccttaatcaggtgaggggtaaaagttggttccagatcattacaggacctaatatgggtgggaaatccacatttattcggcaggtgtggttttggtaatttagttatgttgctctttctacagattatgttgatttatattcaagtgtccttgtattggtcacaaacaaattacttggaggtaaatctctttgtattattgcatgccctgataccttgacccatgtgtactattttaaataaagaaagaaagaaataaaataagtgcatttccaatggagatgcaaagctaaatataactctgtaaaagatatacttcaattcaatagcgtgcttggtgatgaatgtgagactacatttgttatgtgctaaattatttgtatcactgtaaatgtactactttttcatttacttttatgtcatttttatcattttattagtatatttagcaatagcttaaattatgaacttatgaactatgtattattattattttttttattgttttatataataaaattaatgataaagctattatttttgatgaaaatattaattaaacattaattttgcatcaagttttgatattgatgcaaatatattacaaaataatttttgtgttaaatataacacaatttttaggagatggtctaataagtcaaagatcttacaatcgtttttcttttgtccttgcataaggttggcgtgaacgtattgatggctcaagttggctgttttgttccatgtgacaaagcttgcatttctgttcgtgattgcatttttgctcgtgttggtgctggtgactgccaagtaagaccaattttatattctcttggaagtttcaactccctcaaaatgtactgtattatttcaactttctttcttagtttccacttgaaaaacaatagatgtggcttctcatttctggatcaggtgaatatacaacattgttcaactttcaatccatcatatttacgatccaattttatgtactgagcttaacagacattaacctgccattttactgacatcacccggaaaagcattttaggcttttagctaaaatgtgctgggtaggttaaaactgatgatatcacaacattaccgcttttatgctctcatttctttgtatataatattacttgctgactcttcataaataactgctttattttattaattatttaagaaaatatattttttttcttttcttgttttctgaataaaagtattatacatcttattttctagcgagatgttgattaactgtgttccttatcttgttagctacgtggggtgtctacgtttatgcaagagatgctagagactgcgtctattttgaaaggtgctacagagaagtcattgataatcattgatgagttgggcaggggaacatcaacttatgatggctttggttggttctctctatcaaaagttgttgttgttgttattattattattagtattagatctaaggaatattcatgttacatccgcatgcaatggatcaaatttgcattttcttaaaaaatgactcatactaagaaaatgtttccattggtttcaagaagtgtttgaatagtcatattgatcttcttgtcatatgtgtcattaaactatttatatcttaaaacttgatttaattgtactctcgtttttactctggttctcaggtttggcttgggccatttgtgaacaccttgttgaagtgattaaggcacctactttgtttgcgacccactttcatgaactaactgcattggctcatgaaagtgctgatcgtgaacctaacatcaagcctattgttggtgtagcaaactttcatgttagtgcacacattgactcgtcaactcgaaagttgaccatgctgtacaaggtgatgacttaactatccctaggttcttcttcttcttcgtattattattattattannnnnnnnnnnnnnnnnnnnattattattattattatttaatgcattttctggattataaagacatttattaaaccttctctgagtgtgtgttttttaaggtaaaaatgtgactaacaatatatatatttttgtgcctggagttaatattattaccgaagaagcagaaaaatatgaagaatatctattaataaatgaatgtggaaaagtttatagaagcttatatgatagggagcgtaaaggcaattactgaagtgaattatggtataaaattttagttagaattattattacaaggaatatcaattaatctttttatctgctcccaaccctcaccccttaaacaaaacaaaaacaaagcaagtctttctataatctgttttttcattttaatcaacttgctttgttgcatttgtacctttgtcaagtactgagctactttcttgtggccatcaggtaaagccaggagcttgtgatcaaagttttggtattcatgttgccgaatttgcaaattttcctgagactgtagtggcacttgctagagaaaaggcttctgaattggaagacttctcacccacttcagttgtttcaaatgattctacacttgaggtaccgtctatgaagctatttgcaacattgctataatgaccaacgtatttttaacctcgcattagtatttgccaattcttaacatagatagtcaccatattcccgttcaaagaactaataaatgaagaaaggctgataaactccaaatgaatttgcaattttcacttacgattaatcatatcactcagatcttagatacaattgcatctttacttaaattacaaattcaatattctcttggtacattgttggaagatcacttgctcataagtaggtggtgaatcaacactagtatgttacttttccttcatacaaaaatgggggtgcataattgtctttctgtacctgtacatgattggtagacataaaataagatagctttaactggagtaaatttttactataaatctgaattcaaacacatactaattctatataggaaggtaataattttctcccatctgatgctttgtaactttcaaagaaaaagttaacaaacaagccttccattaagatcttgtaaaacaaatctctattttacattagctacattgttgctctacatctgtagatgcttcaaaatattttttttatcgagtttttattaatttttctctttactttttaaacaaaattatatgaactgaataaagatattaaaagcaatataatattgaaatgaagtgaaaaaaaaatatggagaatgatgcacacacagtcacctccctataagctcaaatcagaaatagccaagccatagactagaagttgaaaatttggtattat

SEQ ID NO: 17133 - DNA, 5313 bp, Cannabis sativa
ggtttatatgcttctactctcataaaattgtagtctatgtgattctctgttacattaatattaatgtatgtcccttcacttacaggaacgcaaacctgaactaacatcagaaataatggcttttcgggattctctattatttacaacaatatctgatacccttgatgtttgggagctaaaaggttttgtgttgaaaggcttttcttgtattagatatagtaatgtttgagcaaaaatgacattcttttcaacagatttaggacatcaaactgcacagaggatagttcaggcatctgatcctctgcggtcaatggaagaaatcaatcaaaattttcctaacattgtttcttctttatctcgtatgaaggtacagaagtctgttacagtaatttaagttcgaacatttttttgtattacaattctcccaaacttatttaactgtggttgtcattttgcagctgaatgattcagtaaaagatgagataattgcaaatcagcgaatgatcccacctggcaagtcgttaatggcactcaatggtgctttaatcaatatggacgatgtggacctttatcagtaatgctttttgccctccccaagtttcttttcctccatttctagttgcagcctcagtgacgagattgaaactttgtagtttgtagtgctatcccagctgtgaattttaggatagttgtgaagtggggtaataactattttactaatttttttaaaaagaaatagttagggctgggtcccgaaccccagaacatttacacacagtcaccacaaccacttgagatgtcctcagatgaacttcttattacgaagacaaacaatatggaggataacgtttatttttgatgagataaatagtgttttgggagattaggacttctctttgatatctgttttgtatatttcggatgcctgcatgctgttttgaaaaactgtaacaggcttctgccttcttttatattgggaactgagtttttttaaattgttttcacatattctatgatttccttcctctgattctcccactttgtttctttcctttttctatttataactccttttgtatttatattcattcttttggggctttatcattattgcctctagttaaggaaataaagaaagaaatataatcattggattcctgatgagcaagccattgggcatctatccttttcatagtcgctagagttgtcattactggattcgactatgtttgaaatataaactctatatgtgctcatataatgcgcatgtgcatgtaaaaaagttgtttcctttgtttggttgtataacttctgttatctgttaacatttttaatcttttcttttgtaggatggctgacttggtacatcaggatttatcaatggctgatcagttttcaaaactcaaggtgaatagtttttatcctacacgcttaactagctggaatgctgttagatgatcaactaagagggattattctctgaactatttcttctggttgaacaaaagtttaatgaccatttcttctgttttgccctgtcaactcctttttattattgttgaaaaaggcacttgaccaaagggtttggtgtcttctatgttggcatcattgtgtatttatgtgtctttgtttacttgagcctcagctcttcgtccattttttttctcagataaaattttatctgagcgaagaaatattgtaggcttggttctttgctttcttctgtaaattgttgactacttttatagttttatgctattgtggaatgcataaacaaagatggttttgatgtagtattaagtttttgtatatgattttggtattatgtgcttcagtgtttgaacatgagtcagtttgttagctgtggctgtgtgtgagtctaactttaggcatattgccttagctgttttcctttgatggttagatttagtatttataaaatagttccccttataaaaagaagttttggaggataggtgggtggcaacatggcgggttttaaggctagaaagtaacaagggaattataaataccttgaagaaaattaagagaggctttggggtaaaattaggcattggttagccatttgcctttttaatgtataaggagtttagagatttcgttagttgagttatttagaagatgacaatattttatatatgttcttcttcactttttgctgtttgtgtgggtatcttcatccattgttgcctgcttgtattatttaatcattaataagaaactttgatgtctggttaaaagaagtcttgaagggagacctggaattaggattttacatgacagaagcaatgcaaattgaagaagcaatattttactttggtcttccctgtacaccctattgctgttttgcatttcgtacgtcagtgaatttactgtagacttttaaacaagatggccaatgggaggttctctttaggctatttgtggttggagggagaaaacgtaggaaagaagatggagagctacataagtggaggggaaaggaaggagggatttctttggtgtgtgtggagtgggtgtattggttttttagaggaaagggagaaaattgcatcgaattatatatgaaagctttggtcaaatgttaggactaaaatattagtagcaagaatagaattagttatgattaataatgtgctgagttattgtttttcaagtggctgagttgtacatttttgtagttatgagtggttctgtggtggcccttagttatagttgagtgagcctagcatttaagagaggcttatttttcttagaggttagctgattgcttgtgtattttgggagagaaaatctgttctggagatctccaagtgtctcggaaacttggagctttgtaactctgatatcaatgaagattagtctcttgatttcatatctagtctagtctctatcatcaaattgaaggggggaatttaattatcctgggtggaagttactctaaaccttgcgcacactaatctgttattaatcatttcagacaaaataattgaggtaaaagactggtaatctttccttcctagatttctgtagggaatggagtctgttgatgtaaaagactgataatttgttttgctttgatttgttgtaattttctttctgttattgtatacctaagctttgtttaccaaggttttcctctgccacaagtagccgcacacgcgggggaaggggcagtctaagacaagtggcttctttcactttttcaaaaaaaaaaaaaaacaaaaaaaaattgaggtttgatctattcggaaactaaagatgctgacagtagtatataattacagattccttctacctctatacgtaaactcctgtcaactatgcctcccccagattccagtacgttccgtgttgattttcgctcatctcatgttcattatcttaataacttggaagaagatgccatgtataagcggtggaggagcaatttaaacgaggtaagaattaaatttttcctacaaatatggttacctacttgtatggcttttggtgtggagcttgatgaattttgacagattaatttctaaatgcatgcagattttgatgccagtgttccctggacaacttcgttacatacggaagaaccttttccatgcggttgctattattgatccagctaccatatgtggccttgaggtaagtttatgtctttctatgtaatagtgattatttattgcattgtctgcatactgatatttaaataattgaatcttgcagtcaattgacatgatgtcatctttgtatgagaatagttttccaatgagatttggggttatactgtattcatcaaagctggtcaagcagtttgaaaatggcggtggtgaaatgcattctttaacagagaaagacaatcagaatgaagatttgtcgagtttggtaatttatagttttagctttttctttttcttttctttctttcttttctcctttttttgagatattgagggaggggggatttgaacttgggacctcctctttgtgaggagaagtgtggaaccagtaggctatgcctatggccacttttctttctttctttttatcttcttcttcttcttcttcttttttttttttaatcttctcgcctacttgtcttaaggtcctttcccaagtttctggttgaagtggccatgattggcttttctatgtctggtttatgttatacaaacactcttcctttatttctatatcttttttcctttgtagttttggggctaacaaaacgatcatactcttgctgcagattatacgtctcttcaattatgtaaaggaaaaccacgggattcaaacagcttttcagtttctgagcaatgtatgagtagttctgcctttatatttacctttattattgtttacatgctcattaatccttattgcgtagaaaagaaaacaaagcaattttgctatacaggtagttgcttatcgttctctgtttggtatcagaaccactgtaatcacttttctgctttttctcaaaatttattgaaatgctttgcttaaagggaagaagaatcctgccatcacataattggaacatttgtatgatgcagtctttatgggagaaagataagaaactaggtagctttgtgggtttacaataccaaagagtttaaaggtgttatgttttctgtaaaatcctagttttgttgctttgtttgtggtttcaactttcaaccacatgtttttccttgtaacccctcccacttttttctttgacatcatttggtaagatgaatagaaccttatttgtttactcattttttcatcaatgttatttatataatatcctttcatctgattacaaatacagtttataatagattgtctatacatgtgacagataaataaactgcggactgaatcagatggccttgctgatgatgctctagaaatgcaccatgtggaaggagcattcgttgaaactgtgttgtaagtttcaacttcttagtttctgattctttactctattttaggaatatttattgctctccttttgcattcttctttgtaatctttttgaactattttcttgttaattattcaattattttataaagttctgaattttatagcaggctcatttgctaaacaattggagactgtttttttaaatttcttttatattctgttgttcgtggactgcttgtcctgttgtccatgctttcttatcatcttctaatgataatgaagtatctgtttcccattgaaaatgactgttatggttctcttctgatactgtatcttcagtgaacttttgtggagaactttgaaatatgcacacttcattatgat

SEQ ID NO: 17134 - DNA, 2400 bp, Cannabis sativa
aagaaaattcaggccacttggctcgggatctatagcatttctcatcccataaccacaaacccattacagaaaaatctaccataattaatgacaaaattatacaggaaaaccaaaattgcaaatttgggtgcattgtctggcaaatgcatgacttttttcagaaacaaaacagcgacttatattacagagttaataatacaaaagaatattaagcaaaaacacgcccaccgaattatgctaataagctaaatcctaagtggtaattattgttaggaatagaaattctgtataatctttaactagtttctagatgccctgctggcatatttctgttattgtggtgatcattcgtcacgttctctgtactatacaaaacattatttctgttttgttctttcagttatggttgaataatgatgtgcaatatactcatgaatcgtgatgatataaaatgcatatagaaagaactttagccagcctcaattgattgagctgtgcatttcatttatctgtttattgctttatttctacatttctcacccaccaaaatatactataaagctaaatcctaaaaagcaccctacgattacaagttttatcactaaagatgtaaccagaagatttcggtcggtcatcctaacaaaaaaaaagtaaaagaagatgattttggttatcttttttcttcatacatatacatctctgttacttatttgtaatgaaataaaaataatacatctctatggaaatcatagaaacacaagttttgtctcacatggcgctaggcacaattcttcaaacacagatctaagagaatgatggggtttaactagtttctcacatggcactaggcacaatttatattattattgtcgtaaaaggtaccgaggtcaaatgtcttaaattgacctccttccataattattagggagcctcacatcctataacaaataagacttaggacttcaattgcataaaataaaagagaaatgttaaacggcaactatgatacttagaaccttcttacgtgttaatatcgctattagtgcaataaagtatcaggtcccatataatttaatgtcataacatttagataatattactaatcaattataaggtgacacgtctagaaagtgctagaaaccactagtatcaagtagcaatgctcaaaataaaactattaaacctcaaactccctaaaccaaatgtatagtatcttgggacaagatacatccccaaactctactgacctcttggaaagacaaataaccaaaaacttttgttttataaacctatgaagccaccaagactttgaccttctcccacaatttatttgtcattaaagagctcttctgtaaagtttcactaaaaattatttatgaagattatttaattctaaagtgtaatacaattaaaagaacacgttctatgttgcactaaatccatttttcttcccactttgggcaacaaaagtgtaagaaatttcattaggacaatcatttcaccctcatgtatcaccttatctttgttctttagaagtcataaatatcattaatttgattcaaactaatttcaaggaaattttagacaaaaaatcactttcatgttttctgatgttcacagcttagcagctaatttgtatacatcatatgtagaactaatcagaatttaataggctgcttagttgaggtgttagtaactgttaatccaggtgtatttaatgtctaaaattgtactcagtctatctaaaggttttttccaatagtaataaaaataaatcaaaggtatatttttctacattgctacgtcgtatctcagctgtagaaactcaaaaaattggaaaatttccaattttcttctttcaccctactcttacaaaattagggtttaatacactggaggctcaatcttagaaaactaatttggagtggttttctattcttacctccagcacagcgaaattgcccaaactctgaccagcgaaaccccgaagtccaatgcccagaaaccccgagtgaatcccacgtgtcgccgttcgtcactgccatctcctccatacaccagtgcgtgtaggcgcttgacgacgtccttttctccgacattttcattctcggcacaccctgattcatctagtcttaacaaacttttattccgaccattgaaaatcgaccatggtcactgaggttgtttcccatcaccgcagctcctagaaacaattttaaaggattacaatatgattgttgcccaacctggagcatttcctttcattacagatcagattgattatctccatagggctgctaaagtggacttccacaccagatatgaactccccgagtgttttctccactccagacactcttgttgcattcactactcaaatctcaccatggatcattgact

SEQ ID NO: 17135 - DNA, 5599 bp, Cannabis sativa
  modified_base (3587)..(3587): a, c, t, g, unknown or other
ttgaaggactgcaaattagggtttgaaggaggggtgtaagaaggagcagtgggaggagcaggatcgggattttgaggataagcagggtagttttggggataagcagagtagtcgttgggagcgtatccggagttgaacggtggggcggaagcgaatgaagtgtgaagatgatcggaattggggttggggttggggttggggttgggattgggattgggattagggtttggaaattgattgtaaggaggataataggggagagaagtgtaatcgccttgctgcatcgttaaggttaggctgttggagattcaaggctttgactatggagatctctctctctctcttgggtaaaagtggtttgaagaagaagaagaagaagaagatgaagcgtatagaaggaggaagaagaagtgttgatggtgctgttttaaatttatgatttaatttgatgaagtaaagaatattagggaatctctattattattattattattattattattattattagataattaatgcattagtggtacctaaatgtcataatgttattagtataattaaattacgagtttcatataatttaataaaaatacttaaaatttaaatattactatttatttaagtttaataatagaactaaaataacaatattgttaagtaataaaataaaggggaattatcccatatactatttttttaattttttttcaaatttatagtttgggtttctaaagtggttgcggggctagtttaaaataggggtttctatacgattttttgttgtgatttaggttgcagcgctagttgcaataggagtttttatatagaatttcgtaaaaatgcaaaaaaaaaatatttagaagtgtaaaaataaaaaagaccttaaaataaaataaaatatcatgaaaataaatatttattactatattaataaaagataaatgaataaagaaagagaaatttaactttctatgcatttattggaagaaatgaattccttaaaccaaggttaacctatattggtagaataagttaacaattcaaaaaactcaattctatctctctcatttcaaacgactgtctttctctctctcttctcccattttctctctcgttctccgtaaacttacccagaggagtcgactcgcagaccacctcgacctcgcgaccaactacccacggaccaccgtgaagacacgacccacgaaactaacaccgacaatgtcgtcattaaaggtaatattcattttcatgtttttttgaactttaatagttttattttttcttgatttacggttaaagcatttagagttagggttaggtctgtcatttttgaggtttttaggagagaatatgtgatttttgaggtttttaggtgagaatctgtgacttttgagatttttagacgagaaaatgtgttttgggcgagaatttgtgattttggcctgatgcaggtcagattcaggcccaagagttttgttttgttgaaaggtctaaatgttgaagacaatagtccaataggtttgatgtagggctcgataatgggacccatagtttctcaaaaatttaaagtttaggttagggcccgatagtagactcgatagcttcttatttttttatgtttaggttactaataggcctgatatagcgcccgatatagggctcaacatgtcttgcaaaattttatgtgtttagtagggcctaataggtctgatatagggcctgacataggtcctgattgttctcatttttttatgtttagttgagggcctgataggtccgatataaggctcgattgtcttattaaattttatgtttttgttagataccgataggttcgacatagggcccgatagtttcgatgtagggttgaggtgttcattttattttatttgttttagacccaatatactgtccgatggtggtccaatgcctttgcacagaatttctaacttttacttttgtgtgtttttttgcagtcttccagagctccacgccttttacttttagtgtcagaccattacaccggtcatgtcacttagcggggcggtagttggtattaccccaggataagatcgaaatttacaaagttataattgttggaaagggtgaaggagaaatcccctttcaagtaattctttgagagaaagccattacagtttttgggtgcacttatccatcagttgttcatgcataagatcaagtcggataaggtagatggaatgcacttttgcattgcaaaaaagagatgtcgattcagccgagttgagttcgctctggtgacagggctaaacttgttatctggacctactgagtccaaaattgaagagaagtcgactttggaccgattgatagtcgagtacttcaatggggatccatccatcggcttaggccaactgcgcagcgtctttgagagttgcacagagaaggatgatgcgtacaagttaaagatggtcttattttttatgggtgttctcactgggaaagaggagaagaccctcgttccaccatttattattagaatggctgacgaccttcagttcttctacgagtactcgtaggggaagatttcttttaacttgttaagagtaacttggagtagagacttcgtagaaaagaagaagcatataaataggatgatttaaaaggaaattacttagaaggagctgaagtactcggcctatggatatactgtagcgttgcattattggacttacgagtccatcttggagcttggtgagaaatttgcgatcagaaaatcacatcgctttcccagaatggtcaactgggagagtaaggacgtggcacttggcaaggaggaagtcattaatttgtttgcaaaaacgtaagttttttaattttttatgtttagtcacatttatttctttatttcattttgatctcagtgtaataatagttttgttcttatttggagttgacaatgtactccattttatatccatgatccaatgaacaagagttttttaggaacgtcactggaggtgaggcgcctctatttgtggatttagaagaactggtgttgggtagtgatggataacctactcgggacagtttgcgtaaccagaccgagaagcttgaacaaacattggaagagcgggtggacgcaccctgaatcttcagagaggatacaccaccaccagagacccattctgttcccacatcaaaatttattccctcgtcaacatccatgcccccgtcaacatctattcccagcaccacagttcattaacgcttttggtttttgaagactttttttatcttttttatttaatctctgacatagtttatttttatgttttaaaatttagatgcggcattttacttgatgaggaggaggaaacaacacttttttccaaagaaggtgtacccaaatacgtgtgtggtcacctaccattttttcattagaagttattgctcgatgggaagctgcgggtaacgaccactctgactttgagtgggataatggtatattgaatttgatttgaggggatgatgtctaatacttggagagttagaagaataaggagagaatatgtaacgccctgaccctcagggacgccacntgtgtgcttttacaaacttatttctcgtaatctattagtttagaaaacaaagtgtggtttaattaaaagcttatgattaggttaaaataaaactttcatactaaatgtcataatacggggatcccctgtttataaaattattttacagtaggttacgaaattactattacaaaaataaggttatatttccaaacatagataaaaaaaaataggttgatcctgcttcccagaagccaagacaccacggctgatatgtacattgctggaagacctctggctcatggctgaacataacttttaacctttttacatgcaccatgaagcactcgtgagtcacaatgactcagcaagaaaagttattaaatcaaaagcaataaaaacgcaagtattcttatcataacataacatacatactcgtgattcattatatattcagcctgcatatatagtataacgtctatacaaaccgtatattacacaatataaaaatatcatagcatcttgccgtgaatagctttatcattacactaatcaaatattgattcaatacactatcacatattttcagtgccttgtaaagcactctaaatttacatccctataaacacatattcttacatctcgtgaatcactgtggctctgcaagaaaagaaactaatttcttaagcaatataaaattcattcagtcacattataacaaagatgtatccgattacaactcatcacataataacatgcttaattcatttcacaacttcgtaatcacacaatcctagtactttataaagtacccttaccacttgttaaccacgagctacatatgtcactattgttgcccgatatagcaaacgataattaagaaacctatttgcggtttcaagaataattactcataacggtaatgaccgttaccaatcctcacccctcgttatccacaagctgtgtatgtcactatcgttgcccgataaagtaaacgataagtaagaaacctatccacggtttcaagagtaattactcataacggtaatgactgtatcttaattcattcacaacaacggtgataactgtgttcttccctcattcataaacaattcacaaacgacaataattgtttctcatcattacctcaattaccatcaagtcataacaaatacatattattaatctcgatcaaggttaagtcacaacaaatacatatcgtgatctcgatcataatcgagaccataacaatcatatcattaactataaacagtgcttaatacttttcttacctcaagtccaaagtcaagtatatgggccgacatgaatggaacgatgctcgacaatttcgagtcctatgtcacgataaaggtaaatcaataagggtctattccaaaacactgtctaaaacctgcataaaataacctagagttttctaccaaatcttatggtaaaaacaccctaaaataaaatatatcttttggatctaatctgtgtctcatactgtagagctcttcataagcttcgaaacggtatatagaatgtctaaaacagacaccctgagtgaaaagttatggctaaaatacaaaaatcggggattcctagaaaattgatcatccgaaattccggttggtgcagccctgtaccatccggaattctggttcaccacactagaaactcaaaaatttcaaatcttaaaagtcccaaaacttgctccaaacctaaccaattgttcccaaacttcacagaacagttttataacacgaatacaacatgtttaaagcattcaaacacaacaattcatcaatttaatcaatatagcatagtcaagtacaatttacgcttataaatcctaaattcctctaactcaaccctaactgagctgattctaaccaagttgatcttaaacaaactctaactcaagcatagaaacttattctaacttcagtttaacaccccaatctcgaaatcaccaaaaccctaacttatatctaacttgaaacttgaataaactaggagaaaagggtgaaaaa

SEQ ID NO: 17136 - DNA, 3310 bp, Cannabis sativa
aaaaaatatattttttataaatattatacgccaagagagaatatggacatgtaaatatatccatttttggcaaaagttacttttgaaaaaaacaaagagtagtggctgtgtcagctgatataagcatgcctagaacctcataaaaatataaataaatagtaaaaataacctaaaaataaaataaaactaaactaaagctatagctttccctttatgtatgtgctctctgcagcaaagtctttactgtgctacagaccgctgtaattccacaacatacagatctcacagcccacaaagattttcatttttcatacatatatataccactcctataaaaataaaaagacatgaacatatgtacttatataatgttcgatcatcttaattaaactaataaaaccaccactaattaagtagtacatatttttcacctcaaaaaatatctagtgtttactattttcttatacactttgttatgtttgccccacgcacgtgatccatcatattatactatcatctccttcccaatggcaattttgtaatattatctaaattgtcggccaaatgttatatattgaagagaataaaacgttgtcactttacctgttataaactaataatttgttttttttaagctaatttcaaaagcaccactttgtaacttttggaagtaaaaaaaaaaaaggacatcacaccaaatacttgtatataaaaaggccaaagagaaacaaacctcaaaacaaaaccttcatttccaaaaaaacaaaaaaatatgctacttcaaactacagcaatggcgaacaatgaatcagactacgacagtagctgttcctccatcaccattccagactcaagccggagctggatgagcagcagcctgagcttcagcagccggagacagagctcagtctcagtgagctcttcagccgctgagtcatccacaacagtcagctcatcctcccagaagccacacaaggcaaaccaagcggcgtgggaagctatgagtcagcttcggctgagcacgagaggtgggcgagtgggcttggaccagttccgacttttgcgccggctggggagtggggatataggtaatgtttacctctgccagataagaaacggcgtcgttgggtcatctgggacgacgaagacgacgatgtcttcgtttcctgatcagtgcttttatgccatgaaagttgtggatagagaagctttggcgattaggaagaagctacagagagctgaaatggagaaagagattctggggatgcttgaccacccctttttgcccactctttacgctgactttgatgcttctcattactcttgcttggttatggagttttgtcctggtggtgacttgtactccgctcgtcaacgccaacctggcaaacgattctctatttcttctgccaagtaagtctagtacagctagttatttagaatttttatatggtaaattgttgtaataaataatattagaaatcagtatataaccatattggtaattaagatatatactgtatatatcatacctccttatctgtgactcaaatagcgacactcaattatttaggtttttgtcagttttatgaataaaaatttctttgtcaaaaaataataatgcaacagtttttttttccctcatgttaataagaggaaaaacataatttaaacccacttacacttatatatatccagccctactatataagttaagtatatactttaaattacataaaataattattgtttggaagattagttgatgctttaaacaaggcgtgataaaagtaaatcattatattttgtttagtatttttatttattagttttgttaatatgcatgatattataaatagtccgtcccacaaaataagtccttagctataatactaacagtgagcataaacgaaagatgtcattttttaattagtcataattaattattgcatttaaagggaatgtttggcactaataatttaatcatgatgtgtgttcgtgtggggtacgttcagattttatggtgcggaaacgatcttagcactagagtatctccacatgatggggatagtttacagagatttgaagccagaaaacgttctagttagagaagacggccatatcatgctctctgatttcgatctctcactcaaatgcgacgtcgttccgaagctcctaaggcgtagtaataataataataacaaaacgatgacgtcagatatcgaaacaaacgacgacggaaagtacgaaaggagttgctcaacgacaccgtcttgtgctcttcccatgcagcctgttctctcgtgtttctcagtcgcaaaaaggaaaaagaaaacaacggtcgttacaacgataactgaaagagccgacggtcacgatccccatcacgaacaagaagatcaattagtacacgtggacgatccagaactggttgcggaacccattcacgcaaaatcaaagtccttcgtgggaacacacgaatatttggcccctgaagtgatatctggtcaagggcatgggagtcctgtagactggtggacactcggagtgttcctctacgaaatgttgtacggaagaacaccgtttaaaggagaaaacaatgagaagactctggtcaacattcttaaacagccgttgacttttccgagaactggggttagtagtgccaaagagtatgaagagttggttagggttcaagatcttataagcaagcttttggtgaagaatcccaagaagagacttgggagtttgaagggttctgttgagattaagagacatgagttctttaagggtgtgaattgggctttgattaggtctgttaggccaccggaggttccaagagatttgatcaagaaaaagaataattctatgaggaaagctcataatagtaattatttaccaaagttaatgagcaagaaagagagggaggaaccgtatcagatcccacatcaccatcatcatcatcatcatcatgttgattacttctaataatatataatttagctttttttttataaaagaaaattatattgtacataggtgaaaacagatgaagaaaaaaaatgaaagaaatattaattaagagacgtttgttaattttctaatctgtttttcctcgaaacgagaaacataattattattgctatggataatgtaagatgaacaagctagtcattatgttttgtgaattatatattgacatctaattattaattaagttctttttaataattatgtgtgtatgtatgtatgtttatatcgatatcatggtgtgtatgtatgtatatatgtttatatcgatatcatggtt

SEQ ID NO: 17137 - DNA, 6920 bp, Cannabis sativa
caggctatgtatcagcaactcagattggagccctatgctgtgcatacaacatttcagtatgcgggcacagatggaaagcgtcatagactacgtgaaggcatggtcttctatgatccgcctgaatattttgatacaccaggtgcaactctcctacacttgcatcaaatatctgtcttctgtatagtttaggatgtataattcaagctttctagttcattttatcatcatatgcaacccttttagaagtaataagctatatacttgttgggggtcatatatgttaatacatatgattagatatttaagttttgaaattaaagatacaaagaaacattctgctgattgactggttttcgatttatgcaggaggtttcttgtcatttaagccatctattcctaagagcttattgcttgatggggagcatactattgaatcacacttcactcttgttaattaccaagtatgcatctcctaaattgctcccactaacctctgcaatttgttgtatacatgaataacatttttcaatatgcatggaataaacaattcagatgaaacaaataaggacagctcttgcaattgcttctcttttgaatcgcacactggtgagtacactttactgatatgttctagtccaaattcattctcgtttgaatcaagtttctcacttagctcgtctacttttgaaaggcttgttttttcatctattttattgttaagcacaatattggttagttcatattcacccatgtagagtttgagtctagtttctttctttgcttccattgagtttctgattcaacttaagccaatttccaaataactgtagttcctatccatctcaaagtgaagcacaatattgattagtttacatgcatcataatgtagctatagcatatgatcttcatgtttctgcattatgataaaaccgagattttcatatttgtgcggttcttatatttcaaaactgtgaagagtaagattatgatgtttctgttgatgttttttcaggtgatgcctccattatggtgcaggctggataggctttggttttcacaccctggagttttggagggctccatgactaggcaaccttttatttgtcctctagaccatgtctttgaggtatggtgataataaacaaacactcaacttcttgcttgtgttttcgaagctttcatgtatttcctttgcttgcttgtgtttttttgaagataaatgtaatgctcaaagaactaccagaggaattcggtcccgggatagacattagagagtactctttctttgagaacccatcattgcctaaacaggttggtcattggtcattgtgaattgaataccttcatgttgtttctttctcctagtatgaccattttgatttgaacttaaacatttttataggtaaaagattcatggcttgatgttcaactttgtgaagaaggaagtcaaggttgtgcattgaatcaaacaagccgaccgggtgtactcaaacttccaaaacgaaccaacgaagaaacggtactacattcttaattcaatacacctaaaacttgaattttcatgttctcactactcattatatggtataaatacagctgcagacggcattatcgctattcaaggatgtgaaagttattcaattttcgacaatgcaagatgcgttcgctggttttacagatcagacgagggaagagaaattcagaagacgtgtgaagagatatgttgggatatggtgttgtgtgatggatcatacaccaggtcacatatattatgacatttattgggatggaaagcctggatggaagccaattccacctcaaacacctcaggatgatcatccacctacctaacctcacttagactcattcccattcccattctttagtttttgatatttataattaataatagcacagaaaatatgagcacaaggtttttggttggttggttataatagactttagttgctctcaaagtccaaatcagagggtgtgtttgtacatgtaaaacagcagagttcccccattattcctaccctttatttcacaaactaactaaacttatttgatgaggccactctttttgttgtaacgctattttgtttttactccaataaaatatacaaggccaatatgcttaatgggtcagttttctgatgattgttagcattgtatagagatgtcaaataggaccattttctagtgtttagctaaacttgttcattacgaagagtgggttttactcatttgggggtgaagattgaaaaacacatacaaagatacatttgttgaaacttaatattcatatggaaagatttacttacatgtttgatttattatatctagcctttcttatcttgtgggctacaatgtaaatcattcaaaacatcactaggggtttgtttcacaattattgacaaaattaaccaataatttatataaaaatttaagagtaatatctgcaaaacaagtcaactacccaataaaaattaaccctaaaattacagtaaaattgaaatgaaaatggaagctctgagttcatgttgttcctctattcaaggaggctcgatggtaaagcaaattgaagtataaaacaattgattcgcctattgtcatatcaaaactggagaagtgcaagcaagcaagcaagtacttgcagccgaaacttataactaaattgcgaggcgtccacacatgctcatttcgagagcaaaacagaaacaacttcatcagggtcttttctcctcaattgtcaaacgtatttgatcggaacacgatggataagatcccacacgatcaggctcataatatcactatcttgttgaataagcaaagcaactgcagaaccactcccaccccaaaacaagtcaccaaacaaggagatggcccttaaatattcttagaggaaaaatgataagtgaataattaattatacacacccgtcccaagagtatcttctagtcatccaagtaatagtaggacccggcatgcttctgctctctatccttagttgagtccagcttgttgattcttgggcggaaattggttgggtcgcgtctaaatgtgatatccagatgctacaagaatcaaacatataactttagcaataagttcgatccttcccaaaaagagaggaatcaaagaaataaagttggaaaagaaatcttacagataagaatagattcatcccagtcaacaatgattggggagcattagcagtacagtcaatcgaaggattcccctcgtacacaatgactctatctgccagataagttgccataatgaaatcatgctcaaccacaaaagcagttttcttcgcatggaggataaacctctttatgacctttgaagcaacaatacgctgctcagaatcaagataagcactgggttcatcgattagataaatgtcagctggctgcatcaatccaagaaaaacttgcattagataatgtcaaaagcattataaacccttcgaaacgattcatgactattttcccattagtgtgctaatgagcacaaaaataaacttactatacttcaagatgaaaaagcataaatgaagaatggcacatattgaagcaacaaatgaaggcttccaagatcattaacatgccgaggttatgtttctactctcgcaggttttagatgtatactttatagatgattccaaatgtgacaacatgctcttaatgggtttaaaattcaaactctgaaaattctaaggcattagtttatcaaacagaacacaaactaattcctcaggctagccacaccataattaactacaagatacattttcttcaaagaattgatggatttggttagggctgcagtcctaaaattgaccctaagctacttcactgtacttgtgagatgaaatagagtgtgcaaaaattataaattataatacacctagcatcatggtaatataatggaatttcaacaattacctttccaaggcatagacaaagtgcaactctctgaagctctcctccagaaagatttacaacttcttgatccatcaattgttctataagaagaggtttcatcacatctgacataaattggggatgagtgtacgaatcacgtatcttttgatgtagcaggtgcctgacagtagactgaaacttcggactgattttctggggcttgtaagaaacattaaactcaggtatctccacatcagtatctccaataacatcaggcttcaacaaaccagcctgcagattgaaacagtgtatcacaatttgaaataatgaaacagaaaatatttatttgaaagcttaaaaacatctccaatgaacacaagcaagcaataagaaaaagaaagaataccagcatacgaataaatgttgtctttcctgtaccattctctcccaacatcacaacaatctgagaatcagtaaattcaccctccattacatgaagtctgaaattgccctgagttttagtcatggttgggtatttgtatcgtgcatatgtttcaatttcttcagcactctcctgtggagtctcagcaacctagaaaaggaaacgaagttttcaatttaaactgattcagaaaagtacacatccacacaagacacggcttataaatctataccttgaatgtaagagactcatctcggaaacgaagattttctgtaggcacaaatccagccaagaaaatgttgattccttctctgactgagaagggaagagtaacaactccatatgcacccggtttcccgtataaacagcaaatgaagtctgacaagtaatctaagacgctcaggtcgtgctccacaacaattacatagctggaaaaagaaaaaaaagagtttaaagcattgaaaaatacttggacttcgagaaatattttacagcaagaaagaaataaaacctgtcggccctgagcaaggatcggataacttgagctgctttgagtctttgtttcacatcaagataactggaaggttcgtcgaacatatatatctcggccctttgtatggcaacaacagcaatagcaaatctctgaagctctccaccagatagatctccaacattacggtctataacctggtttagatcaagatctttgcagagttcggccttcctgtctctctcatctttttgatcaagcacttgacctacgtttccttgaacagctttgggaatgtgatcaacatactgaggctttataatagcctacaaaggttgaaagcaaacatgcacagaaatcatgcttttagaaccaagaatttgaagttagctaacatgacaccttcagattatggagaaaagaaaaccgagatgataattcactacccgagcataaacaaactacacataaagttcaaaataccttcaaattatcttccagtatacgagtaaaataattttgcagctcagaacctcgaaagtaggtcaagatttcctgccaatccggaggattctggaacgaagaacaaaatccaacatacagttagaaaggaaaaagcatatgcaaaactaagagttcatatagtgatagaaaatattacagtgaaacgccccaaattcggtttgagttttccagccaaaactttaagagcagtagacttgccaatgccattagttccaaccaaacctagaacttgacctggccttggaactggtaacctgtaaattaaacacaacgagtatcatttagaatcttaatgcacataaattaatgaagaaaaaaataaaattgatttgctaaaagaaaaaacctgtggagtttaaatgtattagggccataacgatgggttgtatctttgtccaaatccttgggcaagttaataatctgaattgcttcaaatgggcatttctgaattgaaacaaatagcataatatcacatctcaaatctttagagaataaaaaaaacgataagatagaaagaacagtaagtaaaatagtatacacacagaccttaacacatataccacaaccaatgcaaagctcttcagatatgaaagcaattttggatgcggttgtaacctcaatacacaatttgcctgcatacatatatttattgattattgattactgattttgggccatattatcaaaatcatcatcgaacacacaaagacacaattcaattgaaataaattaaattaccagtcttgacgacgggacaacttttcttgcattcctgacgacactttttgggtttgcatctgtccgagcttactatagctatacgcgtcaaccgatccgacatggctctctaatcacataaacaaaaattatatatatatatatataaaaaccagaatacaaaccagaatacagatgaagatgatgagattggatttgagaaatggtacctgaattaaatggagtgagagagcgtgggatctgagacggtggcagtagtaagcaagagacgaagcgtatgggattacagagagaaaccacagcagaatcgataaaggagtaattcaatccaatctagggtttctcttctcttctcttctcttctcttctctggtattttctggttggcacagggcccaatgtcaagatcacttttgggcctttctcttatatatggcccagcccaattactaaaatactatataattaaaattaaaatatgttttatgttgtgggttgtcttaattatgcttcaaaatgtgatatccttgttaatcaagcttggataattacaaactaatgttttcttttagaggaatcaaccattttttttttaatggtttagtttaagttatgtagagtttcttaacttctttactaaagtttagtcggtgttattgggataaatcaccactccctcgtgagaaggatttcactatagagaactcagtgtcaaaatgggtctggcaatattaggtaaaatagggattttctagtatcaaaaaagaccccacaatatttattaaaactgcggtat

SEQ ID NO: 17138 - DNA, 5295 bp, Cannabis sativa
aacataaatgacttctaatcttttattgataacaaatcagattgattagattgaaatgagttttatttagggcataaaatcccaacattaatgagctaatggaaatgaagatgttatcaaagataagcctatcagataaaaaagcactctgattgcaagagatggagtcaagtacagttttcatcctattggctagaacctttgagataatcttataaagagtggagcagaggctaattggtctaaagtcagaaaaagtggaggcattcttcttctttagaatttagaccaaaatagtttctttgacaggggagatatcaaagtgattattaagaacatccaggatggctttgcaaagatcctttcctaaggtatgccaattctttcggtagaagtaggcattcaagccatctgaaccaggggctttatcaccagaaagattaaacaaggcattcttgatttcatctgtggtgaaaggactatctaaggctaaagattgcctaagggaaaggtggttggagacccttgacaagatgttggaggtggaattttgatcctctccttgagtggcaaagagcctggtatataacccaaaaaaatggggtaagacagaaagagtgcctctagcaatggaacaatcctcaagggtgatggttttgtttaagttatttttttcctggccaaggctttatggtgaaagattttggtatttttatcccaagacttgagccaatcagctctagatctttgtttccaatagatctcgttttgtgcaagaggttatcaagggtggattgaagggctttaagagtggattgaagggctttagctctagaaatgtcactctcactaggattattagtttgaagcagtctatctaattcatgttgagtattagagatcctatactttagagaactctgacacatgctccaatttttaatgtcattaatacagtttctttgtttggatgtgaggtcagaaagattggtagtagttctattattattattattataggagtgctaagaagagtgaaccattgtgaagaaatttttatccgtgagccaatggttttaaaaaaaaaaagttgttgcaattcgtaggtcctctaaggtcatcctcaagggtgattttaagggctctatgatcagaacatggaggcaaaaggaaaaaaggactgccaggagttattaaccacacattaatcaatgcgttcaagaaggttaccatgcttcctagtatatttgttgccaatatgtgtgagaggtaacatgttgtgcttgtgcaaaaaagagtgaatgccattcatagcatgaatagggggcctagtggtggtgtttctatcactagcaaaaagatagttattgaaatctccacaaataaaccaaggcaaagtgggagcagcatcaaaaatcctttcaaggagggtccaagtaaattgttaactgagtagggggaattgtagaaaccagttaaatgccattttatatcatcattaatattaataatacagtcgatatgattaagaaaaaaagttaaaatattaacactaataatattattccataaaagtaaaagacctctccctaccgctcttaggaacttcaaaaacattatcaaaacctaatctattcttaacatatattccatggctagaaagaagcttggttcccatcacaaaacacaaaataagttggtgttgcttcaccaatagggagagatttcaaaatgcttgaggactccccaagcctcgagcattccagcttaggagattcattttcctcagtagggttgcatggcaacacctaccatttcatcagggccagagagagttaggacaacaacatcatcattctgagtagctctagcacattcgagcatacttctgatagagtttccaacttgggcattttgtcaagtgaatggccttttaactctagccgtagtagtggtggtgaccatgatgggctcctgtataataatacctctatttagggaccgtgagatagtagaaactagtggaagtggagctttagattgggctatgcccttccctttgtcagtgtgcatgatcacggatatgacaatgatagggtgcggtggaagggtagagaacaccatattcaagcctataggggtggtatgaatttcagaggggacaagtgtgtgttcttggttaaggggtggaaccatgaaatctacacctaggttcagaaactgatcaactgcttgctgtaggacttgatcagagctgcttccacaactcagatactcttcaattggggtagagttggagagatcaaatgggttcttcttaatgagagttctaacaggggcacgaaaggtatccttgtatccgagtttaggagggactgtaaagtgatcacatctcataacgtatcttctacaattgttgtaagggtggtcaagcataccacaaacccttatacttaaaataaagccatttagtagttttagaaatcttacgaaaaaaaacggatgttcataccacgcctaaggcgcttggtgacatcaagtaggaatcttatcctgagataaggtccaaaactttcaaacaaagaaagagggtagacttctatgagatctcccagctcatcagcaacaaactgggctagttggggtatttttggccaaaagtgagtgttatgagcttggatccaaaaaggaacaaaacgaaactgatcaggtgttagagtgttgaggcccccagggttggcaaagatcatgaggcatttatcaaaatgtcagggttgatcttcaaggacccgtcgacaatctccttcacactgaaaggtagctaagaataggcccgaatgatactccgaaatgatgactgaaaaacggagggtccaggcttcacgcatcgctttttcaatccagttgggttttggagatttggaggtaataattttaaagacaaggcagtgagagtctgtagtagtataagagttgagggagacatggtcaaaaacgtggatgagattttcttcatctgtaaggttgagagtgtttaaggggttctgggaggaggaggatgccatagtcgtaggttggaagcttagatagatgactgtggaaaatggtttaatgcgagagacagaaagtcagacctttaaatagcaaaaatacagagataagaaaagatacctggagatgaaaggcctcttgaagagtgagaaaatcctaggttcgctcagatctcccctaaattaggctggccatcatttgggtggcaatgattgccatctgaaacctcaaagaactaaaaatgacggtaggagactctggtgaaatgggtggatggagtatttaccataggttccctgaacccaaattaattgcgacaaagcatgtgccgtcaaaattaattgcaaggttgagagagtaattaaggcgagaagagattggattttcagaatcaagagtataatcatcatggcagagggaagagagagatcaactggcagttacaagcaataattgcaaagaaaggaaagaaaaagaggaaggtggagagacctagaaacctagaacaagcttggtggaaatttcacgaagaagaaaatttcctaaatgttaatctagttaagttaagagtacagataaaaaataaatgtataaatagcaatctaatgataaattatgagaatatgtatgtatatttttagagctaatatttatatatttaatgtcaataaattgaattttagatagcttaatgttgttaaataagctcttgcactgcaaatatatataactcatagtcacataaaaaaatttagcttaaaaaatgaacggaatgtaactagagatagatatttacaacacttgtataatttggggagaatttttaaaacaaaaaaaaatgaaaagataaaactctaccaagattatagttcggtggttaaaatctaatttatactttccttttattatctctatcaatattttcatttattaaaaaaatatttatctaagaaaatacatatatatttatatttatattattaatttatttttatcggttatttttttagttattaatagtagacttgctttttaattgtcaatgaaaaagttcttcatttaaggatattacaagtttgtttgtcaaattttccaagtgtaatcttaatttatgatttttttattcatgacttagttatgaatgttcttaagcatgaagaatttgtatagttaaattaaattattttttaatcttaaagtaattttgaatcattaaataaataaattacatatactaatataaatgtatcaatatatcactccttaaataagattaggataaagatgaggatattaactcaataaactaaataaaataagttttgttaaaattaaaattaattaaaaatttctgagatgcattatttaaaataagtttattaatgcaaccttttcatatttcggcatctaaatagttatattaatttgtattttttttatatgacaaagtaaattgttgatacttgagtcttgtaaagtcttaaataatttaatataatttattatattaaaaataaaatttaaataatttattggactcgtgtctattttatttaaatgcacgtatagactatttgaaaatctattttgtatactttaattatactaattttttttttaaaaaattatagaatatcttaataactacaataaatactatcatataacaaataattcaataaaaactataataaattgatttcttttactatttccatattttttttaaaaaaaaaatctaaaatttttattttcccaccctaatccaattttcaaagatagtctatgtttggtaagaagagggagagtaggatggatggagagtttagaaatgatggcaggaaagaatgatggacctggccaactcgcctggacctgactcgactaacctaaaaattaaaagaaacacgttcattgcaggcaagtcgggttcagctttggaactttcgagcgaattttggatttgattttttgggtgaccggatttcaagttggacccagacccgctcctgaacctaatttttatatatatatatatatatgttcttacctaaactttaataatacaagtttacattgtacatatatacatttgacctcaaaaataataatattaattattcttaaaaaaagttacataatacaaaatatattatatgaccatatactatttctatatattaaaagtttatgtgtatatattttattaaatttaatagtttagttatatgtttgtatataatt

SEQ ID NO: 17139 - DNA, 5657 bp, Cannabis sativa
tctttcttactaaaatcggttggtgcaatttcccaggccaacctaggattagacagtgaatatattggaaatggttctctaccttcctacttaacatgaaatctttgtactgaatgttctatcataataaaagcttcagattttttcaaaaaaaaatgtcttgtgtagcatagtgacctccgaaatttgagttttggtgaacaaaacatcaaattcaagatatttttcaattgtagtacatatttttcaatgaaatctttacaagaattcaatcaaagtcaacaatatctcattcacatcaagtggacatctcatttggtgaccaattcaatatgagaatccaaaactaacataacaactctcattttagagacacaataggaatatgagatctaattgacctattcatttccatataacaaggacaatcttttttacactaattgataacataagctaaatttggttctccttataatgttatttactatttcttaagatcatatacactctaagctataggtacatttgtacagacaagaagatggctttcctattaagacatcacagttcaaagatatgtctcccataagatatgtgatgcttgtctctctggcatcatcaaacatcattttcccaattacagcttttgttccactaatacattctttttttctttctttctttcttttataacttctaaatatatgatctgtgtttttcaccatattattgttcctgtgtctcattcacatgtagaccatattaaaaaggcccacctcttataattaggttcttgaaaatctaatacacaatggattggttcctctcaaatgtaatgcaagaagggatctttcttagtctacttctatagttttgccaaaaacccacttgcctttttttttttttttcaatttcgaaccacacaattggcccatttaaatagaaatttagttttacttaaaaagaagtatcagaattctatctggaaaactcaaaactttgcttgtaaaatttatgtttgtgctcaatactctcataattgtgcttaaaactacaccaaaagatggttttttttttttcttttcttatttttgaacaagcaccaaaaaaaaaatgtcttctctacatgtaaagttgtaaaccatatttaaagctcttctaactagaatattgaaaatctaattgacattggattggtttctctcaattttaatgctagagaggacctatcttagtcttcttctgaatttttgccaaagacccatttagcccttttttttccctttacactcgaccaaattgaatatagaaaaaattgaccatgactcatttttagttttacagttttacttcaaaaaaaatatgggaaattctatcttaaaaataaataaataaatatagctttgcttgtaaataatgcttgtgctcaacactctcataaatatgtgctttaaaaccacaccaaaagattccttgtctacaaggggagcagagggcatgtttttgttcttctagtgatgcccaacttagcagccttggctaagcttggcccactccaaaaaacaaaagaaggtccctctcatggccgtacaatcaatattgggttgcgtgtgatgctttgacaaaaagcaaaagtgcccatgattcataaaataaaaaacttaaggaaaaaaaaaaacatcaaagcaaatgttttaataaataaaaacccaaaagagagaagcaaaataataatgatagtaaaggaaaggaaggggagaaacaaaaaataattgaggaaaaaagagtgaaagggacaaaaagggtgtgggagtgggaccaaagcatggagtattggaagaaagaaaatatatgtgtttgtgtatatatataaatgtggatacacattcatatgatcataaagcatttacacatggaagccaaaccaaaccccactatagggcaaatgatttctcatcatcaaaatacaacacccctcacccctgtttttgtcatatgcccactaaaggtcaactttcatcagataccataatacttacctattcatttcatatatacctctacactacttttattaattattaaataaaattactcttttttgggccagtccaagacataatatcccaacaatatccatagttcaagccatttatataagatatatccatatttttattatttctacttttatgagataattagagcttgagtgttccaaaatctgtaggtaagtcttaaggtatggatacatcacctatatcatcacataaatataagctaatttatagatatagagatatatctgtttcgtgacaatttttttggaacaatgaaacatgacaatatactgaatttgtttatttatcaattggatattctactgagatagcaaaccaatcatttttctcattgcttgaatatgaagaagattgattttggtttgaacagctcaaaagaatacacttttttttttttttttctctctttatttcattctatatagaattattttatatatacatatcacgattaggcagtagtagaagtacaaggacaggtttgcatacatgtactttaatccaagtgtccaaaataaatacacttccaaatctaattattaatattagaatttcttttcttccttaattccattataataaggactttgcattcttaaatttggttaagagattctttaaccatgtggggttagaaatttttaataatggaggaagatactaagttctttagaaaaatatacatttaaaaggttatacataaaataaatatttttttatcattattttaattaagcttcgtttaagggtaggtttgctaccgttaaggatacctgttttagcaaaaagagaaggttttttctttgataatttccagtcagattcccactccactaattgagaaattttattaatatacatatatatgtatataatacttaagaataatatccactttaaatcaaaagcctaacttggaggagagtgggaaatttccacaaatatatttgaacttaaaaaaatgtacaccaattttgttgtattattagtcattttggactattgctgccactgttgccaaccagttagattatgtatataagcaagaaagaaaaagggttcataaattgaaaataatcaaatgcaaaatgcaaatgctgacaaattaaatggaaatgagttggtaataatgtggatcctttgtcatatatataaaatgtatgtattgatatatatttttacactttatgcattattagattagataggtgggctgttgaagatggaaattttatttcttaataagatttttaggatcttatttcttttttaatgtactattttcatgtactttctatgtgagtatggtgggtcttccttaaggcaattaggcatgggttgcagcctggattattatttttcattttaaagaatttcaattaatattgtttgtttcactttcattaaaccttcaaagaaaattcttaatgaaaaaaagtatagggggatagagagagagagatctataaacatgtgtacatgataaagatacttaaccctttaaatgtgaattatggttctttcttttaatgaaaaagaaaatgtgcattatgattattaggatattaatttttagtaggttaagtttttttctttgccaaaaatgccatttcattgatttttacccaaatgtggatttatttatatttctttatctagagaagcaaataaaagttattgatttaaggttaattagaatttttgtttttaatatgtaccaaatcatcttcaaaatattttaagttattaaaaattattcccgaattattgagattgttagattcaagaattttcaacaaattttgttcaatttaactaacacaatgattatctatttattaaattgtacccctcgaactttaatatctatcaaagtctcttaaactataacatgtaccgaattgtgctcattgaactttcatccacctcaagtttttgttagtaaaattgtttaaaatccaataatattaataatttagaaaaaaaaaatttaacgatcctgaaaagttcaaaaaaatataatttagtacaagttaaaattcaaaaaataaaaatcctaaataactttatttaaagtttgataagaaaatttcgttttccaaccaaatttaaaatatatatttatatagaaagtttgatagatatatgcacaaatatataattatattaacaatctatgtaactgagattaaataatataaaaaaatatgatagtgggacaagtaggtagcatcaagaagatgcatatttagtgctgatggcatttgacaaccacctaaatgtattttattagttatgtttcttcataaccaatggcaacccaaaagttgtattgtattcaataaggcattaatttacttccctttttggggtctaaaaaaagaggtaaagtttcatggacacacatcatttgaggtatcaaaactaattccacaagttttatcctacaattttttcatatttatatagataaagaaactgaccctttgttctccctaagaaaaactttcaagagcaaattgagaaacagaattggtagaaagaaattttgatcttgttccatttccttttttaacttttcaaagttaaattttctatgcaaaatccaagctatgttctaaaagtactactttgaaaagggcttcatgtacaattttaacccccacaaaataatgataataataataaataaataaaaatctttctctaccttttatttttggtgggggtttaagaatgcttgactcaggtaataattctacaagtgacatataaaagtggttccattttctatctcacaatttttatttttcattcttttaactttattctttcttctcaaacagctgtgttagatgccttcctagtcttattggctgtcattattccataatatattttgctacaaatccatatctgattgataagattttccacttacttcatttcataattttgtagcttattgttgtttttatacaaggaaaaaaaaggttaagattgaatgattagaaagccaaaagttgcctctatttaaaaacaggaaaatgtgttgaataagttaccaatagtaataaaataaagtttaagtctttatatagctaagttggaagtatattgaataactctagctctagctagtagctaattatagtaatagtaagaattgttaaaaacctaaatatccctaaaactggtttgttttgcgggcactaatcaatatatttattatattatataagaaaatagtagcagcaaacacaagatttattgtatgtttggttagtggttgttggaatatgataaacaattaaatctattcatagtttatcttttttcaaccaagtaaaagagaacagaagtaagcatagaacttttagtttcaaattcatgttttcacatttgtgatactacatatgagaactttttaagcaacctttttccaactaaaaatatgcaaactagttcatattgagaaaaaagtgttatgaaatattctaattgtttttaacttcatagttggctcggatccccttttgtcaaagttagatacaattttttttttttaaaaaa

SEQ ID NO: 17140 - DNA, 4402 bp, Cannabis sativa
aaaaaaaaaaaaaaactaaagaccgtattaagcaaacaaacttggtattgatatatttgaacaggattcacgtactaaacatttaagttcatatttacaaagcttgtctatataaaaatatgcagcaaaacaaccaaaactataatatatataataaagaaaagtataatatgtatgactatgaaaaattaaaggctctgtaagcgtgaaaaattatgatacagatatggccacatgaactactagtagtactagctctcttaataaagaagaaaaaaatcacctccatcttgatctctctgcaccgggatcacctatctcagaatgctcgggtagataagatacaaaactatattgaataaatctacacgtgtgggagtggatttttatctctagctgcacgtggttcctgtaagcagttcatcaaatcagataactaaacgtgtgtattaaagtgaggaagggaaaatacgtaaaaaaatcatagtattaaaatgcattcttgcaataatatcaaatatttctacatggtatctaaagcaaactggcataatttaaaaaaaaaaaaaaatggctccttagtaaaacattggttaccgagcgaaaagggaagtcatctccttcaagcatatgaacaatttggcccattttcggtcgcttttggacatctaagtctatacagcgcaggcaaacaagcaaagcccgtttcagaatccttggaggaggctgtacttcaatcaaaggatcaacaacctcctcaccacgacgatttgcaaccattcctttaaaccaatcaaccaagttcatctgaaattcaagaattaaacagtcatcataaaactgaatatcccctagatgcttgaaatattgaagaggatacttgatttcacctccccagctggtttggaataatcaattgggcttcttcctgtaattatctccatgagtagaactccaaaactatatacatcacttccctcatttagcataccagtgcttgcatactctggggagacatatctgcagaaccacgataaaattagacaacagagtagagtagatacctagtcaaactcccttcaaacctgaataacttagaattatcaaaactagcttcggcagtacgaagtaaggacgaacccaaatgttcccataactcgtgtagtcacataggttgactcgggccctagtagcttggccaatccaaaatctgaaactttagcgttccactttctgtccagaagaatattacttgatttaatatcacggtgcactactttgggctctaatccttcatgcaaataggccagcctggaaccagaagtaaaaaaaaaatcatgaaagacccaaggaaatataaacccaaaatttaggggaaccaatgcagaacattattttatttgtagtctaaatttatttagtttttcactaattagccatatgcaagtagataatatcaatagtagaattcacattgaccaatcaggaatgcagtgagatgaataaatttcccgtcaaaagaacacgaagatgaaaattcttttataccctttagctgtcccaatagctatctttattcgaatatcccaagtcaaagggctaacaggcccaacatcaccatgtaaccactgctccaaattcccattgtcaatatattcatacacaagcatcctgaatagccaaaagaaatgtttagacaacattataaagagaaaaaacaatcttaatataaatttataaagacaaatacacagggagggagactggatttacttttgagggccgtctgcacaacaacctactaaacccaccaagttcttatgcctaactttcccaatggcttcgacttcaaccctgaactccttctctgcctgacccctgtacgagtaagataattagactagttaagttaacgcattgtaacataagtagcattaaattatttgaacaatgtcatgatgtacgacaaagtaaaacagttgtgtttcatagaatttgtttaatatcagacatacatccaaaaccttgattattattagcagcgttccccttacttttattatattctcttctctaccatataactttttaaaatcttgttaatgcatataagaataaagattattatttctcaaaataaatatatataaacattgttaactctagtatttggaacatgggaaatgaaataaacaaatacaaagataaactacatagcaaacaagcaaaataataaatacagaagttaattaaagttaataaagcagaaagtgaccatccagccctttttctttttctctttttcaacaacatttctttttcttagtcgaagaccgcaatgaccggaaaagacgaagagaatctttccccagattcttaaaaaaaacgaaacgaagaatatattaaaaacaagacagacaattaggctgttaccgacacaaattatgcgatcccagatcaatataaaattttacaaagaaaacgaatgagtctaataagcaagtaaaaaacaacagaacgcgccagtaattagacagcgattttccgttttatcttatcctctggtcaaccaacgctctgcttatgtcgctagaaattatttcaattgtgaactttctcgagaaaattaaagatgaacaacagatacgagccaactcatagaaaaagattttttttttttttttgaaaacaaaaaataattaagatatggaaatttcacgtacttgttgttaagaaggttctttacggctaccacagacccatcctgcaaaacgcctctgtacacaatcccgtatcctccttcaccaatcacattctcttcggaaaattcacgagtcgcaatctctagctccttcaagctgtaccaccggccccaacctatgttttgcgattccaccgctgacttgtcgctgcggctcccgccggaagtatcgctcccttcgctgacttttcccctttcaacgacatcaaccctaatctctccagcgctacccttctcctcctttaattccaaactcccaatttcggaccctgccttcacaaaatgatccaactttttgttgaccgttccattggaagctttgatctctacgatctccttcgacacgagaggaatggatccggaactgtgcttcacgcgcattctgcgtttacgggaacttcgattcgtacggatacagtacaagatcataagtactagagcggcgaaaacgcaaagggacagaattgcgatcaccacgtagagcttcaaactgagaaatggcgtcttggagttgagtttttgagtgataaaattcccagaagcttcagcgtcgccggaattgcttccggaaaccggcattgtcaccggcgaggattcaaaagagtgagaaaagttagtagagaatattttctcgggaaaatgagggagatgggacctcaggagagtaaaataaagagagacgttagaactggtagcattgtctgatagagatggatgagagagattgtgattgctgtttcaacggatacagagtgaagaaaaggaagcttaggagcggagcgacgacttatagttatttgggtttgtcttgttaaattattaccataatgccattatgcttttatttattttaaaataattagcattttccaatttttttctataataaactaaaaagtgcatcattttatatttataccaagtaaaaataaacacaaatagaaaacaaaaatttctatttacaaaaatactggcctaacaaaaaaaaaaacggaggaagctcctccttcgtgagccagccgaaacacctcaatccaccaaatcaactcaaaccaagatgtagatctcaaagaaaaagtaatcatatctcaaaaaatctaaatacaaaaagggaatacaagaaaaaaaataggggatatattgacatccattggtgtaaaaaaaaaatgcaaaaacaacctacaaataaaaatttctaaatgatcctcttcgtaatttttattcttcataattgaaaatatgttttaaaatgagaaaatcagccaaataattaatgatataggaatttagtagatatgaacaaataatcaataagggattacagctaaaaaaatactaatacatataattagaaactacaggttttttatctggaaacagttgtatgtatgttgttttctaggaatataattgttgtttgggtataattgatcaagaattattgaatttaatcttattaaagattgtatacttcaaaatagttgtttaatagttgatttgacagataaaaataaccgtttagattaaaatgttatttgcaactattgacactaaaaacaattgtttattagttttttttcattagattgaaatagttatttgcaacttctgaaactgaaaaaataataaatatacaaattt

SEQ ID NO: 17141 - DNA, 6689 bp, Cannabis sativa
atgacacaaattttgtttagctaaaatcatctactcttaaagtaatataaactctaaaatgaacatagagtttagaagtggaattattgtatgtgtttggttatctaaatatatttaacaccataacattacaaatcacataattttcttaattattgattatttggccagttttatgcaaatcatatttataaaagtagaaattatacctataaaaaattattacaacatgatctctatcgtagtttttttgttagtttgttgttcaattttttttgaagcaattctaattcacgttcattatattatagttataaattaattagcaatttaggctgtacaactaactaggttggatgaattttttctcatttttcctttatgatgtattgttagcttattattatcgaacctagacattctacgtaatgggatgaaagttaagaaaaatatctagaaaacgtaaatgcaaatattaacattaaagtgagagcataaatacaaaaacttacataacacaatatacattatcgacatacatataatatatttttttcataataaaaaaaaaaaaaatcaagcagggttgtatagcacataaactaacttcaaagaaatattaaaggacacttatagtgctaacacttttgtgaaatgtaatatcactaatttattgagattataaaaaatcgctaactaattatagggtcacctcataataatgcttgttaggcatcttaactttatggataaaattaacttgtaattatatgaatttaaaatgagtaaatgcaaaaatcatatatcttccacacataaacagtttcaatgagcaaaactcttgttcttgtaaacaaattttttattatatgatgttggtatatgtaactctaaaataaaatacaagaaccaaggataatattacgtaatatatattaatcctcaaattttataaaatgaaaacttcattgagaatattgaaatggaaaaaataaagtaaacatattgattatacgattcaaaaaatgagtaggtaactaactgagtctgtgattggtacaacaatcaataataatacaaatacttttatgtaacacattttggtaaaaatagttcaatggtttacaatggcaaattggagtctttcttgagactccactccacaccactccatttctcagttttgtaatctgttaatggcttgttatcggtatagattttcgtcttaacttgtctttgatctcttccacacaataaccgtgccgtaaaaatcagacgaagccaataagtttgctccatgattccaggcaacatccataaccggaaacctatgaccctgcaagtttcatatgtttcggtcagttgacagagacacaaaatcaactaagattagctttatcgaaaccttataaggaaataagactggacctgtagcttgtttacacatgtatgcttcggtcgggttagatcgtagaagtatacattcgaatcctcacttcccgccactaagtaaagaaaacaacaaagagaatcgcaatgtcagttttctatattgattcatacatacattttactttgaaattaacttggggatatacaaaccaatatattctcctttctcgggggaaagtaggggacagaaggaagccctgatgctgtgtactcgcggggttaatttgagagagcaccgaagagtcaaatagcctcgaacttctagagcaatacttcagggaaaaaaaaaagaagaaaaaggaaaaggccattattatcagtgttcgaaagaaagagcaaaagtgacaatttaagttattttgacacttgacagacctgaagaaagataaatttccatcttgagtacatgtcaacaacactggggtacgagccattagagagaaactccggtattgcacagttgtgactgcagattttttcctgctactgtctcggtagcgatgagaacgggataatgctcctgtgtgagagttcatacttacagagtatatagacccctgaaaaagtacaaccagagactgactgtcaacagaggaaaatgaaaatcattcaaatggtaaaataacaggtgaacatgtgtacatggactcaccagcgaatcgccacaaaaaatgagctggccagtgtgatcatgatccatagaggtaactccactatcaaatactgctttactaataatccttccggtactgaaattgaacacctgatacattaacatagaaattgctgtcaaacaaatccactaaatttcacttacataggcaaaatagtataattggcatatttttgatgtagagcattacatgtaaagagaaacaacctactgcaatcaatatatatctgtcgattttatttattttttggaaaatctggctttgtacttttggcatattttccaaaactaagtatttaggtctggttagagtaaataacttaatttactctggtcttcaatatatttatgtttaaatgcaatattgtatcctctgaaatgaaacacttctacaatggaagaaaatgtcggaactcaagcatagaacacttcctaagcctaagagaacttttaaactcaagcaggcattagacatggaattcagccattaccataatttctttgttagcattgccaacagaaaggaaattgttatttacctgcatcaaatttaaaagaaaaaaggaaacgttaatgacacttcaatatatagaaagacagggatccaagaaatgcaacagcaaaaagccttttgctgtttactaatgatgacttaaatataaggtattaccattccattttatgaaaaggggccgcataatgagatcttataggaaaacaaagggacctttgacagaatttcttatgaaaaagaattcaaatttcaccataggagttaatttgaattatgctactgaaacttgtaaagtagaccaggcttgtgtggatgaatcacaagaaattaaacacgtacattacaaatatgatggcttaacataataggaacttagaaaatatttaaagttctaaacaattatacttacagggtgaaaacgaatgcacaattgtgaagaaacaccatatattactctaatacaaagaccttgtgatatctcccatactcgcacagtcttatccaatgatgatgatgcaatatactgattgttcgatgagaaatcgaaatctgaagaatggacaaaaactttaagagaaagctcatgcctgaatgatggaattcagtgtctctgaagcttgtcctaatttaaatttaaccataaaaaagatgcactccaatataagatatcaataaataaataaagaaaacaaaatttagtgataattgtaaaaggagaagaaagacaagatacgttgactgtagatcagttgtaacatatgaaacagtttttcttttttcctttttaatcactgatgttcgcatctacgatattttctccattcttctattctaccattaaccttgtaggacagataacatgttttggtatatgtgtatgttaaccttctctgagaagaaatcaacaataaggttttaatgatgcataaataataagaataaagggtacaaactaaatctagagactttacacataaaatcagtttgatttcattgtagctgctttaatcttatttctccttcatagtgaaattcctcattttatcttcaagttgagacttcaaatttactgtatattttcatttctaatttttcctaatccaaacaccagtttcagaaataggataagatcttatcttcttcatcaattcattcaagggtgtaagcgtagtttgcatttgaaactcacatatcagtgtaaaaaataaacaaacaaataataaaactcccttaataatgaaaagctatgggcaaacattcacaaaatataccatcctttgacacagatgagacaaaagaagcaataccaggtaatccaacctgtaacatctttcgaatggcctttcaactgtttcataactgaaggggggtcagagatcgtgcacactgtcaatgttccatccgatgatccatatgcaagtagatcagaattcatgtgtccaaacttcaagaccgtaactgcaatagaattaatcaggtttcatccttttagaaaagacattatctctcactcgtatattgcacagatggccaatgttgttacttcaatgaaaaaacttaccggaggcctggctttgatcaaagacacagtgcattcccacgaacgagtatggaggttcaacaccccgaaatcgtgggcgatcactatcactagcagttgagctaaaactgtttctgtgacttgaagctggtttgccactttgcatgtcctgtacacaaccgaaatcatgaacttaatgggctggttattattgatgctcttccaaccaatttaaatacatattgcataaaagaagtttacatacccttacagaactccagctctctgcttcatacaacagggatagtggacttggaggtatccatcgcccgctgatttatcaacgagaaaattactccaacatcagaattgcatagaaacatgatttaagatgtcactcacaaattaagtagtctcatcttacatagaagctctaatttattctcctttcatgattgagcactacagataaacataataaaaggcaccaaatgcacaccacttacactaattgagagaggtttttcttttttcgggtaagatgcaagttcaaatcaaatgcaggtaacatttttcccaagttcacatttacacaaaatcaaataagtttgcaaacactacaaaaccagtcaaccaatcccattatagccgcaacctcaacaatggaaaacaagaaaagagattctcaatatcaaactgtaaacagcagatgattataataatcaaagtagtcatctaaagtaaatttttagcaacctgttccctggtgtgctattgaggcttggttgatgcatattttcccaattccttggtctgcgaatgtaatttcggtaagccacataaccttttccattgcatctccaatccttcaccacaaatcagtgtaagaaaagtgacaacataaaccatcaatgaaataagcaaacacaaaatggaagaataagcaagctcataaataaatcaactgttcatataatttaaattgaagaagtcatccattaaaagtcaattgcatcccaaggagtaaatatagtgaatcaaagtggtcaccatctcatactatgctccaaacttcagtatttcgacataacattgtgaaaaaaaagaaaaatagagaatcaatttgattcgttagtttcccttccgaaattcaaaattcatatagaacacttaaaacttcacaaaattatcaaaaacaaaatcggttgaatctcatttcaaatttcatcaaaatttcttgcttcaacaatcataaatgagaccaagtcttttacaatcaaatttcataaatggcaccacaacttgcttatcaaacttctaccgcctcaaattccttggaaatcttcagatcacgttgaattttcatcaatttgaaacaaggcatgaaaaaatgaagcttactctacggcgaagaacaccggactcggccttacgatggagaaggaagcgacggattccgatgtagttaagatcggcatcggaagttgttggctgaagcaagcagctgaaaaattcgggatctacattctccttggccacttgtaccggatcactctggtccgccattatcaaaggcttaagtggcgaaagaatccacccattcagagatcagaacactccttcaattcaaacacagttgaatttgaatcaatggcgaattgaagtcggtatggggaagctgacaattggagaggacccgagatttgatgaattatatggcgtggaccggtgtagtgagcggaggtgagggcgtgtttggatggcgagaaaatcgtgaaagaaaattgtattgtcctttttaactcacaattcacaaatgtaatgcaatgaaattgattaagcgccaaaattgtattaaaaaaaaaaaatccaatatgggaatgtttggcagttgaaacttcaaacttcaaacccaaaatgttcatctctttatacttttttgaatttttttaaccacaaattattgaatttaaggatatttatctagttttattcaattatattaattttatgattgttcatgtactaattcacgttctttagactttgatatctactaaatcataccccttaaactttgacatgtatcaaatcaaatctcttaaattttcatctaagttagactttcattattaaaattgaaaaaaaatccttaaatctagaaataaaaatttataccacagggatgggtaactgcggggacccgtctataatggtgtgaggattctccttcttggcgagcagtggtgggaaacaatttcaatacctgaagtggggacggaggaggatcgaaaataatactatctctaccatatttgatcccgatatagatatatatagtttcattttattttgaaggtatataatatagagtgattctacaatgcactctcttaaaggaaatatactaatgcaccatctacttgtttcggcattcaaaaaaaaaatttagtctaatttttttttcatattcatgtacattataagtatttaagatattttacaaaatt

SEQ ID NO: 17142 - DNA, 2987 bp, Cannabis sativa
agtgcattctattattttgaacgaatttattaattaataaattatataatttttatttaaaaaaaaaaaaataaactgactaatagttaaaagtgtttatttttataaatgctccctaagtaaaaaaaataaataaaatggtattcttgtaagaacactatagaataagggcattaataatatgatattaaattactcaaagaaaatgatattaataaagacaatgggcaccgccaaattccacgcgctgtgtgttctgtataacagagaggcaaagtctagtgggacccacacccgacatagtcaagtgaaaaccgccacgtagtataatggcattaaagaatagccaagcgtgtgttacagttgcacgtgaggcgcgtgaactctattctcggtgaagcgatcagcgataagcgcataaacctttctctgtcccattgagccattgtcccactaccacaaagatcgttaccgttccttatctataaaatcatcgcgaccgttgatttcggggaccgccaccattggtagtaatcatagtcgcatgcacttccacataaatagtaaatgattttatatttagtttaagaaatataaactaaagtaaactccttttttattattattttataaataataattataatatattgtatatttttataggaacaatatattgtaggttactaatgtgggaggaaaatagacaacattaaaacttgtaagtattcaaattatgcaaaaatactcaccaataatattgtgagtatttacctagaataacgaatactcaagtaaaagtaacgataattgaatgaaaacaatgaatatttaaaaaatacaaaaaaaatatagtgatttcagccagagctcaatttatctcgtccacttttaaaagagagtttatgattgtttatttcgtgtctaattatcctcttatatagacatcaaatgatcatttaattacataattggctaaagaaattcattgcaatcattacttacatttaaatgaaataaaaatgtttataaaataaatggaagaaaattttcgatcgttctttaattaagtttagaacgagtgcgatttcagtcacatattggtcattggtatattgataacatatgaactcgcgaaaactaacaaggtaccgcgtattttgggcctacaagctgactaaagtaaaagtgcaagtttcacatgagtgtggaggagaagcatcaagtcatcgcacatactcgatgtactatgcttacttatctctttgtcccactttatcgaacttggttatgtgatgcataacgtgtgaagaccattgtctcggtcacaaccttctcacatgtttctatcatgcgagtataactaagttataagggcttatatccttgacacatcatcctttcccgttaagaaatgagtctacgtgtcaattgtatatgagattgtactcgttatttagatgaaaaagatcatttgacaacacatgcctctagtttatgatgataattgtttgtcaaacggtgaaaccactctgagggacaatcgagacgtcacatcgtgggtaacatttaatttacatgttagactttttatttgggcttacattaacttttattggttttaataaaatatagaatgattggatagttatttaccgtgttagcccatattgttagtggtcaatagttaatgggtctagcatctgtgtgtataaagtctagttgaagtagaagtgtgaacttttctagttaattgcagtatttgatgagcatgtccaatccaactggagttatgtagctaagtctcatttctaactctataaatacatattatctcatcacaattttatactttttgataatcagaaaaattaaaagctgattctgatttagagatctcagaagaaaaacttaattaatagtattgtactattaaattatgataaatgtgatcaatcaaatgtatatactaattattatctaattattatcgtgttatttattatatacaaattagtatcttaggtttgttattaattattatagcatgtggtattagattgtctgttgtatatgatttatgacctataatttgtgtaacaattgatatgtatatcttaattttctcaaattaaatattactttcattattatttatgttgaattttttatgtattgattttgaaactttagagcttttattcctcttgttataagatttctattgatatgttacatgcttaatttcattaagtatagagagagaatttgatgtttaaagtaacatttcctcataaaattgtattgaaattatttatttaatttttgaaattagtgattcaaatatgaaattgattgtaaatatcttgtttccattattttacaatatttttatatgattaatttttcgaattggacaagatatatgtaatattgggttaaactttgttcttcaaagttttggactaatcaattagatctactattttagtcattttttacaccgaattggatcgattagtagattagaaatcaaattttgagaaaaacccattaatttttagatattttaatattagatatattttgagttaaaagatattattatccttttaatttgaaatattttattataaaatatcttatatggtaaattaaattacaaaaaaattgaaattaactcatatattttcataaacattctccccataatagtttcaaattcataaatttattattttgtaatataatttattatttataattcattagatagaaaaataatttttattataataatatattattttacatattaaaaatttataaatcatcatatatatttaaataacctagatattattgtaaaaatgtaaaaagacttaaaatgagatattttgacatataattatgaaaattatcattcatttattattttattcctaaaataataattattaacaatatctattttaaaattaatttat

SEQ ID NO: 17143 - DNA, 5508 bp, Cannabis sativa
gtaaaataatttccaacaatggcctactgcacttttagctgtattatatcgagggaattattatccagatcgctataggtgggatttgctatagtacccttaggattacaatcaatgccttgcaaaaatcaaatgttggacatcctagggtgttgtacagccttaaggtggcgtgtgggagagaatgaggaagagagagagcttatcagacacttgagatcaggtttctagcttagaggcagcttacgcacttaggtttttagtcagaggttaagacctttatataggaagccttaaaccctaagtttccaattcaaatgcatggaaaatcgtatagttagttagacatttataaaagaccaaaatgcctttgattctagatattattcagctattatgttgggcttttggggcctaatttgcagcccattaatgttgtccatgtgcaagagtgttctgtggggcctgtagagcatcctttggccagccaggcccttgtgctggccagtttggccttgggctggccggccatggggctggcaaagggtgggctggccagctccttaagaggagctggtctgtcacttgatccccgtttgagtgttggatctttgtttgctcaagtgctaacttgaccttccttttagtgagctatactaccacgtggcactgaatctgtcactagcacacatcatgaggacaaaaattaggataataaaaagcaagtaaagagaatgacacgataatttatagagatttggcctccttgtttagcgggtaatgacctactctacttttagttgtattgattcaagagataataccacacagattacaggcttttaccttgtaatttctagtatggctctctatgaatattacaatagtgaaaataatgtatgaaagatctcaaacaagtaagatgagaaacagacttagtgtctaaggaatggaggtggcgtatgagagagagagggcaaaagtgctttagggctttcgggacttagaacttcagtcttttaccatctagcctaatgctctttatatagctagagcttacaaaaagatctaattcaactaggttaatatcccttaaatataggatatatttcccttttcaacatatatttaacctataaaaataactgattagaatccctaaaagttaggcagattttggggtttaaaaccccattttctaggattgttggtgttgtttcataggtatcctcgcgtagtgacccgtgtagggtaaagtctgcaaaagtatccatcaacttatgcctctctttagcatcctttacgtgtgcatgtcggtctaccctttacttggggctgccagcacatggcattccttggtcggttaggggtggtccgaccaaatcctcttagttagccattttcatgtaacttcatcctgactgagtatttggatccctcatcaataaacatgttatactccatggggattttttcttacctatgtggacatgccacatcacgtgggcaaaaattggataacttcccccaagtccctatgcagatgtttgtacggataatgccttttcaactcttgctctaactgttaaaatcttatccgagtagttattgtttgatcaaatattttccctttcatatatacacttcatgacaaaaaatgacttttttgccaatcattacggggattttttttttaaaaaaaaatgctgcataggatcccactttcaaactcttagaattttgcatggaaattttgtaaggagagtaaccgcccactacttcatggaaagaagagggtatcagaacctatataaggttcattttatcaaaccctcctcttcacttcaatctctctttctcttttttgaattctgttcaagattagaagaaaaaaccttttcactttcctcttgcaagccaatgccttaagcttccattctcttgggtttttgatttgttttgacgatttgaccttcccatgagcctctacagtggatgccattaatggtaagtcttaaaatctcattttctcattgtttcttgaatcctccattattgagttcaagttttttaaatacttgattcttacgttagactgtagtctttttcacattataatccacatgatagttttaggatacaaaatgtatgatttcctaatgaaaaagatcgaattttgagctttctttggattctttactctttgagtcacaaagaactcgttcgagtttttaaaaagctaaatttctaatccataaaacacccttgtcggcacacagggtttgtttatagccctggccagcacatggggccaatcttcaaacctggccgattctaggcttctagcctgggaacctggccagtgcttgctttggtcatgggaccctacccgacacgtgtttgtgtcttgggaccctggccgacatatggcgttgatcccagcacattggtcagttttggccctcttttgactatagagaagacttcctcacgaccttctaaactcgtttaaccatcatttaatacttaattcctgtaggaactctatatggcataatttagggtaagtctatcttagtcaattaacaaattaagactcaaagcccattcaactttttgtacctagaacttgtactttactgatctacaactttgtacattaaatattttgctagtacccttagatttagttgacttggactttgtccaagtcttttcattttgtctggttgctcacctccacttgagtcttgtatgcagatgaaccagcgcgacttttggggaggtgataaccgaatcaacgaagacttacttagtcttctctttgaagaccaccgtccaacttctttacctaattctccttttgagagttcttcgggtagcccctcgagtgactttgaggttagcagcggttcctcaaaacctgaagtctagcatcattgctgttcaaagaaagtaggcactgaattttacgatcgatgacaattcttccctagttcgtggacctacattgtttgggaaggtgtgcccgatacattgcccattagttaggaaactccatcagttagagatcttcctactgcaaagactgcgattactattgctatactcttcaaactagtcatggctaggaccaaacggacgtgtcgtagggcacccctaatgaccctcacattgttgaggaggttgaacaacctcaaacttatcagccaagggcaagcgaggttaaagaacctgtggccgagcagcccatggctagcaaagatgatgaggctttgactagaatagatagtgtatttgaagctaaagaggctatacttggtgtagggctaggtactgttgagaggcaatataagacttgcaccgtgattttgaacaaccctctagggtcttatgatgaaaccgagtagccattaaatgctcttggtcacccatctgaggttgggatagaccatgtcttagatgaggctcccgagctgtaggttcttaagtagggggatcattagagatggatatcccctccattatctctgtcggccagaacacttgatgagatcaagagaggaggactcattggaggagtctgttgtgacagacctaccagggaccacttggtccatcgcttgacatttaactagatggcttggtcgaatcctcatttggagcaaggggcagtattacccttgcatccttattttagggacattgccaactacttcgaacggtgtcctactcagatcaccccaaaaggcatcaagtaccttttgacgcattttattctttatgtagagttgggttggccttagccctcaccctatgaggttggatacttcttaaagttaaaatccattccaaagcaaccccagtttggatacttctattttagccaattggtgtaccaatggttaggcaacaccaatagtaaatccatgtagaaggttgggatgtattcttaaaactacttcattgcctaggaagtcaggtatgttcgtcaccgcttgtagagggtacccacatacactcgctctatccttactcttcgattgagcgctagggcaaaccagcattttaaggttattgttggctagcatactgaggctgtggctagccagcatactgaggttgttgccagccaggctgcaaggccttcttctcaagctccacccaggctgataccgttgttcagggtttgactagcttagatccacttgcacttgctgatgtttaggcacttttgttagttttttcatgcttttattttgcatcattatcatgttcttgtatggcatgtacgccttttacttttgaacactatttgtatatggccttaaggccttttattttggatatatgatcgaccaggcagtctttaatcctgactttaccttcttttgctagacatataagtgtccagacttactttttatgtctcgtttgaagtatgcatctttcacttaggtttcaatttttctcttatcaaaagctttaaattttgattaagtttagttgtacatgttcgatgcttgtacggtgtgggtgcccccaagtgatcaaccagacttatggtctcttggtcacttacaattcatcaagtattatagacctttgcctgtgtatctttttggagggacctgttgtacacatgtgaaactaaaattaaagattaactttaagaagttatcttgttagcaagttgtttaacacaatattgaactgaaaatattatttttattgattaattagtcgtaaatatgttttgttgttgtgcaatttacaattattgattctaaaagcttgcaaaataaaaaaaaatctacttctagaactcattctatggctacccctacccgacataccaggcaggggccatcactaaagagtgatgaatacttagctctttttaaactaactcttataagtgagttgacaaaattactactgaagagtagcattcttacaagttggtcattgatagtaatttctgagatgtttcccattccaatatcttggtaggagaatttactccatgttctcattgtacctaccaagcttgtatgcacatttgcttgttatctctgtaactttgtacgggtcatcccaatttgggccaaacactcctgctgcaggatctttggtattcaagaatactcttcagagcactaagtctcttatgaagaatttcttttccttgacttgtttattgatgtacttggcaaccttctgctggtaggcatgcaacttaaggttgccttggtctctcctttcttctatttcgtcaagggactccaccaataaggtgttgtttacctcttggtcataggttgtcctcctataagatggtggccccaattctacgagcaacattccttcatacccataggctaatgcaaatggtgttttcctggtcgccgacttctcggtggtcttatgtgaccagagtactctgggagtaattcaagccgaattcctttttccttttctatacgctttttcaaagtgtccttgagg

SEQ ID NO: 17144 - DNA, 1210 bp, Cannabis sativa
cgaatacccacaaccccagaatctctaactatgaatcaatctcctaagatctacgaatctagccgtggatcgaacaagtttcggaaccctaaccctagaattagaaagaaacaacggctaataataaaattggaatcgatcgaaagagaaaaaagagaagaaatcgaataccaggtcgatttggagatgcaggcgaagaattgagatcgaatcggtcaagaaaagtttgagatcgaaattggtggcggcgattaaaaataaggggacaagattagggttaggctttttttttttttttttttttgttagaggcttgaaagaattgaaaataacgaaaaagggctcgaagtgtgaatttaattacgatatataccctcggtcatacgagaatagatgggcgtagagaaaggggctatatatggttaaatttaagggtactgagtttattgaactttcattgagcttcgttgtgccgccacgtggccatttcgtttgagaaaataattgaccaacagatattagcattcattcttaaaaaaaaaaaatatatgtagcatttaattattttggaaaattaggaatatattcggttgtaatttatttattaataattaaattataaaaatatatcaaatcaaattttaaaatttttgaaataatttttttttgacgtagtgattagaattactcatgaatttacgatgtatatatctacaagccgcacaggaacctcctcgaactaagatagctcatcggctaaccgaagggcatgcttgtcaaaccatgaactgctaaagtaagcgagcaacatgagacaaactgctcccagaaatttaaacaataaagatataacgtcatcaaataacacaccaaaatggctagagcttcaacttctaacatcgaaaaactacacgccaactcgttaacatatcaaactgctccacaaaatatctacaaaataaaaagataaagaaaattggattaacccctaacgatgatattaaaaactaataaaagaaaatctcaatagtaaaaagatgacaattctcaaataaattatatttaaaaacttatcagtaaagtttttgtaacccttcacaaaattgacctacaaaataacaataaaactctattaccacataatttaatgaaaaatatgtaatgtgaataaagattgtagaacaattctgttatacccgaaatttagcta

SEQ ID NO: 17145 - DNA, 3089 bp, Cannabis sativa
  modified_base (173)..(178): a, c, t, g, unknown or other
atcttaaatgacaaaatagactttgtatattttctaaaattgtacaaataggatcctaaactgatttgttatcaaaataaaacttaatattaatttgatttaaaaatgttatgataaaattagttgcattttctgtatctattcgtattaaaaattatcttaaagttagttannnnnnaaaataaaattattaaaaattaaacttagagttctatttttactaatttagaaaatataaagtctatttttatcatttaacaaaacaaaaagtgtaattaataactttaaaaaaaaatacagaatttaaaataatatttactcaaatttttttatactttatagcatatacgtcagcattctaaagagcattattcctgacttgccaaatattatataccaaaggatagccaattagccacatagacttcttttttcctctttggccttttataccttttcacccacttgaagcaatgcactaaatcatcttgttgaacattcagcccaattcaattgaaaatctccatctaaatttgcttattataattacgtacatttaaagagctagcaaatgatgatgagtctctaaatccaaatcataataaacaattcacttcatcaatgcaaccaaaacggtgcaaacactctctataaatttgtgttttggataactctacctacttaaatgaaggaaaaccatttcctttcacctccatctcccagccaaaagctaattggatcaaatatttgcaatgctaaaattcaagttataccccagaggatatatagtttgagataaaccaagacctgaagtatgactatatctcggcccaataagcaaggtaaatcaatgacccggaatagttgacatttaagataaaccaattatgttgatatatataagataagcatcacacttagtcaaagtaaatctcatctaggctccgtaaaaattaaaaccagatcaaataaaacaaagttaacccaaaaacagataatctcaatacaaaactaatcatgaaaatttaacaacttataggtacacgtgtccatcatatagcatacaatataaatgaagtaagaaattgacgtaaaagaaaaagagaaaaaagagaccagaataaagaatccattataaactttgagagaaagttctcataaacaaaagaaaatacttactgtgcaatctgatcaaaaatattaataactatttttggtcaaagcaattcctattccattatttttattacctaacctcaattttataactaattgtgttaattttttttttttttttgaataaaagtaattgtgttaattagtgtgaagcatattggaatgtggtggcggagcagaattgccaaccagagaaaaaaactgtaaaatagatcaaatgttgatatataatacccacccacatgtaggaggtagaaatagaatagtgggagttaaaagcacatgtatcaacgaacaacaaaatatcctttattaataataaaatacacaacccactaactttctttaaatttccttttacaaaatagaaaaacaaaaaacaaagtagtggagcaaaatgataaagatttattattatttttaacaaaataatatgacacgtgttaactgaatgaaagtgggattgtggtggtggtgaagcagagcactggagagggtacaatggtccaaaaatattgtaataaaacatgcgctggctggctggatggatcaacacagccccaggcggcgctttagccgatcctcacttcctttccgtaattttaggatcggcttggcttcccacgttgcggctcatcatcaagccagctgttaaccacgtgtgtcggctgccttccaaccatataaaattattttaattatcctcaattaacctcacgtgggatattattgatattgttcaaaacattatatttacaactcaaataattaaaaatacacttcaataaattaaatatatttttgtctttttataaaagaataaaaataaacaattctaaaattaagtttcttataaaatttattcataatcaatacacacccatctactaaaattcagctgttttatttaacccttacaaatcatcaattcaatattacaattacaaaacttttatatagattatgaaacattaatataatgatatgtaagataatttgtttagaaggatatgtatgatactaatttagttgtatataagagttttaattttagaaatagattccccaaagacttcttctcacgttaatggaaatttatctcttcttgatgtgatttatattacggtaaattacttcctttaaaaaaaaattattcttctaattttatgttattgtaactttgtaattaatttgttttattttaaaaaaaaatttattgaaaatagttggagactcgtaggcttcacaaatagttcatataaaaaaatgatactatgtttaacaggtaagtgggatggaaattgagaaaaaaaaaattgatgaaagaaaagaggaaacaaaaattctaaacatgggatggggtgtacttttgatataaatagatacagtatttttattaaaaaaataatattttaatttattaaatgggatcaacttaaacatgaagtgtacttataattatttagggtgggaatataattacccttctcttaattgacgatcaaaaataatataatattttttggaagttttatttgcacccccatagcatgataaatatatcttattattaaaaaaagataaacttaaataatttttaaaaattacttttaatatttgtttaaaaaaaatttctcacattattttatgttaatttcaatacttattttgatttcatttcataattttttctaactcatgtttttaatttttttaagaaaattttatataattttttgtcataatatttaaaataatttatttttgtttaatagatatattttttaagaatataaattgaaagaaaaaagttaaaaaaatttagtataattaaagatataaattttaaataaaatggagtgtctttaaaaaattgtaaagtataaataaaattttccaaaattttttttggt

SEQ ID NO: 17146 - DNA, 5181 bp, Cannabis sativa
tatgtttgtagttgtaaaatgtagaataatgtatttattgaataaattgaatcatttttttaaaaaaaaaaaaaaaaagtttagtttgtgcggtttaaactgaccaaactgaggttcaaaacggtcgatttttcagattgcaccaatccagactgaaaactaaattttggatttttatatagaaaaaaacagaccaaaccgagtgatgctcagccctaagcatagggtttgggctcattgttgcataactctatgttgagagcatagtgtatgatgtcaacaaaaccaaacctctcaggggccttggttttccttttctatctatctccggtcagtttatacctctaagtatctgcacgactggtttctactacttcttgttgttcatcttcactctcatcttctaaaatactttcatgtatcactagtgcttgatgcatagtttggttttcttcgtgaacctttccaacaggttccacctcaaactccaaatcatcttcaatctcatctttggtagaattagtttgtgtagccatgacatccttgtatacccttgtcttcttcaaagacaacatctctgctaattatgcatctgtcttgattcccagtttctatacactatagcttgtaccctttcacaccctcaagatatcccaaaaagatgcatttctttgcctgggatcaagtttcccttgcctgacatgagcataggctatgcaaccaaaagttttaagattgctataatttgcatggtgtcctgaccacatttttattggtgttttgaattggattgtagctgaggggacacctgttgattaagtagcagccacaacaaccttagtccaaaaattttttggcacaccagagtaaattaacatacatcttactctctccaaaatagtcatgtttaatctctgctaaggtttttcaatcgagtttgtgtaaggttgaaatgaactaggtctagttgtctagattgttctgagggattaaggtgtaaccaaacgacagtgagtttggtagagtcaattgtcgtttgactcaagattcaaagggcagtcaactattgtttgacttgggataaaaggtctaaattgaccttggttaaaacttaattaatttctgttatgtatagattaaattggtaaaattccaacaagaatcatgaatttgatacttcattcatactaatcaataagctttatacagagtaattatacaagggttagttacataattagttgtacaattagtaacaactaacaactctagaagtaactaactctagaacagtaagctaacttactctatcatcctccctcaaactttgtgtagaataatcttttgtactaagtttgtttcttaagagaaagaatctaaaacaacctaaacccttagttaagatgtctgcaacttgcaacttggccaaaggaaatcatttattgaacaaccaattgcttgttcagaaccttttctcttacaaaatataagtcaatcccaacatgagtgatttccctcggtttatggctctattcatctgtgtgtgtgtgttttgtgtatgtatatctaagacagttcccttaaaaagttccatatttagtcttagttgggaaataaaggaagcctgattaaagggcattcttttaatggccttcaccctcttgtggtcttggtacagacagcagtaaacaacatcagtattcagatcatattctcattggcatccttgaattccagctccaagtttcttaatacagtatatatctcttctgatcttggatgagaccgatcagccacccggaactcatgtacttttccattaatctctagccagctacagcctggagtctttttcaatcctttatccctaagaacacttctcattttagcaacaccgtcccattttcccgctgcagcgtatatgttggagagtaatatgtagtttccagcattctttggctccatacttataagcttttcagcagcaaattctgcaagatcagtctcggaatgcttcatcttgcaggcactcagcaaaggtccccaaacccgagcatctggtttgaagggcatcgatttcacaagctctttggcttcatttatatgcccagctcgtcctaatagatccaccatacaagcataatgttcctggttcggttggcaaccgaacaattccatcatttctttgaaaacccttttaccttctttaacaagacctgaatttacacatgctgttaataatcctagaaaggaaacctgatcaggtttcatattagattgcttcatttttcggtacaactcaaagcattgttgccagtctccatgcttagcataagcactgatcatagagttccatgtgataacatccttattattgattttctcttcatcaaaaaccttctgagccatctctatgcagccacattttgcatagctgacgagaagagcggtattaagagaagaaagcgagctcaggccggatttcatcgagtacccatgaaagtactttacattctctaatgctccaatgttcacacaagctggcaagatattaataattgtaatgaaatcaggtttaaagccatttgatttcatgttggagaaaagagaaagagcatcaacagattgatcatgagttacacaacctttaatcattgtactccatgaaaccaatgtcttgttttccaataactcaaaaatctttcttgctgaatttaacttgtcacattcacaatacatgtcaataagagaattatgaactgatacttggtagtctagaccatttctgatcacatgggcatgcatttgtttgccccaatcaatagatttcaatcttgtaattgaagaaattacaggtagtgcagtaaacaaatcagctctgattccagatcttcccatgcctcttagcaatttaatagcttcatttgggcaaccatttctagaatttgctgatatcataatattccaaactacacaatctttctcaggcattttatcgaacaatagtttggcatatttcaaagcacccaactttgcatacatagacaatagtgcagtgttaacagacaaatctattcccaaactactcactaaaaccaaacaatgaacactctttcccactcttactgacttcaaatcaacacttgatctcaacaagttaatcaaagtaactgaattgggttctatcaattccattctcattctcttaaaaagatgaaaactttcctctccattaccactttgagaagaagcctcagagatatgaaaattccaaaaatccaatcttgaaacagggttttcttccaaaccagaaaccaccaaactaaatgaatcaaaacccaatttcacaacatgcccatgaaccattttccgattcaaaccatctcctaagccattacaagacctcaaaacaaaagggtaagtttcttcatcagggaacatagattccctaaccatatattggtaaaacaaaatggttttatcaaaatcaccaaacttggccaaatttctcaacatggcattgtaaagacctgaacttggctcggtaatggaatcaaagactcgttgtgagagactaagaaagcccagttcggcgtaagagtcaatgagtttggaagacaacgttgagttctgttgcaggccatggagaatgaatcgggcgtggatttgtttgagctgttggggtttggtgcagaggttgaagagggaagaaaatgtggtgaagagtcttgtttggttacagggaaaatgtgggattttgagagtgaaaatgtcggaaaagagagatcttgaccgttgcgagctcagcataattgtccgaagcaaaataactcaacgaacatttttgggctggttttcagtttcagtgtctaaagttttggttttggcatgtatgtatctgaggacttatatgtaattttacatcaccaaagccaatgtactaaatcatatttcccctaaagtttttaggcatttaaagaattttttttttgaagtaatagatttaaaaaatttatatttaatttcgtttaattttactaacatgatgattattcatatattaaatcgtgcgactaaactttgatatctactaaattgtatctctaaattttgatatgtatcatatcatattctttggactttcatttatgttaagcttccgtcagtaaaattagacaaaaattcttaatctaataatcttaatagttcgagaaaattttacattttagtggcttgaaaagttcactagttttggtacatgttaaagtttaagggcaaaaattctaattagctaaaaataaaggctaaaaattaggggtgttcatcaaaccgctcaaaccgtccgcaccgcaccgcatcgcaataaaatacggtttgaaattctttgcggtgcagtcgcagtttgaattggtaatatgtgtttcaaaccgcaacgcatcgcacataataaaaatactaatttttatatttatttaggtccaatatataaatgtccaacccaaagttcactaattgtattattaaaacttaaatttttttgagataagttgagaaacgtctcttttttgtatctattaatcaaaaatatccttatattacatttcattaaaatatatccattttttgagtggattgcctaatataccctcactcttcacttaagtctagcacatattttacattaagctaagggatataataggaacaccacttataaaagtaggtatatcttaaagaatatgaaaatgaagataaaaattaaaataaattaagtaaaatgggtatacaatgcaattttctcaattttttcgttcatatttattttcaagctttatggtatttttaacaagtgttgctcaaactttgttgtatttgtgatagtttaattattagtgattagtctaaaccgcataaactataaaaacaacaccgcactattttttgcggtccggtttctgcagttttttaggcggtatgggtgcggtttgggaaattagaaaaactgcatgtgcgaattggtttgaaaaaattgtcaaaaccgcaccacccgcaggtcccgcactgcgaacacccttactaaaaataaaagggtaaatagtctgataagtacctaaagttttgagtttgtaagcggtatttttttagcagcataagtacctaatatttataaaactgtaattt

SEQ ID NO: 17147 - DNA, 4761 bp, Cannabis sativa
ctatgaatgttgttttctttggatttataggatggattgatacttctcgcaactcttcgattgtaggagtttaggcgttgacgacattcaaagagttaactaattgctataattttgtcttgcatctcaaggaagaggtataacattctcgagtactttgttggtctcctttatctcttttatcttgcccttgcatggaaacctaatcacctaatggtaggatgatgctacaacattcatggcatgaatccaagggtgacctaagattgcgttttatgcaaatggacaatccattaccaagaactttaccagttttttcaccccgtttgagtacactggtagctccacataacctttttttactgcactttccctgaagaaaccaatcaacgtcacttgagtgctctgggttttcatatcctcgatttccatttccttcaacacttctacaaacaaaatgttagctgaacatcctgtgtcaactagcatccttttcattctcacatgggctacatccaatgttatgattagtgcatcatcgtggggatggcttagctcagatgattcactttgtttgaacgtgatttgcacatttggtccatcactatcaatgactgacatgggtcttatggagtgaacttgtcagacatgggctgatgaggcttttactgataatctgcttaaatctgaccctccaaaaattacattcatagttttcttgatgtgcgacggtggagactgattctaagctcttttgatactttgttggacatgcaacgccgtatatgttattaaaaaatcttggaagaaaccttgttttaccaacctattgacttctagtttcatttgtctgcattcgtatgtcgcatggccatgcttgctatgaaaagcgcagtaccttcccttgtctctctaatttactggattggttatcattttgggaggtcatctggtctctttcattcccttaaagcgtctcatcaactctgttgaagttatcgtcatttgtaagagctcttcctcactccattgtactcctgcctaccagttctctgtcgggttgcttgctattgctactctcaacgttcctcgatcattaccttgacgtgctagggtcttgcaattgttggtctttcatttgcttcgtatgctatcgaatcttctatggtcgaggttcctctaagtacttcttttgtgtgctgcttttcttctaccttgagtgccacataaccccttgccattgtcagaaccctccccagggtcaaccctagctctactattattgccttttttagtcgagacccatggacaagcctttgcattagggctttgtagttgaagaggatggttgtgcatcccatgcatgtatggttgtgctgtcattccttaaatgcttctatggacacgtgtctttatgaggtgctaatttctaatgattagttttgcatgggggttaatttagttttaactggttcgaattcgtttctttatgggatcaggaggtaatgatctttctatctcgaaatttgttggtgttctgtcgtatcgatccttgtttctagttattttatatttttagtgtgtgtctatctcgtgggttcgagataagtttgtgtctcggccccgatgtgtcttgatcttgcctgtgtttatcccgaggtattatttattttggcactgtttgacttgatcttgccctggctcatttcgatctagaatcaagtcggctttctcttgagctcggtctggtttaaatttatcttggattgctgttggattgggcttgggttttgttcctttctccttgcatgatagtttgggagtccttgtcatgttatcccatttttcgccatatggaccttagttctattttattggttgggattttcttttgtgggcttttataaagattaattttacttctttcttctttttgtgggctttcacaaaaacaaattttaacctcccaatgaatcattcaagtagaaattgcaccctatacccttttttttttgttaatccattttatttttacatttcttttctaaatatttaatttatactctcttatatttattatatcccgattatatcctaatgtaatgaaaaaaaactttcttcacctccctgaatagtacccttatgtgagggtataataagggtataatcggtaatgaacttataaaaatggtacatttcaattgaatttaatataaggttatttttttgattaactgatgaaaaaaatgggtatatttcaacttataccatcatttaaagtgtatttttttttttagtttgatagtaaccctcctcccttaagggtattggaatattctcgaacacaagctaaataatttatgttatatcgattcattactaattataagaacacttgaacattatcattcgaaaataaaaaataattgataccacacgaaatcaattcccataaaatatgcactgaaaattaacatttacaaccattttgtactcccggtcagcttgttcgcttaattaaattatacgtactcagataccatatactttttctcatttattaattgtataaaacatataacagaatccaaagcaaggaatgataatcgtatccaaaacgacacgtacataaaattttgaagtttcaaaggggaactcgttccagaatcagcaatgatctctagctacctatttaaacccacaattcgtacttgtaatactagtacgaattaaggtctttaaaccacgacatcacaccgcaacaacgacgtcgtttcttgtgcttcacgatctctccaggtttgcttgtatagattttgttccataaaattaattaacgctgggcccagctccaataatcttgtttcatgcacttctaccgtcgcctgttgtcatttattattattatattaattattaacaatattattcatttgtgtaattgactgactaaatatgtatatatactaataaatattatagtttacgtacgtacctggatagagtggtgacaaattagagcaaggagcaaagctaaacatggcacagcagtagtagtggtgacaattatttcttttgggcataaaactccattgctgaaataaaaataatagagctcagtgagcttagtatgtttccaccaacaccacatcttttcccaggagaccactacttggaaaattgtagtattagttagctcatatgcgttgctattctcaccgctctcagaacagccacccattttttctgcattagtttccatccaaaccaaaatcaactaccactataatacatcagctcactgcataaaatgaatatttcttcaatttttaatcagaaataaatacattttccccctacggatcacatcaatatatagcatatacatattaatcaagttttatttgttcaaatataagaaaattatttatgccgtataaaattagaaagaaaaagaatagatatagttacctgttaggaggaggtgagatagaaaaagaagcgaacgatgagatgtagttgaggcattaagagaatgaatattgataataataattaataattatgatcataaggaagaaagggatgatatataaatgaggggaaggaataaaaattaggccatatgatatgacgttggtgatggaaaatcactcataaacgtcacttttcttttctatgtttggtttgggtgtgatgtctcatctgaccatgtatggggctttttaataagagtagtagtgagctggaaaagagaaggaaaataaaggtttggtaattggttcactgaacctggtcacttttctcgtcatatatatataagcactctcacaataaaaggatatatgttatattattatgtataaaaaggagggaatatatatgtatcaatggagtgctaggacacgttgatagtcacgatttccaaccatgcattctactcaatgttttttttttttatcaaaattgctagtagaaacattagggtattcattgctatatcgatgtaatgtgttataatatgttctgactttttatattatttattaaatgaaaagtactaaaatttaatattaaattgtattaataataatacattttttttgtggtgtttaacaacttaaggtatctctctattatttatttttttttatatatttttttaagtaattaatagggaaacttttttatgttttaatttttatttacttaattctcttatatttttttcggtagcaaaacatttttaactttatttttttttttgtaaatttaaagtgtgattaaaaatattactgttaaatactaactgaatgattactatatatatttgtgtatatgtgaaaataaaacttcgaagataatataataatatcaattagtatttaacgataatatctggttgacatctcaaatttataaaaaaaaaaaacaaataaataaatatataaaggggattttataacaagttaaaataaaataaaaagatttaagtatataaaattaaaacatttgcccgcaaataatcctatttttctctattgcttttctttgtttctttgaggggtgtcccaactctctataataatgtgacaagtgcttgagctagaggacggtccaaattgattgagatcgtttttgtttgtatctaaatgagcttttgcttaattagagaaaactgattacaaaaggaaataaataaagttcataaatatatgaaatgattaaggtgccgtttggtaatatttttgttttttaatt

SEQ ID NO: 17148 - DNA, 7341 bp, Cannabis sativa
aatgattaaatatttttcaaaaaacaagaaacaaattattattaaagtattttctcaaaaatatatagaaaacccttaaaattttaatagctactattatcatgtactctacataaagttgaaatgtgtttttacaaattgtaaaccactttttttttatcttttactccaatttaatttctcaattttttatcttatatataaaagaattcaagcattttatttagatcatatataatatatttttatatgagttgaacactattcttaatataaattgtttgtattagaatttaaaactttatgatataatttataaataatatcatctttaaaataaaaaaatatttagacattaagaccaaaaaaaaaaaaaaaagattagaaatacaaaagaaactttaaaagtaagtaattatcattaaatttaatcttttatatagtattaaattaaattagttaaaaaaattataagtaatgaaagaatcatatataaatataaaaataatataatatatattattatagactatacaaaagaaaagcttcgtttgttaatattgacgttcaaccgtcttttgaatttaatgagcgaaccactcttgtgaagaagcgcatattggattttgaaattgcttccctcggtgacaagccattcttatccattagaagagttaagatggtggtcagagattttcctcatggagttggtccgggatgtgctctgtatgctgataattgttgtcataccttggataaatcttcgaatgaacttttggagagtgatgaaacgacgaatgatactgtttgttctaaggctaattcaattggttcccagcaagtggataaaccagtctccgtgggtcaatcagctggacttataatttaatggatcaaaatcaattatgatgtgaaagttggtggtagttccatatgtagagtggctttggctagggatcacacgggttctattttgtagatggccactaacaagtttaattttgttgatccccttaatggagaagttgcagcttgtcattggccatggagaaggtcgtgcttttgaaacacccttttatgttaattgagagtggctcagagatagttataaagacactaaatggaaccagctttaattgggatattagtaactgcattcaccaatgtaatatgctctttaatttatttttgagtttgtaatctttcttttatttctaaacttagtaattttacaactcataattggctaaataggctatgccaacaatataattgacatagttgatccgtcaatcatcttaactaacattatttagaatgaccacgagatttaatttattttatctctaaacaattttaagagattccataataataataataattagaggtgggagtgggaccatgtatgaccttgtcgaccataaagtcataacccgtactacacaagctctcagcgtcggtcacgggaaaaatatattaaacaattccaataattatatttgtctgagtcattgtgacagagctccatctgtataaactgtatttttaatcactttctctgtaaaacagtataagcactcaaagaaaaagaaaaagaagaaaaaaaaaataaaatctgaaacaccacagctttaccctctaatctatttgaattttgaccccataaagagaaaaacttgaaacaatctcttccacgctcgtctacatatttggctgccggtgactgaagactcagtactggcgtaaaacaacgagtgcccatcttccactcaacggtaatgcagtaaccctcttcatttgacttatattttccatcgaaatcttgttctttgatgattttggttatatatcttgatgggcatctgggaatgtgtcgttttagctcacaactcctcttggtgtttcgatttatggctatgtggcttgttttttttttttcgtagattgagatttcattttcatggctttgcaggtgagtgggaaattggacattttgagaaggaagttgtgtagattaagggattggaatggaggttttgtgctttgaggttagatttacttgcgggaaaagctaatgattgtaatggattattgaactgataatgttagccatttggggcatgcaaatcatggtaattgaatcattacttgaaggattacattcattttcatatgcttaccagaaattgttacactgctaaatttcgatgtttcttttgtttggacttgtgctcaattctgtttaagtgaagcttttgatgagggccaagccaaccatctctggcacgaatgtgagtaattgagtgttgagcgttttattattcaatatatatatatatatatgataagtgattacaatttgaaggaagtaggttgtgaagtgagtaagaaggaatttattgattttcttttttaatcatagttaaatggcatctattagaagaaccctgtctccagtgcctcgacctggaattgcattgagtggggaagccagttctgtcgcttctccactttccaggtcttccacttgtgctcctcagagccatcccccatccagtggatttttttcttctctatccagctcactcgattcacaagcctttgcttttattgtgttctctccaaggacttcaaggccccttgaaaaatccaaacttaaaggacaagtatggaggaggatgcttttccaattttttatatgctttttggttggaatattcattgggttcactccattttcctccatcaatatttccactaatctcatgtcaaagaatcaagccttttcctttgaggtgatgtctgcagttggaaagtttcagtcatatgatactgtatctagaagtgatatggcattagacattggggctatgaaggaaaatggtaccttaaaacctgagctggtggagtcaaaaccaatagatggtatatctcaacatactaattacaatgtatcacttgttgaagaatcagaattggacttcagaaagcttttaataattgtgactccgacacatgtttggccatttcaagcctatcatctgaatcgtttggctcaaacaataaagttagtatcatcccctttgttatggattgttgtggaaatggcctcacagtctgtagaaacagctgacatattaaggagaaccggggttacttacaggcatcttgtttgtaacgtaaatctaactgatgttaaagacaggagtgttcatcaaagaaatgtagcattgtcacatattgaaactcaccatcttgatggaatagtctactttgccgatgacgataatatctactcaacagaactttttgagcaaatgaggcagataaggtgacatttctttcaactacatgaatgctctctattttaatgcaaatgttggatcttccgataaaatatcatgagaggcatcattacgaaaaagcattaagaaaagttcatatttgttccattccaatctgatggcttctatttgtgttttctacttatatttagcttgattacattacatcccaagcaaggcaaccttatgctgagttcttaatatgaatacttgaagttgctacacttcacttatgttatgaaaatatataactctttttattatcaaagacataataagtgagtttgtttgagtgttttttctcactacacattataatgatgtttttgttctattttgagctgcaggcgatttgggacatgggtagtggccaacgtaccagagaacaaaattaaccccatactagaagggcccatttgtaatggaactcaagtaatcggatggcacatgaatgaagcaaaatggagatttcggagatttcatgctgaaatatctgggtttgcctttaatagtactatactctgggatccaaagaggtggcacagacctatgcttgaacctattagacaacgtcacacagtcaaggatggtcttcaagttagtatttcttctactttgattcttgtgttgtctgaaaattgtttcaaactgcaccacttcattggcaccattttttaaagttacaaaacttttttcacttgatattaagaaaattttagttctttattctttaatcgccaaactttgatatcatggtttttgggactaatctagttgatttgcattttcaggtaagcacatttattgaacaaattgtggaagatgagagccaaatggaaggactggagcaagattgctctagaatcatggtttggcatcttcatcttgaatcagctaactctgtctatcctcatgaatggttcatgaaggaaaatctagatgccattgcttcctttactagaagttcttgacacgagaagagtccatgtgaatgataggtaagctctcagagatccttttgcgattctacatactaaacaaacaattccatttctacttttcacatgttacacaactatacttctcttgtcgggtttgtgatgattctcggtgagcaatcaaagacaaattttaggcagattcatagttattaagaaacgggaaataaaagaagtataaattgcttgttgtatttctaatgcaaaggtaaatgaccttttactccattctttaaggatgttagattagtctcagctcaaagccatcgtgctgacacacacccctacttgaaggcatccatcctagtctgcctattagtactaatgaattatgaatggctcaattgtttcctcctattaaagggggttcctagaaatacaaaagtaaggatgtcctgaatacctggacaattgaaaagcagtcaacaacactcgggttttcagtttgtcttcgttttttgttacatttatctttcaaagtagttttttttttactatttatgttgtctcgtctctgtccttgaattgcttttcagggctggaactatcagttaagaatcttattcaacgatcatcgtcagcttgtatgtgcttaatcgttggtaattttaatatctttatgcatgtttagatgttacagctcgtttcctcctttcctaaatggtggaatgttttggaaacaaatatccctcgaaacgtaaacatgttatcttcttgcctaatttagtttgtaggttattctttctttatttttgtccgaagagaagcaatgttgttctagtcgaaaccggttgtcaaattcaaaaccatcttaaagttcataaaaatgtggattttatttatgtttgctttcttacttttctttctcattttttgatcattctttgctagtatccatttgtaagcaaattttgatacatgtcaacttttattatcttctcacaatttggctcaattatgtatgtgtacctgaaaaatgtatgatgagggaatgagctgacaagtaactgttgccttggccatacaaattcaacattattgtaacttgaatgttataaataaagcatatgcttccaaacctgtatcaatttgagtaatgatatgtgctaacctttttttactgcaatccaccacatacacctatgtagtaattttttatttattatttttttttttgagacctatcttaaatgagtttgattggtttgaaaattttgatatgtgcgtagtgtttaagtgtaaaatgtgtgcacagaactttgattgcattgcatgagtggcctgccctaaactctcaagtgaaattataaaacaatgccctcgcaattctttataaattaaatctaagcattaattgtgacaaaatcacttttgaactttatggtttattaaactaaaatactaaaaaaaagaatacttgataaactacgccagttttcaaaacaaacaaaaaactacaattgcatcatttgctttgttacataaaactaatcaaacacttaaaaacttttttttagcaactaaactactcaaattatatcatttgttaaatttatagctgcatgagattgtctcttttttgggccaggcctgtcgactttctctaatcataagtgcagtttggttggggttgtattttgttattgtgtttcgatttttgctactacgattagtcttatctctgtgacatgattttgagtgttttagtcttgtctttgctacatggttttgagcgttttggtcttgtctctatcatatgatttgttttattttgtttcgttgctggttcttttttgttcttctatggctcgtcatcaaattcagtggttgggaataacaagttctctacgactgaaggggttattagtagtgcagttacatacgttgcataatagttgagtgctcaagctacgaggttgaatgaacctgctgcaatattttttactgttgtgtcttttgaacgatagatgaaattgaatatatgtgctcttaaggttaactgtgatgttgcaatttttttaatctaattttatttttactttttttgtcaaatgatttgagaattaggcagctgattatttggctcttttttttaattctaattttgagtgtgtcaccaacaggggagatgtctcgattggattgcatgttattattttagctaattgctattaataaaattgcttaatttattaaaaaaaattatatcatttgttaaatataaattgattttaaattataagaaatatataaataaataattaatattatttataaaattattgaaaaaaaaattattcaatagaaaatatttttaaatttttttcagttataactaaaaaaatacaataatattacagaaatatcgtgagctggccaaataaatatttatacattcctataaaaaagattacaaaaatacctcttgcacacatcttcaacccacacaattcacgtttcatagaaataaaactttcgtgcaattgaaaccaaccgacaatgatgaatcaacttcggaagatcaagaaacactattaattagaacgacgtcacctaagaagaagaacaaaaacacaccaaacaataacaattactcactgatgcaaaaatctgtagaaaaactggtttgaaatataaattcatccctaaattataattcgaatttcataaaactaattctcataaatttaatttccatattcataaaataaatatcagaaagaaatagatcccaagctcctgatcaattcaaatcaagtataatctgaagaaaaaaattgtcactacataagctaatattatacatgttgcattagtgttgttttacaaaattttaatcttgttttattcaatttcgatcgcaaaaaataaagtaattcgtattcatatcgcgcctcatatttggcagcattattttttatttttttgattctatgtagttgtattatcgttgtgcgtccattttatcaacgctccaataattgacgagacaataa

SEQ ID NO: 17149 - DNA, 2328 bp, Cannabis sativa
tatttcgttattttagggctgcaactacgttcaatattttttttatgcttattaagattcaatttaattatatactgaatgttaaattatcattcaatccgatcctattaatttcagtcaccctatcaatacaacatctattaaacattggattggttctatttgatgtatttaatgtatatctattggtctaattcgagtttatccaatattttagacttagtatatatttttagatcggattagagactcattcaatattttaggtccagtattacattggatccatctaatccaaaaaaaaaaaaaaaaaattacaattaattttcatatatatatattttatgtataacaatacaaaatttaattactcatccgaactaaatatgtaaaagtactaattaattctattaaatattggatgtgttagatttttaaacatttgtcaataaatttgatcaatttatgcacaccctaactataattttaatttaaatctcccacaaacatgtacttttaaacatgtattttaattctagtgaagttttttgtagtgtgagtgtttggataagatgataataaatagttgattgagtcaaactcaaacccaaacgtgcatcactttttatttatactactcattaatttataaaatatttatttctcaaatttttaaacgtgtccacacgtcaactcacacttctgtcttctttcttttcttttcttttcttttctttttttttactttttatatatatatatatattatcgacatgtatataagaatttatttaaaacatgtatatattattaaaaaaattaggtatgtgatctgagcacttctatattattatcatgatgtggatatattatatatagtaagtacagttttaaatcttaataatgcacactgttcctttttcgtccagaagagaaaaaaaagaaaagtatataaagtatatttattatttattatttattattaattgatggacccatttcaatatagaaaagattgtgaaactagaccttaatttcaaaattcattcggatgcagaagacctaataatatataaggacaaaataattactgtatatatatatattgactgttgagcaaagaaaagatcaatattatgttagttgaactttgttgtatatttgaagaccacgtttaattagataattaataaaataaaagtttatataagaaaaattaattaaaaatattgtgcatggtggggtacgtatgtcgtgtgaattagatgatgatctcatgcatggcgttatagaatttggctgttgaatatatatatgtattattatttaatataacacttcttttttcttataagacatatttattaattattattgttaatttgccctagttgtaatttatttagaatagacctaccccactaccacctcactcataaaccacttgaactaattcttaccaattaacatgatcatttgatattcaagtctagaaataactaaaatataaaatatttactatacaaagtaacttattaaataacagttgattagttcatcacttaaaatagaatttttataatgatttatttattttgggaaatcttttgagtgtactcttttttgttgttgttactctgcatatatatcgtttgtattatatataaataatattaattagggtttagggatcagggagccctagctaataaattaacttcattctcttctctagaaacgtgtgaactagttgtacatgccctaacaacccaactctacaagtgtgtacttattatatatatcatcagttaatttagttatgactataatatagagtatatatttttatatacgtgtcatcgttttgttattttttatataccgatttatatttttaattattgtagatgatttgtgaaatttatattatacttattaaccctccacgatagaattttgatttagataatactgtatttaatgtatgtaattatatatacgaagttatacaccttattttttttcccattataagattaagttctctaaaaaatatgtttatattattattcaatttttttatatgtatattttcatcgtaattaataaataaaagagtatgtttatattaaaatatttttcaagatttgaaattttatttggatatacttttttgagccctatattattaaaattctttatagctaaaaaaattagaaaatataatttctaaaataaataataaatatggtaatacatgcattttatattgaccgacaaaagatagtgacaatataggttgaagacataatataataataatcactt

SEQ ID NO: 17150 - DNA, 5076 bp, Cannabis sativa
aaaaacaaataatttcacttataaatacataatcctttggacgccattttcgtccaaaccaagctgcttgaaaggcattaaacagagaaaggctttcctatttattatttttttctctttaaagaaactcttctctttcccgcttactcttatcgaatcccctaaatcttcatcgctctgccattaaagccaggcaagtttttctttatatatttataggtttatgcgaggtctttatcatttatgtctccatactcttccttatacgtgatttttgtgactctgtaagttcaaccgataaatgtgatttctttggtaccttaatcgttttcttcttctgcgttttctgtatttgcaatgtaatatgtttgagtatatgggcttagtctgtttttgaacctttactatttggttaaaaaccctagccttatatgatcaccgaatggaagttgcagatgaaggttttgaaattttattctttggactagctttgctctcttagtaacaaaatttcaaagaatgtattgtgttatacatttttttggggtatgctgtatatgctgagtggtaatattatttgtgccatttatatatttatttttagctggaatttattttactttttacactgcagtttcttccaaacaggaagaagaaaaatgatctcttttactggagtgattgtgcaactttgtattttttgtgctaataatccaaaaatctgatttcactagtgtctggaaaaacgtgcttcacaatataaggagtagaaattgttttttttttagaaaataaaaataataataaattttgggtatttaacttcacgagttaaatttctgattcttgtaatttatatgaaaattatctgtagcagggatgttgttataataataatctttccttttggactgttgtggttaaaattcgagacttttggcttagagcttcagtgttgttggttctgttatagagtttacatgttttctcttgtttattatatagttgctttcttttgaggcttgagaaagtagttatgtattatagtatcatgtcttctatttggtgcaatatgattctcatgagctagctaaacgtgttatctgtgttacaacatacaatagtattgatgtctttatattgtgaagattcttagcatgtattttttttttttttttgatattagaggctggagccagataagaaaaagatattttatggcgggcgacgcaggaagaggtttggaatgccagaagactatggatgggaaggagagtaatggaaatggtttgaaaaaggccataccttcttgctgcttaaaggctaaggcttcagcccctgaacttgaagcaaaatgccattccacagttgtctctgggtggttctcagcttctaaatctggttgttattatctctttcatcattagttgttctgatagtttgaatttaaccttgttattttcttatgcaataagtgctatgtaatcatttgatcgacttggttagctaaatatgctgctataactgaccctcccacttggtttgtttcttagttacagacaaatctggtaaagttgtttatttcaacaatccgatgtggcctggtaagaactacttatacaagttgttgcatcctctcatttgatcgattctatcaattccttttgacattgtatttttttactaatggaattgaaatattatagctagaatatttgttgtatttcttttttcaaaaatcatagttcttttttgattatttgatgtggctagacacttacatttttccctactccaaatgcacactttgctttcttttctttttgttttcaactttccaccttgactggctatcatgcatcttgtttgtgcgttgcacaatacttctcattcttattctttgtaccctttcttaatatttacttgttgagcaggagaagctcattccctgaaagtagaacgtgttttgtacaagggacagtcagagtttcaagaggttctggtttttgaggtttggcattttcaatctgaagtgttactatgtttagcttaagtttcctctatttcattcttctttttaagaccttgtattctgattattgattgtcaattccttgttattcagtcttcagcatatggaaaagtgctagttcttgatggcatcatccagctcactgagaaagatgaatgtgcctaccaggagatgattgcgcatcttcccctttgttcgatctcctcacccaaaactgtaattacatccattctaatggttttaattttctgcaaatttcaataatagattggtatatgctacagctctgttttggattatttttgttccatattgctctgtcattttgcattacctaatggtttcatgttggaattaggtattcatgtgtctccatataagaaaaatactatatctataatatgtggtatgttaagtgctgaagtttgtccttggttaatttttaagatatttgttttttaagatcagcattaggacaacttgcatgagcgctgagagtatttttttcttcttcttcttcagtcgattctagtatgctcccattagtgtttaataaatttccttgtatcattatctagcaatttaagtttcccttcatctgaggttaatagagtcatttttatcttcggttgaattacctctgaaggatttaggttggaaatgctgctttaaatttactttaatcatagctttggtgccaactcttccattagcaacgttttgttcacctatcctgttacagataccgagtaaaatatatttggatatttatttacaactctaatatttctgaagaaagtttgttagacttaaaatagcacttgagaagtgtatcgattaatgacttctctgttgcacttgatagaatgccttccaatttttcaacttttcatattttgttaaatgctcttaaattacactgtgcaggttcttgttgttggtggtggtgatggtggtgttcttagggaaatttgtcggcacagttctgtcgaacacattgatatatgtgagatagataagatggttattgatgtgagtagtgatgcaagtacatcctacatgcattaatttgctcctgtctattggagtcctcccaactaatagtaattattctggtttcttcttggtttaggtctctaaggagttttttccagagctagctgttggatttgaggaccctcgtgtccatcttcatattgatgatggtatgattagcataatactttgttatgtaaacaatttttttaaatttttttttcaattaggtaggaaacaaagtcgaattttatttctttaacttgtttctgatcgttcattaaaatacatgaatgataaatactttgttagttaagcattggtaaacatggacatgaaatttgtttaaatgattacagagctctaatcttttttttttacaattgtgacagctgttaaatttttgagggatgcacctgaagggagatatgatgctattatagtggattcatcagaccctgttggtatgctctattgttctgtactatttgtaatctccatttcatttggcattaacttgaatgttctttctaaattcatcaacttataacttggcctagattgtcttttgttattactctacatttacaaaaggaaagtagaacactgtcatagcttcttgcaatgctgtatagttttaatttcttaaagataatggagtagttactaaatgatttgagatcccctctgttttaggtcctgctcaagagcttgttgagaaaccattttttgagacaatagctaaagcattaaggcctggtggtgttctctgcaacatggcggaaagtttctggcttcatacacatcttattcaagacatgatttctgtttgccgggacatgtttaaaggttcagttcattatgcatggacaagtgttcccacctacccaaggtatagccttttattataatctcctcaatcatcagtcatctctgtaattatcattattaatctgttatactactgttgagtaaaataattcaggcattcttaccacttgttatgcagtggtgtcataggttttctaatatgctcgaccgaggggccacccgttgatttcaagaatccagtcaatcctattgaaaagctagaaggagctgtcaaacataaaagagaacttaagttctataactcagaggtgagaaatcgttactctttatatcttgtaccttagacgctataatttttcaatttaggggccgcccgcctgttgatttcaacgatagatgactgttgagtaaaacaaggctttgtctgtttgataggtgcacagagccgcgtttgccttgccaacgtttgtgaagagggaggtgagcttacttggtgattgtccaaccccggctcggtgaattggtttcaccgattattgaaattagaagtgtgtattgaatgtaggttagtacactataaatgaaactgtagatgggatgttgagctacttgttgcctattattgatatctattgtaaaattatggtttgtgtcattatgatttgtaagtgtggatgttatgctttattttcgtaactttctattcggacatgatttggtcatttatgaataataattatgtaatatccaggaacttaaaaaggtcattgttttcaaaccaataaatttggattgtaatgttaaaacaattttctcttttggaaaaactggacgttttgttatcatgcacaaccaaccacacaatactaatttgttaattatttccttaaaaaaataatttaacctatatatgatttaaacatttaataaaatcttaattagtatgtattaataaaaatttcggaggaaataattaattagggtttagggttaattatttccttcaaatgatttaaacatttaataaaatctctacattaattaagacacgcagttgcccctctcaattttcgcctaacaacaccccaaatgccttctttgaagggaacgcatccatgcctcagaaatagcattcacagcaaatctcttcgaagctcatcattttttttggccgttaa

SEQ ID NO: 17151 - DNA, 5298 bp, Cannabis sativa
aatttaaatttaaggcccctagttactctttggcacttctcaattaatactgatcgtctcttagatgtagtactattagtagccacttctataccgtttggtttgaagaaaacaataactaatggacgctgcaatgtgacctcaaaaatattttaaaatttgcatataattacatgactaactacataactaaaaggatgcagagcgaaatgattatttgtataattttaagacactaaaaaaatacaaaaatttatcaataatttggaatttatggatttagtatatgttcatgtcactagatcgattttgtattgcacaagtgtgaaatacaaattaacaatgaatgcaaacaaagcatttagaagctccatttcaagtacaataccatttcaaataagtagactttagttctctcacttttagacgaatttaactcatgacctttggacgccaacccgcaataacatcctccggcagtgcacgtgttttaataaatgaatcctttgagaaaatattctgcatgaaataaactcaatgtcacactacattgtacaaacatacatcgccacatatatgtaaactacttacatttagcttgacactagttcagctcaaaattcaaaaagacagaaaagtgattgacctaaacgtttatagaaaactgaaaggataaatacattgcatcttaggaaaaagatgagaagtagctcatctgaaaatgcaaccatttcaatacttatgagttatggtagtaagtatgtgaaggatttcaaacacattttcgtcatgaatcgaagcttcagaaaggataccaaatgcagcattgtactaattatacagctttatattttttgaaagaatattatggctttatatagctggaaagttagagcatgtaatgcgtgtcagatcaattgggagattttaacaatattccagctgttatttatattgagagctttgcaacaaggaaagaaccaggttttgaaattcctgggcatcagtaacatatttctccaaatttatctttcattctctaacttaaaatattaattgtacaatgatgaattcctaacttaaaaagttacaaccaaagcaattacttggaagaaaatagaaacggtaaatttacttgttaaaatatgtagaaaagaggaggaaatcaagtagtgcattctagaatacagttagttaacaaaagctaacaaaacattctacaaataagggtacacatcaattattaaagttctaatactctcatatagaaacataccttcatgtaagacttcacaaatggaagggaatctggaacagaccaatttttataatgtcccagagcaatttctagatgatagagcttgggtgaaagagccaagtcagcagcagacacatctttcccattgataaaaggacccttgaaaaagaaaataaactcaattaataaataaaaggcagcagtcagaatgtagtggtgattgagagagagagaagagatctcacattttctttgagataatcattgaaagaacttagctcatcaagtaacgcttgctcagttccatcgttggggtctttgcttttaagaaagccaataaacgtcgagaagatctttgatccactttaaagaaaaagaagacaagacagacatacaatcagatagagaaacctttaccctatgtttggaagtgggattttagtggggaaagaaaaaggtaagaaaaatgtaggggaaaaagaagtggaaaataaaaaaaaaaaaaaaaaaaattctcttgtttggtatggaaagaaagattgtatgaaacttgatccaacaaaaattttcttaccaaacatgaaaaaattgactttttttttattctccacacatctttttttctacattttccttacatttttcttttctcatcaaaatgcaacttccaaacatagccttagtataaccataacttggaaaagagatgaaagagtagacataattctatagattttcgaaagctacagaatactaatgttacccctccacatttcacaaaaaaaatgaaaaaattatttatggatcacataacccaggtgttagtcataaaattctgtatttaaccgttgaacataaatcctgacagtctagctaatttgaaaatgaagctgacagagcacacatttgtgctaaacctactatttcacattggaagtcataagggaatcttcaatggcttttacataatttgtagtcttaaaacatgaaaggcgttttgcatataaaatattccatagatttgaaaaaaggttctgtaaattctattgatgagtttaagaaattcttcccagacagcaacttttgcatactgcatgatattaattcttatgactcatactctataattataagatgtattgaattttcaaattttctagtcaattgtaggtaatgtcctgttgtctatgtcattgatgttactctaatggtatagaaactttaaaaagaaaaaaagaagcaataaacaaatgtcaaacctaacatggttcttcgtgtacggattaaatcagtaaatcattgctagtaatggtgcatacactgaggctttctcaggtggggttatcaaaggtggctgagggtacttttcttccaatgattgtgtgataacatcggaatctgcaacccacttctcatcaagctttaatacaggaactttaccacctgcattgatctttagaaacctagaaacaaaagaaaacaaacaaattaaactgaaaaatcattcttgtcagctagacatggtaaggggttaaccaaaggtattggatttaaaataatcaccattctggcttgttggccaagtctaccaactttaaatcataaggaagatgtttttcctccaatgttagcaacaccctttggcaaaagggacctacagaatataaaaataccagaattaagtcgataaatcactcctgtaagtaggtccaaaatccaatcatgcataatttaagctacaaatgacttccctcaatactaagaaacatacaaaacaattattaactacgaatcctttataattataaacattgaaattaacacaggtccgaatacattcaatgctaaaagattcccttcactgtactacattctctctctcggcaacgaaaagaaaaataaaaataaaatttaaaaatgtactcacagtcgccgagcttgttggggacagtaagggaagctttgacgcaaatttcgagaggggtcgggggagcagaggcggacattgagatggagaggggcctgttggttcgatggcatgaactggtggtggagaatacgacgccgtttcgaacaggtcggaggcagtggtgcttgattgtggaggagagcatagcacaagccgtgggttggagtctagcgcttgacatcttcggtttcttagttaatttttatttttctcttattttgagagagaatgatgaggtggtataatataatatttattgtatgcaagtgaggtgcgtttttcttacctttctcatcctttactcaaccactcataaatcaacacgtggcacacgaaactcacgaattcaacttcttcaaggccaagccaaggcttttatttaaaaaagataaagaaaaaaaaaatcatatcatgacagcagtatgctttttaagtttattgagaaactagtaaatatacttaacttctttggttaaatctgcagtatgggtcctacctttggatgaacattctttggccaagggagttattagaaagaaggtgctcgataactcattggtgatgtcgtgatggtagttctgggaacatcaagaataatgtttggatctaaagaaagatgtaactacttactccttttacggcatttgaataatgtcacaaataaaggtgaaaaggtggcgtattactggcacaaatatgcaccaacataccttacctgcgcaatttaatatagcaggaaatagatatatcagcgctcatttgcgccgacaaaactcttacctgccatattttattgttggttggattagttttgtcgacgcaaataaaaccttgctttattattttttaaaaaaaaaatgataatttataataaatattataattgtttttaaatattaaattatatttgaaaaaaacataattaaataaaaaagcagtattgacatatataattaaatagtatctagatcgaactattataaaaagatgttcgagttgaaaagttagcaactaaacaaaagtgctaaagtaaaatattaaaagaagttctaaaaaaaaaagtcctaaagttaattataaaatatttatggtcctacagacgggcaatgtcattgttgttgttgttctgagtctcgggacaacatgatgatgatctagcaccaggaggagtggggaatggtagaagtggatccatagcaggcaagttgaaatcaggaacaacacaagaaagatactcaaactaatcttggaatcacttccggtagactttctgtgtttcatatggctacttcgaatactgaatttcatgttgtgcctcctacacctgtagttgtaaggcctcatactgttccatagtaacaaattgcgagttagcagcagaagacgtggcaggggctcttttggctctaactgccttctatcttaggagatggccaaagcctcttagatgtcgagatcgctcacccaatacttgcgtcataacaggcaagtttcatgggtactgggtgggatctatataatcataagcttgctgatcatcagtgggcgctggttgatttgcagccacttcaaccattttctcatacaaaactactgagatgttttgtccaagagatcatgtcccatgccctctaaaatcacttgaaatgtaatgatcgcttgactttatatgggaattagtagatatttgaggatttatttaatttatttatcattatatgcctcttagaagataactagtgtttatttttagaaatgggctttagattattattgttatccctgttcccgaatgggttctacacgggagtagcaaaagggagccacgtcagatcgtatgggaatattttggattccccttttcttaagataggatcagggaaggcttccgaatatttgggagagtgggtctattgtgaagaaggaatcagtccttgaagttgtaacctaacgctttcggtattcagaagtgttaaccgaggttttcggcaaccaatataataatagtaattaagagagctataaataattaagagagagatttttacggggcgttaatgagccttagtcc

SEQ ID NO: 17152 - DNA, 2954 bp, Cannabis sativa
ttactcacgacttatcggctctattatcttctgcccacagagattttctcctccgcaacaatggtgatgaggtctgatattttcagcaattttattgctttattaattccaattttattacccaggaaaaaaattaaagtggagaatttagatgtttaaatgtttttattttattatagactttttttatttaattatatttattacaaaaataattttttaataattccttcagtatatttaaataattaattgactatttttttaaacatacatagctaacactttaccaacaaacaaaaattaaagttattatagcgagacttgctttttattaggcgtaacaataaaaattgattaggaagtttgggatgaatatgtaaatttgaaatgatgaaaatctgatattaaaaaaattaggagtgtttatctaattcactttgcactattttactcatatttattcatattgtaaatagtttatagtgtttaatctgatattgtaagtgtagattggattatatatatcgatttaattctgtatgatttatgtatgtgtcgataccgaaagtttatagtttactagggtttttgattgatggggatttttgttgatttttatgttggtaggttaagattagtagtttgcatgggaaacctattggattgtatttttgtggatcatggtatgaaccgtgccgccattttaccccaaaattagtggaactctataacgagctggttggttcggaagagtttgaagtggtgtttgtgtcttctgatccagatgaggaattatttaatgacaacttctcagaaatgccatggcttgctattccattttctgatactgacaccataaaacgattgtatgaaacttttgatgtaatggggattcttcagcttatatttatcgattcaaatgggaaggtttcgacggataatggggtctcaattatggtcgaatatggtgttgatgcataccatttttctcgtgaaagattttatatcttgatagaccaaaaggaagaaactaagaggaaccaaaccttgagttctattttggtatctagctctcgtaactatctgctttccaaagatgggaatcaggtaaatttccctgcctacatgcattaatcttattttgctaattattagagggtgtttgatagtatttttgttctttttaatattttaatcacaaaaataaaagtaaaatttatattattaaaattttgtttttaaaaaaacaaaaatgtaatttatagggcacttttgtttttcaattttaaaaacagaaaatgaaagtgtgttttataaagtttattttttatatttattttcgattttatttaagtcaggttaggggctgggaccgggttcagtgccaggtcaaagtttaatcggagtctaaaataaatgttaccaaaagcaacctaactttattactttggtgttttaaacttttaacaatgattctaatttataggtacttgtgtctgagattgaaggtaaaacagttggactcttattaatgagttctgatgaatcatgcgttgaatttgctaatacacttattgacttttacaataagctcaaagaaaaaggtgagaattttgaagttgtgttaatatctctgaattatgaagaggaagaattcaaaaaagtattggaaacaattccatggttggccttaccatataaggataggactaatgagaaacttatgtattactttgatatttcaagccttcctacactagttataataggtccggatggtaagactgtgaactccaatgtagttcaaatggtaaaagaacttggcatcgatgcctacccttttacacaaacatgaatcccaaaacacttaagttgttgttactagtttttggagatgatggttcttgatgatattgttgttgccatgcatatgggaggaaatgggaaatggatatgttgttattctaatgtgaggaatgtgactttgatcatcaaagcaaaatatgcttttggagaaggtttaagaagagggtaaaaatggtcatggtgtttgagaatgaaaaagagggaattgtttgtgaaaagtttaaataaatctaagctctgtatgtttgtatttctatggtttgccatggtgtgtgtgtgtattgtcatctcattggaaatgttgcttgtaagttgtaattccactatgtatgcaaataattttgttgactagaggttatatgatgatgaatgtgtttccttatcattgggtcacttttaagctaaaatgctataatttcataagattaattaattaattcctttaaaaaatgaagattaatttattaaatgaatttgaagacaacaatttttaatgagaaaatagattagaatttttttctcttttgaattattactactatactaaatcaagaattgtgaatatttttaccggtaaaaagtgttctcccaaattatttcacaatgcttaaatatatcactttttgctatattttattccatttatctaacaaaattggtgatgcggctaatgtgtcattgccaaataaacaccaaattaatgtataatttaaataaaaactaattaaaattttaaaaattttaataaaaacattaaattagttatttttattcattaatagttataagaatatattttagaaaaaattaaattgtacatgtggcactaatataacattgacacatcaatattttgttagccatataggataaaacttaataaaaatcttatattttagcatgaatagtttgatagaattattaataaacaaaaatattatgggaatacacgatttggtagttgtaataatttgggaaaataaccttaaataactaaataaaattacggaatatttttataaaatatgtttgataattagagttagatgtgagagtaaataatagtataaccatgcctatttaat

SEQ ID NO: 17153 - DNA, 2147 bp, Cannabis sativa
agatcctggtaaaataatttctaacacgatgacctctggtaacgcagtagccggagcaacaccaaccccctcggggtctccatttagtaggtctaacaaagcgaaggtatcctccatgggaaggtttggaaaaatagaggcaaacaaaacttcatgagcatcaaatttaaaggcaccataacattacaaacgggttaatcaagctcaacagaggttatatgaagagggcagttctaccccgacgccctaattcctcaacaaattgataaaccacattactaaagtcatcatccctaaaagaaggaactaacttgagatgatgtaagaggaatgatcctggagaattggaacgggaagacttgaccccatcaaggacctacctaaaaaatctcccaagtgtaaaaaatacgtttctttttccttattgccccaccaggactgaggcatccttaacctacgaagtctcctgtcaaagacaacaggcttgacgctagcgtattcccggacagagggtatataaattaaagatgaaggggacttatggacaccgaatgagctggctctggggatccttgtattcaatatcgagaatgaaggatgtgggcgagaggcctttatatgtttgtccgccttcttagctgccttccagtcaactgcactttgggctgaggccacccagtcatcttcctccatctatctttggaaggcgttgtaatttcgcttagcctcctagacggtcaacatccgagactattcctccattaccttatcccaggcgttaggacagacaaccttcgaaaaattcgcatccttaatggtctgaggagccttaaggagacaaacctacccttcgaacagtttgcagtggtcaccaagtccccgacgttcaactcctccttgttgagtatctaagattcacatccttaatggtctgaagagccttaaggagacctaccctctgatagtttgcaacgtttaccaagtccctgacattcaactcctccttgttgaggatccaaaacaccgcttcgtgatccctaaaaaattgagtaggggtcgagcgatcgaaagcacaaaagtcgaatgaaaagaaaaaacatttcctacaatccttagagttcttttggtgaaaaaaagaaaagacttggtccctactatccgaatgagattgtaggtaataaaacccatccttaagtttatctcccctatcgtgtttcaaataaaatatcaagttttccaaatttttacaattagttacctaatcaaaatcattataatagtttgcattattcatttccaagcttttacataaacataaatcaattggcgaccatcaaacaaaaaatgaaaataagagagccaatttgacaagagatgaggtttcaaatcaccaagatgatgacaagaggctttagccaacagtatcccacaaatttcaacacaatagcatgtccctataacaaatagtccacaagaaaatagttcacttgtagctggcagtttacgtgttgtggctaggcatttgccttcagaactgagacttgtcaaggctgtcaaaataagggtggtccaatgctgctttagctgagattctttccgcagggtcatattttagcattttctgcattgtacaaacagatcaaatttattgatcacatcacattattatttctaaaataaaagaaaactagtagagcaatgatatctgtttaacaataacagactacatgattaaactagtatgtaatactcagcaattcgtcgattgaggaatgtattaagatgtatacattgcttatcaagaaagctgtagttgtagaagtcattagcactcatacacatcttcctaatttagaattcgagtaagatttatcgaatgtattaagatgtatacatttgttatcaaaatagttgtagttgtaaaagtcatttacactcgtacacacatcttcccaatttacaacttgagtaaattaaacaccaaagggctagcagtagctcttatttaattgttggtttatatgacagtattatgttgccatctgcaatagtaaaactgccatggagaaaatatgcactcaattcaattctaactagcgttaatcctagatgacttcacactcactttcctgtttaaaaaaattctt

SEQ ID NO: 17154 - DNA, 5268 bp, Cannabis sativa
aatagctttccattataatattcttttaaattccatttataaatattctaaattttagatataaaattttggaaacagaaatatatattaaaaaaaaaagatatactttttttatactctttttattataatggaaaatgaaacattctagctgttaacttaaaaatgaaacattctacaattttcattatttttctctaaaagacaaattgtagacaatttccttgaaaaagaataaataaataaacaattctaatcaattacggcacaaaccttagaaattagaatctcgcttcaatatcgaaactttatagaaatatttatcaatattcacaatcccaaatataataagtttttatttttactgaaaataaaatgtatattttttattatccaaaaaaagaaaaaaagaaaaaaagtaaatgttatttttgacatttcagtggactgtttcggaaatccaggaagattatgcatacatgtatatattcccgcatttctctgtaacaacaagtacaactgttaatatttaaggtatatgtgacaaccgagcgataagagtaagcttaaatagaaattgaacacttagttaattgaataatacatataaaatttgtttactttttccatgtgagttttaaagaggtataaaatatatataaataaatccaaataaacatttgtatatatcttatatatattcttcgtttgttgattttgaactaaagacaaggcgccctttaaagctatcctttctgtcattttgctttctgaggagtgttgttagtgtcacaatacaagaattgaagagacaaaacaaagaaagggaaaggaaaacatggattagaagaagaagaagaagaaaagaaagagagaaaaagtgattgagcaataatggaatttctggggcctaggattggctgatttcactttgtttcatcttctcacgtttaagacattgggtgggtatatcaatcttttatcttcaacccattattctaattagttttttgttttttattccatttcttagttaattattctccattatttactgaagtattccagtcttttaaaatgggtttttttcttcttcttagatatgttaaaaaaccatggcaacagagttattaaatgtctggaacttattatcattgttttttttttatttgataatatagaggctagaatatttctgattttcgtcttcgtattaatttttcttgtctgggaatataaagatatattatattccagagttcttaaatgagtgcttgggattatagtggtctcttatctcatttctgttgtttttttttacctctgtaaatgtggtaataacgtgatatactatgtcggatttttcagtacagtttttttagtctgacatttctgttttgagtatttacactcacaattcctggttatctgtgtctacattatatgcgtatatattatttattttattttatcttcattcattgatttttattcgatttgttaatttttattgaattaatattctctccagtacaatctgtttttcaattaaaatttctttcataccatttccgcatcatttaaaaagttgttaagagtaaaaaactaattctcgtttaagaaccaacaactcttttaatttttttaggaataaaatttcatttccaggcttttatgagcgaaaaaggtttcaatttgggttttattggttgataattaggcgtttagagatttgttaaaataataatgtgaatgttttttttcttgaactggtaagttttgctgtgttttgtttatttatacaatatttgtattcattgtcccatttttggtaaaacattgccttaattctcattcccttagacaacaaaatcgagtctgtatttggtgtagtaaattttatacttcacatatttggtttattaatttccttttctttttttttttttcatttctcgtgtaataatttcacttatgagattttgccaaactcttcttactgagatatttactctatgtattgtccgactaacatgatgtgttcctctaatagattttcatattcaggattgagatttaagatggatttttcagattctaccagagtagtattttctagaattcgagaattggagccagaacatgtgaccaagattattggctatcttctgcttcaagacaatggggatcgtgagatgatccggctggcttttggcccagataacttgatacagtctttagtcaacaaagcgaaaacagagctgggattgtcgaagccatcgcctagttcgccttctcaggctaatcaacaacctgttctggaccattctttgcacttcagttcctacactcctgcttcagcaagggttgctttccctccaccaactctcataactcagagtccttattgggatcaccaactgtctgcggagcataaattatttcgtaatgctgagctgcagccactgtatcctgactctgtggctgctgaagattttcatcttcaaaaccaactgcagtttttaagattggatgatccactggaatctgctagctctgttagtgcagaccaagttagcagttactactacactgagcctacattgggtttgaggcagagtcgaaggtctccaagcttgcctgaacttcctgttaagacttgtcattatttcaacaaggggttttgtaagcatggaagcaactgtaagtactatcatggccaacactcgccagatagctttcttcatcatcatgtattctctgactataccaatgatgaccatgctatctctcctggctctcttgagaagctggagatggagataaccgagcttctgagatcgaggcgggggtgccccgtatctattgcctctttgccaatgatgtattatgagaaatatgggaggtcacttcaggctgaaggataccttacagaaagccaaaggcatggtaagacaggttacagtcttacaaaactcctagctcggttgaagaacagtattcgactccttgataggtgactttaaaattcacgttttatgattttatctcgattcattgttaaatagtttgctggagtagatttctcatgttttgaagttgacatttatatatatatatatatatatatatgtatatatatcttcaggcctcatggtcagcattcagtcatattggcagaagatgctcctagatatctagagcatggtggtgacaaaaatgaatctggtggaattgtttctggttctcgacagatttatcttacttttcctgctgagagtaccttcacagagcaagatgtctctaattatttctggtaattgtttaggcatttttttttcttctcacccttaataattttatcattagaacttattagtgtttcattttattttaatttttttcaattgcagcaaatatggacctgttcaggatgtaaggattccatgtcaacagaagagaatgtttggatttgttacctttgtttaccaggagacagtcaaggaaattctaggaaagggcaatcctcattttgtctgcggtgctcgtgttttggtaaaaccttacagagagaagtcaaggcttgttgataggttagttttttatcaattttcagattgaaaggttaagttaattgcacaaatttttgttcttggaaaagttggatatattgacattcatgtattgctaatttggaaaagtttagttaaaaaaatataaaaacagaattgttttatataaattaggtggaaaaggaaggattcattgatccagacatggagtagaagccaaactgagaaatgaaaatattctttctaaaacccgaatagtgctactgatggcctcccctgttccacattgacaaattctaccatttagggcaaatgttaagtttataatttatgaaatcattatacgaatagtttagtatgattataaattataatcttgtagtaaagtatttttttctttgcaggaaagagaaaatgttatgctgcaataacgttgtagatagagagtccgatcttccattgtgtgagtaaaatgttgttatttttatgcaacttcaaattttattatttcttatgtgtatttgattgtatctcaagtgcttgtatgattttatagtgccaagggtatatgatgattcaagcatctttaggaaacactcaatctcaatggacaatgagcaagcattcgaagttgataggtgcttctcggagatgaattatgcagctaagaccttgtctaaccattctttttatagctacccaatggatgagttgaaaattacagaaggtacgttgccacattttgaatatgaaactttgccttttaaaagatactactctcatctcttgatgttgcttggtctagccggtggtggtgcagaacaagctgaatttccatctcttgatggttttagttacttttttgatgctttaaacaaccctaccaacattgaggaaaatagacttcatattcgtactaattatagtgatcatcaagataggtaaactatccataactcgagtatctttttttttcactcttactttttgtattccttcttttaatgttttttttttttgtttgtttttaacagccagggagtaaatcttccagagagtccatttgcacaggcaataggaagcagcatatcaacggttacttagatactcaagacagccatcatgttgttatgactaattcaagggattaatacaacaagagtttcgtgttttattttatttcctttttctttttattttagttctcacctcaacaatattactacaattacttaggaggttatactgagagaaacactagaaggagaaggagaaacttcagttgattacaaataattggtatagaaagttgatatgtgacaaggaatgattctaaagatctatccaaaacttgaattctaataaaatagcaatacatagttttatttctactttgattgtttagtttatgatgtttacctgtaaaattgattgaacttttacatattgttgtgttcataaataggcagcatgacacttcttaagaatgtaatatgttccggtcatcgtgtaaagttagtggcattattcttttatcaatataaggctatctaacatattactattcagtgttaaggtttgacaacctcatagcatcttttataaagtggagagaaaagggtcatgattttcattcatttgatctttataatcaccatataaagtaagttcggtcccgagaaccaccatataaagt

SEQ ID NO: 17155 - DNA, 1763 bp, Cannabis sativa
gtccgcaatagcaggaagaatacttacaatagttacatgatctggttccaacgatgtggtcatctgcatttcatgaaataacttcaaagcttcacggggttgcctgttctgacaatatccactaatcattgtattccaggaaataaggttcttttcctgcatggcatcaaataaaaatctagcacactgtagataaccaccacggcaatagccatagatcatactcgtccaagacaccacattcctatctgtcatcttgttaaacaaatttcgagcagacccaatctcccctaattttgcataaccatcaatcattacattatcagtagctgagtctttctcaggcatctgattgaagagctctcttgcgttaatcatgtctcctaacctcgcataaccacaaataagagctgtccatgacacttggtttctttcattcattccatcaaacaacattctggcatagctcatattcccgaacttggcatacatatcaaccaacgccgttagcacatacatatttgagcagaaccctgtttttgcaacaagactgtgtatctcttggccttcccgaatggcacatttcgaagcacaagacttcactaatatcacaaacgtataaccattaggaacaaacccggtgttcctcctaagatcgccatagagagaaaatgattcagcgaactgctgcatattggtgtggcctttgatcatgcagttacagagaaagatatcgtctctgtggggccttttatcaaacacctgtcgagcgtgggagagcaagacgattgaattttgatggcccccaaggggaggagaagtgaaggcggtaatgaacttggtgaggagattgaggttggtttcgagagcgtttcggagcatgaaagcgtggatttggaggagtgaggcaatggtgtttcttcgttggagtaagtaaaagcatcttctttctagtgagctccatatatgatccttcgtcatcggtgcatatcaattttttcttttaactaatcgacgatgcatatcaaattgatccctcacattaataataactcaatcaatataatcatgtgcggtgcgtattataaatttataactagaaaattctaaaattgtgtatcaatcctagttatattcataaaattataacatatttattttggagaattactctccatattgtttttttaaatttactttttgggttttaaaaatacttccagtgctagttgcagtaaacatttttatacaattttttgttacaatttaaattgcagcattagttgatttaggagttttatgtaaaatttcgtaaaaatacaaaaaataaataaataaataaataaataaaaaataaaactagtttgaaatgtaaaaatgaaaaaacctctttaagttataacaattttataataattactcttaaattaaaataattaaaatatcatgagttcaatacgttagaaaagtatttttcctttccttttttttacttatatttaatttaagatttcaattaatttaataattttaaattctatcatattatattaataaattttatttttcatatttttggattcaatccaatttttataataactcaaaaaaatctaatctacaaaagtgcatattaaatcgattattttaaattagttactttttaatattgaattacttaaaaaatttaattctttttcacaaaactaacaacaaaataaaattaattattatagttatatgtctttgttatacccatattt

SEQ ID NO: 17156 - DNA, 5635 bp, Cannabis sativa
gtaaggttttcttctcttcaatcagcgtagtgaccttcgcttcttgattttgaaggagaatactgaggttttccttttcctccttctaagtgttcacttccttggtcaccgcctccaggtcctcctcaagcttggctatggacgatgtatcatcaatctattactaaagatctttgatgagcttttttgcagcagcaatcggcttgttttattcaccctaacttaaaagtctgacgctcgacctcctttttggcatcttctagtgttttcttcagagtgttaggggctattgtgacttttagatgagcagattttgctctggaataagtctatgccatctttagattaagcttcacgctaaaatagggttaaacgtgcacgacgcaaaacctgtatataataatggaaggaaaagtactgactcgggtggcttccttcaacataccacccattagcagttccaccgacatctcctccaccctagtaagttgctcattcaccacatgcatcactcaatcctgatagaaagtgagcattggtctctagatttagtgcggacagagtagcaaatggacttggcaaactgggtccctcagtgtttgcccccttagagattttggcccaagcagtagatgcttgagacatagaatttttcttggtcaaaggaatttaattaaaaccaccacctgatgaacatccacagagacaacagtcaggtttccctcagtggtaattttaggagttttagtgcttggagcaatactctttagcagagtatcacccaccttcagacgtttggtcgaagatttcttacaagaagcatcacttgacctcttcttcaaaagacgcactgctgtctacgacatgacagcataaaaagaatgaacacttgtcagaaagcataattaactaagaacgaacagggtgtaaaagtaaaaaataatctaccctacacatgaacgggagcagcctcccaaataagcaatgaaggagtatcctcatcaaaagagtcatcttcttcttcctcaactacaatagcctttccctttccttccacctagatagaaggacgagcagcctcttcaagataatctctaatcttaatggactgctcaacaggtacttggtcaccttggggatctttcttcttcttcttctttttcttcaaagctttctactcgaatgcaacactcttaatcatgtgctcgagctcatggactttgtcagatggatagagtgcgcacttgatgaaattggccttattggccaagattttgatattccgagcctattcaagaagttacagtattttttgggctctgttcataagttctagggtaaagggaggttggcagtaagatggaatattctgaaagttaatacgattggtgcccatgtccttgataaaatggtagtcctctacaaatctaccaattttggatacgttcatgttcgtggttttgggcagccacttatgctcatctgagaaaagtaaaagtacctaaatctattctgcttaggggttgacttcaagttaaacaaccaattagtgttgtggggagaaggctgaccccatctttgtgaagcatacaacaagaacaacatagaaagatattttataccttttggagtaagttgggacgatcagatgtgataatagtttgttatttccttcaaataaggatgcaacgatagcattacaccttgctaggcatgtggtcctgaccatgcacaaaagccacctattagtcaccaactacccgggactagggagaaatgccttagctttccaaagaagaccttctttatggagattagtcaatctctaaaaggtcaggacggatggtggtgacccaccgagcacccctttgacgatgattgtttataattcgggcctcagtgtattcttcttcaacgtaattacaactagccactagaacttcaccgtcctcagagataggttcttcatccttactgaaacagccaaagggttgtacccaaaattccttctcctcttcttttccttctccctcagccgcaggagcggtggtaggacagacattgccctggtcctccactgcttggacctcaacgtccctatcatttataattttttcctcattcaaaggcctagcttgttcttctctagctgcagcaaacatccaagcaaactgaaggtttgtttctaaagccttccttatggtcttctttgtccgtgccatcattctatgttcggggagggtgtttgattcattggtatgtcttacaatagtcacaattaaatcatctacaacagctcccttagcagatagagatggtcgggcttcaagtagtatctcagcaaccccaggatagaccctatacatccaagatgtaggaagatagggcctccaacaattctttagttcccaaataaaatacctatatccttctccacgtatttggtcggggtactgattgtgttgcaccgcaggctctggagacgctttatgctcactactcacttcccatcctcaaagctagagtttgaaagattttcattggatgaagatgaatttacatggagccgaggagggtcttcgtacaaaagctaaagtagatcctggtcaatatggtgtttgcctccctagaattcaccagggttcatctaaaaaaagataggagataagagatgagagttggatagagggaaggttgaaaaacgagtttaaaatgccaactaggccgattaaagacaaaaaggaaggattcgattctaaaatggaattcccaaacctagaagttcaaaacttcaaagaaattactagaaatctttaaaatctctggaatgggtgaatatgatcaattttaggtcaaaaatgatgcgtagttaaagaatcagaaggcctaatcaaatgttagtcaaagttacaagctctaatatcttatattctatgataagtcaagaatagttcaagaatagataattttccagcaaggaattcaaaaaaataatgtgcatatttgacaaatattgcataaagttaagggaaaaacaacttactcacaattcaaaaccttatagatctactcatagggtatcaacaatgaagtttcaagtagaattttctttgaagatttggaaataaaagagaaatttcatggctttaggttttttgggaatgaaaatggctaaaagagtttcaataaggtttgattcccttttatgggcatcttcaaggggaaattaattcatttcaaattcaaatatttgaggtttccaccaaaaaatgaacgttagtactcattgcaaaagtacaaacatcatgcatgcgatatcactcaaccgtcaatgtgtgattcgaggtatagctttcaagcagtatttaatgccccatacactgaaaggaccttcgatcaagttacatcggatcaaagttgacaactagacatgcataacccatccggacagcttcctggctgaataagtccacgtgggaccaagaagattccacgcagatttaggaggaaaatgttagcctaatttctgtactatgacgtggcatcaatctaggtgacacgtgtatcatatctcataacttgggtgaatgattctactcctagcaggttgtgtaaattgttatggtgttcaaagccaagcatagatgataggatgtccaaacaaagttacaggtagacatcccaccaagttgatcacataggtaactcacatgcattgacaaggatgtgtgagttagcaattttagatatgcacatcgttatttccaagcttgcatgtcacgatgtaatccctacattggtggaattgattcgtatctataaagaataaaggtaatcaacataaatttcttaatttatttattgtaattatggaactaaggtagtttcttatttaatttgttatagattaatggaaaccattttcatataattcatccctataaataattgtttgatcatctcactatttaggaacacaaaactattcagagagtacacactcaagagtaaaatattcttgatctatgagtaaactactaagagatctttgtaagagctttcaagagagagtagttcattatttctcacatgtcaatacaacataaaggggagtagactattaccaactttaagtggccgaacctctacaaatctggtcttttctttacttgatgctctttactttctgttatttaattattctcatccctttaattaagattcattatcgttggataaaagtgaggtcaacaatacccataatataattggtcactttattttgtatcacaatttataataacatatacattttacatatgtacctacaaataggatttaatccaacactaacaaaataaagcaaattattattgttttatatctccaacaataaattataatatttaagtaaaatataactaacaaattctaaagaaaagaagaaaaaaattatatgtaaataaatcactacaaaaaaatggcctatctcagcgtttcaatttggcttggcacatgtgtgttgccgagttaagcttgaaaattaaaaaaaaaattctcgagtatagcaatctcggtgggcattgagtgtactggcattatagaaatttttcataattaaaaatttgaccaacaacggcgggccatttgtcgcctaccgttattggtcccttaaaatgaaattttgccctgaagtttaccaataatgacgggccgcaaaaggcccgctaagattagtgccttattttttaaaaaaattcgggctgagatttaccaatcacgacgggccaatatatgcacgttgtgatttctcttctaaaattttaaaacctcaattagcctgccagcctgcccattcttccctctcttttcttctccccaatttttttcactcttttctctaaacctccgaaaaaggcagccattattgggtctgaaaattcctccactaaatcttaattttcttctactctatttcatcacaatcactctaagaagcaaatgtgagtttgaatgtaactattgatttattttataatatctttttccaaatagtttttaattaatagtagtaatactatcttgtattttgattttttaagtttgaatttgtttgggtaagcttcatacaacataaaggaagcttgagaattgtttagagcttcacttgtgtgagttttgattatttcttctttcttttatgtttttgattgaaaatagcttttaattttgttttttttttttaaaaaaaaaaagttagtaaaataataaaatactagattgtatttggatattttaggtttaaatttatttgggcaatatcagtacaacacaaaggaagcttgtgaattgcttgaatttttatttaggttagtcttgaactactttatatatatatattattttttgctgaaaatggctgttttttttgaataaaaaaatgagtcatgtttgttcattatgtgcgtgttttgctttgtatatttttagttttctatgttgaatacttttcaaacaactttataatagcttgaaaatttcttaagacctccatttgagcaagttgttaaattttttggatgaaaatgattattaaatatgtaatttaggttttttgtgtaaatattattttaga

SEQ ID NO: 17157 - DNA, 5380 bp, Cannabis sativa
gggtgtgtagaagccacatacggacttgaatcatgaggtagccagggagtgtgcagaatatgagtcttcataccatttccaatacaaattcgagcaccagctttaatcaaactttgtgtttcaaaaatactacgccaaatgaaactcggattatttcccaacttagcattaaggaaggtactatgcgggtaataccttgcgggtaaagaaaggttataatcacggatgcttcgaaagcctagccctccaacacttttatgtttgcataaacgagaccaactaacccaagttactccccgagttttctttggattcgagtgccaccaatacttggccatcatttgctccaaatgactacaagtttttaaaggtaataggaacacagacatagcataactagggatagcctgagccacagtcttcaataacacttctttccctgcctttgacaaaaatcgaccctcccagctttggatcctcttctgcattttgtcttttaagaaccccagaaccgcatctttgtttctccccatcgtacaaggaagccccaagtacgtgctattctcatttgcctcagtcataccaaggataccgcacagtctcgaccgagtggccataggagtgtttgtgctaaaaaagatggacgacttcaagaagttaactttctgccccgacgccatttcaaagatgttcaacaagctcaacacactagtagcctctctctcatttgcacgacaatatatgtagctgtcgtctgcaaaaaacatatgtgaaatagtaggagctccatttgctactttgcaacctttcaaccggccttgtctttcaaattgtcttattaaagaagtaaggccctctgaacacagaagaaataggtacggtgacaaaggatcaccttgacgaagaccacgagtcggaacaatgggtcccatctcccgtccactattgaccaccatataattcacattagttaccgtggccaacacaagatccacaaatttatcatgaaatccaagcttaagcatcatagcacgtaaaaaaccccattctacccgatcataagccttgctaaggtctaactttagagccatatagccttctttgccgactctctttcttttaaggtaatgcatcacttcaaaggataccattatgttatccgaaattaggcggccaggaacgaaagcactttgagaatcagagattatctgaggtagaatagtcttcaaccgattagcaagtaccttggatacgatcttgtaaacaacattgcataaagagatgggacgtagatcactcattgttgtaggatttttcttcttaagaatgagcacaacattagtattacatagcgaatcaggcaaagtgcaactttggaaaaaatcattaacaagagcgacaacatcacctttaacctcatgccaatatttctggaaaaatcccggagtcataccatcagggcctggtgacttatctgggtgcatttggaaaagtgctttacgaatctcctcttcattaaggtcacgaagcagatcaccattctgctcactagagacacggggttgaacattacccacaaccggttgccaagtagcttgagacgctgcaaaaagattctgaaagtaatcaacaatcacactagacagcccattgtcccaatccacccaagaaccatgttcattttgaagcttatggataagattatttttacgccgagaagtagccttagcatgaaaaaatttgctgtttcgatcacccgcttccaaccacaattgctttgaacgttgacgccaaaacacctccttttgggtaaggatttcatacaattcttcctcagcttgcttataccgaaccaaagagtcagggtcacgggcccttttaaattttcgaatttcctttttacaatcagcaagacgttgtttaaagtttcccgtgaactctttaccccatgctaataaattcaacccacaaagcttgattttatttaccaccgatcctgagtccaacgagccccagctgtctttaacgatttgaccacacataggctctcgcagccatgcattttcaaagcgaaagtggtgaaccggctggccgacattgtgaattattgtttctaaaaacagtgggcaatgatccgacatggtaacttcaagattaaataattgagctgaattgaaaagttgtgtccaagagagactaaccaaagcacggtcaagtttgacttcaacccagttgttgcttccacggcctctttcccatgtgtacgggtaaccttttagctccatatcatgaaggtgagagtcatcaagagcaagctgaaaaccatccagtagccattgaggataaggagagcctccatttttatctgagtgtgaaagtgtgttgttaagatcgccaataacacaccaaggatatgaatactcagtcgaaagtgtgcgtaaaaggttccacgttttgaatcgaagcgatcgattgggttcaccataaatcccagtaagccgccactcattgtccccattcaagccaatttttatgtcaacatgacacacagagtaacccaaaacaagaacatcttctttatgtctccaaagcatggccacccctccactgtgtccccttgcatccaccgaaaaagcaccatcaaaactgacagcaacacgcaaacgctctactacatctttacgggcaaaagtttcacaaagaaagacatagttgggcttcttttggaccacaaggtccgtaaggaattgaaaagtccttgggttcccaagcccacggcaattccagctcaagatactcataatgagcggtgggcctggaaaccagaacccaccaaggacccattttttgagcccacgtttgtttcattaacttctccagagacatcctcaacaaaaatggccatgtcctcatcaatattattagagtcaatgggcccactagtagacattcttctacgtttactttccataatggatattccttcctcatttagatcaatatcatgatgcccatgcaaatcccccacattacctcccaagttaatagctggctcttctgtaatattcatagacgccatattaggaatggccatcctccccactaatgttgctatcccttgattagtggacttgggatcaatcatctttgatttagcttgattctcaatcccatgataagctccctgcccattcaatgctctagatccgcctggttgttgttcacacatgccattgtcgttgtgggttgccggagtagcttcacaccgggttacgaactccgaatcatcgattccgttgcgtaaccacttagcaccaatgagcttagtctgtcttctgaggggagccttcatgaaaacaccgtatggcttgactattttgtccgccagagtatcaaacaatctcatacagaatcggtctgagtgtcccaaaagaccacaaataaaatagaacgtgggtacattctcatatttaaatgtaatccaaataaactcagtcttggttttccacagtttcatcttacgtttcagaggcttgttgagatccaaggttactcgaatacgcatatagtcccgccataatcccaaaaaattcttcgggtccgtttcagccagctttccaatatagttccccacattcttcaaatttctctccgtcatgtaacccgtttgaagatcatgaacttgaacccataaatcaatggtgtccaacggtaccgttcgaggattttcgcctgccttgagtctcttcatgattagcgctttgcgattgaaagtccatgggctgccttccatgactcagctaatatcgatttcatggtaaaactgaaacaaataccttaccccaccatccagttctttgatatacacacccatacctggtttccacagagcagctagcgtttgttgcatagatgggaaatcaacaactccatcattgaggaagcgccctaccaaacaccaacgagcatcaaacgcaacaatctcttcttcctgtatctcttcacaaaaaacgcccccttcatcttcatcatcaagtgtaatattctccaagtcttctctattattgctagaagacgccatagtcaaaacacacactaagacaagacagcaaacgtagacgacaataagaaacaaccttaaacgacagatttgaaaagtgatcttaacaacctgaccatgtcaaaagacaagacgaaatccactttctttcttttagtcacttaatctagggacaaattcaagtatattttttaagataatgtagacccctatttttaataatgtgataaatacaagtttctttttttacattgatttggtacatgatttgataccctctaacaccactaatatcttaaatttccatataatgaagtcaacattcttatttgtcttttcatgacactatagctagcttggtcaacacgtctatgccttgcctcccaagctcatattataattattctcaaaactttttacaaattatgatattataaatatagaaacaaagccatattacactcttcagccagggtcatctcaaatcccaaaggccacacaataatcaatttacccaaaacatgaaatgggacaaggaacaaggttaccaacatgaggtggttcgggctaatcggacccatcctatatccgaaaccagaaacgtgaatcgggtcgggtcacaacccgttaacccatccggatcgttcacttgggtgtccccgaccaggcccaagctgacatgcaagtgttgcggtcagcctccgtgtaacgggtgtcacttgcggccatcgtggaaagcaaaggacaagactaaagggacacgtaagcttaaatcaaacgacaccgttttggtttataaggatttgctttctgggttttctgccaccgccattttggatctttttgatcgtgattatcaaatcaagtactccatttacgatacttgtgagaaagaccagcaggaggaggaagaagaagaagttgactgtgattatgatatctaattgctgacgtggctctagctgattggtagtctttgtgatgtgattgtaagaaagagagattaatcggtgaaacttatctttttgatgatcaattttggtcctttacttatttagctcttaagaaatcatgtggtaattattaagctacatgtatttgtttaactagattataatgatatgtaattaatggagataattaaataatttccattacattttttctaagtttcaattataaagttatgataaaaaggtgtaaatatttattgtaaaatgaaatgaaaagaaaaagagcaatttgcggcgaaacccccttatgttttgatttttatacacttaacccccttatctttatttttggtggcaaaaccccctt

SEQ ID NO: 17158 - DNA, 4568 bp, Cannabis sativa
gttgcacctagtagattgtggttaatataaaaataagtagtaatgtcatgtgtgcttcatgtacatatttcaagaatgcgacaggtatagaagaaaatgtgagaaaaaagcttttatatagagctagagtatcggcaaaaacaatgtcaacaaacaaagcacacttaactaatttatttgcctacctctacgatagcaagtcgatctgtactttattggttttggtgtgtaatttagctagagatttattaggcttagataaggatttggtttggagagcaattcctccaagataattttaagtaattgtagctctgtatttattggtttttctgtcgaagttactcctaaaaaaaaagtctgtactacatctttattagtgtctacttttgcccaagatgatcaatcttggacacgtgataacctagattaggttggttttctatgagtatttggtaaattatgatgatttcatgtcggagtagcctaagctgaaattttaccaagcacaagaaagtaatgttatgctgaacatgttcccatatttctcgaatgtgttgaacatgttactatgttaatttaggctgtttgtagaaaattgaaaataaggtgaattcttaacgctacaaacacaaacaattaagtgatactattagtaccttaagatgtgaatactagttagtagtttttattcaataataaaatgtattaaacttaatattaaaatattacactaataacaatacaatatatagtattggataaggctaatgtttcttataaatagagtaactattgatttgatgatgagtggagtaacttatatttttataaatgatttaataattttacatttaagtatcacgagtaactatttattcgttattttgttcttaatatttaagtgtcttttatactatgtcgtgcatttgacttactgtctgcatagatgtggatcgaaggctcacaaagaatatagttatgatgtcatgacaagaaacttaaaggtttatctcaaacccgaccttccaccctcgagccccttgtctgtccgtctatctccttttcttcttctcgagtgtgcacgacagtggtggtgctccggtcaccacatgccaaaatggaggccacgaatcgtggtggtgctccggttgaactctcgtggttggctgggttaatgaaaaagatgaacaagaaaaaaaaaatatataataaaataaaataaatttatgattttaaaatatattttttagttttttattttattttaatttttttaatgaaaattatttttttgaccaataaaaaattgacacgtggcactttatttgggtttaatatatagttaaaaaaaggaaacaatcgacttacaaaaaatgtcacgttgagaactattaccgtcaatttttgaggttggggattaatgtgcatcaaccctatatttttgggaacttttgcaacaattatccttttttatatgtataaaaaataactagttagtatattattagtattatagtaatcaaaacatttacggtaaaatactcagaaaaatataaaataatggagaattgagattttttttttattttttatatttagtataattaagtttgaatagggtatgtatatgctaatgtgacgcgatatgttttaatatttaatttgttttgagataattttgtttaaattttaagtatattaatttatataaaattcccaacttatgcagtactgcaaatctgcaatattatagttgtcaattattgttggcttggctttgatgtaattaatagtagtgagaataagaaacaaagaaaattttctcaatcaatggaactgattgtgatattctggtgaacatgcatttgagtaatcaacatatatatcatgtacctaactaataagagtaactgtaagaccttgtagctgtatattgtagttgtataatatatatgtagggacacgattttgtcttgtgatgtacttttacggaatatattccgttgtacattatatgggtctcagggtacattagatgggtctcagggtacgttaccatttttttaaccctaattacccctagatcaactccagccctcaaatcaaataactcctccttttaatggctgccgtatatcacgggatacattccgtgaaagtacatcatgtcggtgtccctacatatgtatagtgtaagttttacaaattgcattaactaattattttagaaattaagaacaataatacatgatatatgcctacatattctcacaccatatatagtaattaaagtaaagttttcaacaacaaattattaaacaggcacaaaagaaatagttaaaccgaagagtacatcacatcacaaccattaattgaccacatctctactataaaatctctcaaacagctctataataagaataataataatgataaattattctttataataattatattatttctttattaatgtattttaataaattagttaggtttcctgcaattggtacgaatctgaccattggtcccagttagggggctaagttggcccattttgatcatagcattggcaaaatcgttataaaactgatcagcatcttcactgtaagtggtgacaagagaatctgttgagcccccactaaagagttgctgatctgaatgtaaaagccctttcttctccaccaaattcttgtaataaccattatcgaatataacatggcttttgttgtcaagtgaagaaagcttgtcatcatcatctgtgcttgaactgcagtttgttttcaaagatgttgccaatgaagaatcaatattagtctcattgtagattctgtttcggaacataacacacctagcttctcctgttgtatgagctcctgcatatttatatatatatacacacaattgtaaatgtacgtacgtggtaagtatgcattatattattataatcaaaatatatacatatacctgaaagagcaacgagttctttttctgtgaatcccttgagtgagaaagtagttatgagatcatcaagatctaatattgaagatgggagttgggtattcgcagcagtgaagcttgcatttgtcgagtctcttcttcctaactcaactttccaagaagggccccccaactatatatatcaaagaaattataatatcaatatcaatattatatgttaatatatacataatattcgaaacatagtatattgtacatactagaacaacagaatcacgagctgcaacggctagtatatctgcacaagaaacgaccccagggcaaagagtttcgagtttagactttatagtgtcaattacatcgaaacctctcactgagtctacatttggtgctgatgtcttctctccattgatgcttgaactgtcatctaatagaatagatgcatcacagccctgcatatatataacaaaataaagttagccatcattacaaatttttatcacactacaaaagacttgagttttagtcacaacacccttaaaaaaaattgtgactaaaacttttgatcacgatatttttgacttttagctacaaattttgttgtgactaaaaaccaagtttttttaatggatcactacatacatgatgagttgttactaaatattttgtttagttatactagcaatttttgttgtgaccaaattatgataattttttttcttttttgtatgagaatttccaactcacatagcaaagcttgaaattttcgaaaagttgtaagtgtaacgtttttcatgtgtgctaaactatggcaatttaatttgagatatataagatagtgtaaagatataatagtaagaagaagaaattaaccacttgaggctagttcaagtggctataaaagggtgcgtgttggaggttttgagtttgagtcccaaattatacattgtaatatataaacgtttaattcaaaataaaatagtaagaagaagaacttgcattaacaaagcagtcatggaagtgaaggcggagcaaggaggctcccattcggtgttccttgacgactgcctttattacgatggctttgatggtggagagggcttttgaacatgttgagttgtagaaatctgtggacaactgatcatcagcagaacccattttgaagttgacaacaagtacaactacaaacacaaataagcatagtaatggtcttttaaaggaaatattaacattggataagtgtaatgacttcaacgccatatctgccaatatatggagaattaataatttctatgtttggatgaagattgcaagactaaatgtagtacatgcactatatatagacgatcttatagtgtctattaaaatacaatatgcttttagtaagaagtcaaagcttatgagtttgtttcttctttttcttctttaaaatagtaaaaatagccttcatcaacctaaccccaatatcattctagtagtgtagggaaaccaaaatttcatgtatttttagtcaaaacgattatatatgtattttgtgtgaacatatttggcatgggaatctatatatggtcaaaatattaaattttattattatatggttagct

SEQ ID NO: 17159 - DNA, 3468 bp, Cannabis sativa
  modified_base (3428)..(3432): a, c, t, g, unknown or other
aacaaaacattaaacaagttgtttaataatccaggtgggccgggcccactatatgaagcccgcatgtgaatggagcgtgtggtttacgcgatgtgtttaataattgggttagcatcgcaataaaaaatgaatcaaaagggtaaataaggcaaagcagaattcctaatttgatacatccaagaacaagtggatgttactgtactgggagaatcaggactcagagccgttgaataagaaagttaaaagaaaataaattaagtactgatttaaaaaacaaaagaaaacaacaaaaaaaaaagtttctgagttaagagataaaatacaattaaaagtaaaaagttgatattcttttttcaaagtaccacggaaaatgtacttaaaattctctatcacatatcaggcacaaagaaagagaagagaactaaagagagtctctttctctctctctgaaagctgaacaattttagtagagaacaaaagaaaaatagataaataaataaatctgtcagggttaacgaaaaaaataaatataaaaatgtaattgtagttgtatgtactcaagtaactcaactactctgtctttcacatgtttagatcctaactcaaactgtcaactatactttgtaatggatattggggtattgttttgccaaagatatatgatatgaggtgagaaaataaaagggaaaaaaatagggtaatcgtaatttaatttcttcgaaaaaaaaaaaaaaagaatcgtaatttaattcaatacccccacgaaaccataaaacctctctcaaccttgacaaaaaaaaaaaaaaaaacttctgtttttaacttggaccctgctttcatgcattgaaaggtgtgataaaaaagtcaaaacaatatcgatattcccagcagccaaaacaaagctcagtaagacgaaaccatggagtcagtacctaaatcatttcacaaaagttttccagatccatttcttttaatttgggtttcaaacaaaatgaaaaagaaaaaaaaaacgaacatgcacatacacacgtatatacacaaacataaacccatacagattttcaagagaaaaaatgcaataaaaaaggtggagggatataccagatcaacagtttcattcttgatctcctccagggagatcgctttgtcaccccccatcttcaacacacggtaaagaatctaacacagttcgtataaatatatatatataaggtaaaagtgagggaaagtgaagagcaatggatgatagagaatgctctctatcccaagtaagaagaagaaatgggaatggtaatgaaaatttggctcagcaagaccctccttttaaatctctctcgtcagtgtaagaagaggcatttgtgtctaatgtcaatgtgacccgccgtttaatctctccccaagtgggcctcttttttaaacaatatttttctctaatctctttctctccatatattattattattattttctctctcttattaccggtgactcgtcagttgctgctcattttgacaatgcatgcggtttacaacatgccccttgcgtacattacatacatagaccctctagagtggggcccacgctacgtaattctcctactacatatacatagttttaaaaaggaaaaaaatcatattgaatttttttttctcattattaacttttttttttgaatgctattaactttcttttgtttgttcagatttttttagatgtttgttcagatttttttagatttttttttaaaaaaaaaataaataaaaatttatgatgaaaactaatttagatttattggaaaaagaaaatattttttaagcaaaaaattatataaatatgtaatttaacatggatttctataactgcgtgctaagttcctcgtaatcatttctttatatcaaacctaataagtagtattgtatccctctagaatttatcccgtctcactctgtcctgtaccagttctcctcatccgtgtgatgattattctaaatttctctttaattcatcaaatctttacattaattttttttctgaacttccacttattatctaataagtatgagtttgggcatttattagtcttttcgattgtctttggttggttgagattgtttcctccatcattttttatattaggtagtattttttttttttttgatgcgatatttaggtagtatttggttagaatgaatgaaaatataagattaataggaatgggaatgagaatttgaatagaaatagaatagaataaaatttaaaatgtataaaaaaattattaaattttttcaaatccggcattaaaatagtctttccttatattttaaaatggaatagtcattctaccaaaatggtggaaagaccattccatcggaatgatattctaatggttttaattgcaaccaaacaaaggaatggaatgaaaattgtttcctctccattccattccattgcattgcattgcctctaaccaaacgccaccttaaatgtcgtcgtttcctttcttcaacgaattttgacaatgatgaagtctagcggaagaggatcttccctatggaaacttggtagattgatagatttggcatcttttatcttctcgagaagactctctcaatccatgtattttttttaaaaaatttctctatttaaggatatgggtacttcgtgggttttacaatatctttaatagcttcctaatatgttttaagttttttttgctcaaaatggaaaaccttgatcttaacctttcccataatctagcacttactgacgaggaaaatttagtccatgactttgataatgttttcctgggttctgggttttcttctgattcttttttgttggttgtaaaagtcatatcctctaaaattcttaagtcaatttggattgagaaagttatgcaggaggcttattagacccttcgcttccttgtgtgtttttttgagtatcattcaaggatttttttttttgggttattttggttgtgaggggaataggcgtagagttctagaagatcagccctggaattttgatcagtgtctcatgttgtttactaatcctgaggggttagataaccttagttctgatcaacttaggtatgtccctatctgggtgcaagttcactctataccttttggcaataaatctcccaagcttgctcattttgtggctgaggagattggagaccttatagaaatctttactcttttctcgtatgagtcttttggcccttttcatagaattaaagttatgtttgatgtcactaaacctctttacagaggtatggatgtggattttagaaaaatttctagtaccaagtagttgggcttcaagtatgagggtcttcaaaagttttgctatttctgtggtatggatgatcatactgttgaattttgtgccctaaataaaacatatttcaatataattagatnnnnnaattaataaaagatcaaaaatcattttatgttgcat

SEQ ID NO: 17160 - DNA, 2620 bp, Cannabis sativa
  modified_base (2560)..(2561): a, c, t, g, unknown or other
taataagcttataaatataaatattatttagctagagagatgtgtaagacatacttcaaagttgtagtgcctggttgctgcaaatgcatattcagtaatgcatgacaaagttacaaaaatgaagagatatatctttgggattgataataatgatgaacagagtgtagcacccatttttttatatatatttatatatctttatatatatatgtatgttagctttgaaatttagctatagctaggtagctccaattgagtgtgtgtgtgtgttgaaatagaggtttgtgtggtgcttatatatatagagtgatataataacataataatgactttggttgattaggtagagaaataagatacagtttagcgaaactgggagataattggttgaagggttattttaataggatcgatcagttgttagaaccactttagagtggtgtcaaagacattccttttctttttcatttgaccccctttaatttattatctcttaattcaagtcaaataaacctaaaaaaataattataattatatgttataacacatatatatattagtccatgcatatatatatatatggatctcttaattaaaaactatatatatatatatagcggagatcatgattgtgactctgatatttgtttggcatttcacctaaagcctaactcgaaataactatatacatctatatatatacttctaattaaataactaataataattaaaaaagtataaaatgttttgttataaaaataattatcatgcatgcatgtttcatttagtgaatatatattgtaaaaaagggatcaatatatattgcattgcatgttattccaagttatatttctataaaaatgaattagttactacataacatatatatatatatatatttggttatgtcatataaagtgttgttaaagaaaactactacttcatgaagttatactactaatatatagggtttcacttagtctttagaagagtacttgtaacctttatttttctttatattaatattacgtaaggttatatatatcatgcatgcatgtaatgatcatgcaaatagtactactttgttttatttattaattaaatttcatgatgatatgtatatatacaaaaacaaaaacaaaattaagttgtgaaaaggatcgatgggtagatttctcaaccgtttaatcttggtgataaaggaatgatcgtccaagggttgctatcaattaaagatgtgtagtaatactccatccattcatttaattatatttatttatatatatatatatatataatatcaaagatggttttaataaacagtgcttaattatcacgtacacgttcaagatcaatgtgtgttgtatatgagagagttaggaagaacatgaacatcatatatttatatatagttatatatacatatatgtatatatttatatctatggattgatgaataggaaggaaacctctagtttgacgcaattttctctttaagcaaacaatttaataattacacgatatattataatgctacaaaaaaaaaaaaaaaatgaaaaaatacagatcgttcatgtgctcaaattaaacagttgtaaataatcccaaaaagtgaatatactaatagtttgacgataaaattatacaaatttatatattggaggatatatactctaaattaactcatgagaatataatcctaatatacattatacatgtggttgcacctactactggtgggtcagctcattattttttttcgtgtgagagaaaattaagtatatccaacatatatctctataaattatttaaatttatttttttatacctaaatttaagttaaaatagctaaatagttaaaatataattttttttaaaaaaaaaaaatctttctctaatcatgtttcctatttttgttagaataaaataaatattattttataatttaaataatgtgttaaatataaagctttttcttttaaaaaaaaagaaaagaatgaagagaaattctcatcaaaagaccaaactccaacaaacatagtacaattcaaatcacgtctggactactcaaccactaagttttagtattttcaagcgaaatggccaatttagccatgttacaggtataacaattggcgtttcttttacaatgagaaaacataaaaaccttaacagaaataatacaattataaatgtcattaagaatattacgaaatacagcaaagaagtactcctttctattaagaactttgacaacacactcacattcaaattcaacctctatatatagtagaatagcctagcctcaagcaaagaagaaggccctgaaggacagcaatagcttcagctatcgataatgagaggaaagccgatataggtactacccctgatgcaagggtcacgctaagatgattacagagaactacactgattctcactttcctattaatactatcaatactggcatcaacatcaaccttcaacttcccaacattaagaaagtcagaggatcgacattagtatttgatgtccgaggcagggccggccccagcattttggnngcctcgtgcgaaattttaaaattgggccctttaaaaaaaaaaaaccatatatattaaaa

SEQ ID NO: 17161 - DNA, 6512 bp, Cannabis sativa
attttgagttggatttgcagggttgattatgtataatcgaatttttatctgtctaattattggaataaactaccatccaccaattcatattcagccttttcattcttcaaggctgaacattttatcctcatgagaaagttgcttgacagaaaaacttgacattctaatatagacatgaagaacacagtgcatggcattattcatcatgtttgccatacattttgatttgattcagtatcattgtgtaaatctgtttgcaccatctcccaaagtgacaaaacaagtcagtggcagtgaaaacaaatgaagatacagtacaccaacctcaaatagaatttttctcaaactagtagatttagaaaatctgctgcttttagaattttttagttcaaatacccaacgtataatttattttcttatgtgggtggaaacaatccatacacatgtttatacaatcatcaagataaaacaatagtaaatctgtatataaatactaagaaatgatctcatctgttctataagttcaattctataagaatcattctttctttctatgttttttacactcaaaagtataaggtgagtcttgaaaaagagtatacatacgtgtctcctaagaactatatgcacaagacttgacatgataatatcacatggaatatggcagctggaaaggttttaacagcagctataaattttgaacaaatcttctattaacactgtcaatccttctgcatgggattgtttgaaactgcaaaagaaaatataaaaaatgttattttgtaaacatttacagtaaaaatagacaaaaacataattaataaagtgaggaaatactttcgataggaagttgtgtattttcgctttatcttcaattgtctatacaacactgttttgagctgcgcgtttgagaaggtatctataatcatgacctctggaccattcatcaatctcacgagcacgtaacacaggcaacgggtgagagagttgtctcgtctgagcatttctgaacatggattaattagttaagatcagcaaacacttgaaaatgtcaacacaaccaaatgctgatatttgttaacttattaccttatgtaccaacccatcgggcttgatgaagctttttcataagaccgagcttgttccagaaatgcatcaacatttagttggtcagccatagatggacagcccccagctaacttcatcagcacagagatgaccacctcttgtaggtgaatggtaaccaacaattagatcatcacaaaccgtaggtaaattataatgaaacatgaagtttacatagataatttgcttacctttgaatcttgggcgacaagaagagctgcacgatcacaagttaactcagctgctcgaagccaacgaaataactgttcttctaaactctgagctatcaacccaccaagccctataaatgaaatagtttagaaatctcatgttaactattactatgatcatgtaacttttaggccaagaaatctcaacaaactttcctctaaattatgtcttaccaggtacactataagctccaagggtaagaatatttgcaaatgtaagccacacaccatggtcgcatttcaaatgacccaattcatgagccaaaacagcctgttttataaaagtaaaacatcttccttagcctctctaaacaactgaacaagaaaaagattgtgaattgttgttacctgtaactcttttcgagtcaaaagctccacaaggctagtatgaaccacaataaaaggctttttaccacttatggctaaagtatatgcatttggtactggactttgacgaacatacagatcaggtgactcaatgttcaatatttttgctgcttcaatcattaactggtgtagttcaggtagctgaaacaaaagaaagaacagtgtaagatgaaacaagtagactatattatcttctaacaatcaattaatattaacctgattttcagatacaagaactgaagttccaatattctccaaaagcatcacttgttctgaaacagaccctgtaacgtatagattatccatctgttaatatgattaacaaattcaatgaaaataaattaaaacccaattcttgtaattacctaataaagcttttccaagctcgttcaacccaggaattgccctcaaaatcagtgtgttctgaataaaaacagagagtaaaatatgaagaagaaaaaagaaatgatttttattttgtttggatttcatatttatataaatttatagttaaacaaacctgtttgtcaagagggtggcgaaaatcatcagcgtcgagatcccgaaaaacaagagaagtagcagctttacaaacaaaggtggcatttttagtgggattcttcttcttcttcctcgaatacgaaccaaacctcaatctctctgaactattataagaagaactaaaagtattgaaattcaaaggaagaggtactacagaggccatggaaaaagatcagaaattgaagagagaaagagctatgatatttattctttgtttagtgtctttattgtgaccacaaataaaaaaaaacgaccaattaatcccgaaattagttacccaattgaagattctcttgattgagaaaaaaaaaaggaaataaagtcttttttttaatcaaataaggaaataatttaatacacggcaaaagaaataaaaaataaaataaaataaaataacggtaacattaaattaaaattggtctatttattactcctaccacaattcttttctttgctctctcacttttcttcttactcaaattcttcatatgaatttcttctttcactagctcattagacacaaagattcaacctttttcactaattgctcatttggttccttcattctcttactcaaattctctacatggctttcttctctcactaattcattagacacaaagattcaacatttttcactaactgatcagataggaagactttcaacttcactcaaaggtaccttttttttgtgtggtaggagacaaagattcaacctttttcagaggaataatttgggcttcactcgtactgttttcttggtggtaagagagaaagattcaacctttttcagataaagaatttcggcttcactcaaaggtatcgtttttttttttctttggtggtaaaagttgtttggctttttgaaataatagggagtttctcaatacattattaatatactctgatatggattactctaatcacactaaattttatacctctacaagagtttcttttttgacatgtacattaaattgttaatttttctataatatatatacacagtccaatgatttgttgtttattgttgtgcttctgaaggatctgaattcatcgatttgtttgtttggaagtttggacctttacactagataatttaaaagacttgtatttggttaagttaaatttattgggtgttatcattatttggtgaattcatataaatactctcagtccattgagttttattttgaacaattcaatgttcttacctttgaatcttgggcaacaagttaactcagctgcttgaagccaacagaataattgttcttctaaactctgagctttcaagttaattaattagaaacaattgttgatgtaagcttctatacaatttaaaaatcaaatgttagtatttaaaaaataaatagtttttcaattcatttcaaagctagatgtgtatatattcattcttaaattggttttaaaagactccttattttttattttactatattagtgatccctttctaccttgttatatttatttatatatgtttgtattatattaaaatgtttaaagagttatctaattttacttttttttggcataataggaaagaaagtgaagatgggacgtggaaaattaccattggaattgataccaaaagacaaagcaagaagaattacatttttgaagagaaaaagttgtctaatcaagaaagcttatgagttaagcacactttgcgatgtcaaagtttgcttaatagtcaatgatgttatgaaccaatcatcagatcctatagccacgtggcctaggaatcctcatgaggtaaagtctctcatcaatgattacaaaactgctatggctcaaaagccaaactcaaaaagactccataccataacagatttcataatggaaaaaatcaagaaagtcaacacagagattgagaaattagatcaaactaaaaccatgactacttccactactaatactccttcaacatcaacaacaacaccaactaatcaagaaaaggctatcttagaagaaaatctcattgttgagctcaatggtaataaccaacttgttgaatttgtttctgatctagataaaaaaattgaacaagtgaatgagagaatgaggcatttgattcatctcaaccattataacaattttggtatgcaagatccattcatgagtagtagtagtagtgttcaatactttcaccacaaccatcaacagcttccttattacaatgataacaatcctcaaatgctactacagcaacagcatcaaatgccttggatttatggtcagcctagctcttcttcttcttcttcttcaaaggctcatctatttcccttcaatccaagcttgtcgtttgacatgagttatcattacaacaacagtgacccttttactagattattgaactctaatgattatgcaattgatcagtactataatggtactaatcttcttctagaagatcaagctaatcaacataacaacaacattgtgttggaatctaaaagaggaggagtaggagcagggctgcaccaaaatgatcagaatggaatgatgttgtctcataatcctcttatgcctatgcaacaccaaaattacaatgtgagccaaccaccactgccattgatgcctagctcgacggttgatactaaattgcattacaatcaggctattccattatgggatttgtccccacatggtgattcattagggaattcaattaatcatgtttgattagcttttattttatctgtgtagttctataatgtaataagtaatgatattttttattatggtatgaaaacttctgctgatttttttttcttcaagtacaacgaaagattaaaataattaatttttgagatactcatttttggtaaaaacaaatcttgatgggcttgttaagtttaaaattcgcaatattgattacatagtttgattaatttattatgtaaggaactactttatatttgtataggttgtttttgaatcttttccttctgtttatattcatataggctattctacttttgcaaaaaaaaaaaaaaaaaattgtcattatggatttgatattttaacttgtatcgattatagattcatagagataaagcatgtaattgagcttaattaattggctgaaacttaagtacaacatttatagcattattaagtgcatcaagatgtctcatattttacaatccatgaaatttatatcctaataatacatatgaagctcaatttctggatgagaagttttaatctggttttttctgtagttaccataatagtttcttctctatgaataatcattatgattatcatgaacaacttacttccaacactccattcctaatatgtttgacctttatatagccatggagccaataatgagtgatcatatatgttatatagtatagtgttttgcatgttttggaccccaacccaattatatctcacatgttggagcaacaatctttcttgtagttttaagtgttgatatatttatactttatttctctattgtgttgtgtataatatatacttttgacaactttggttagcattttctcttttctttttaggatattgtttcaagccatgctacaagcctacaattatcaccatttcaggacatgtgtggttttacaaactcatcaaatcccttttgaccttcagattttaaagaggctcaaaatattgaaattcaaagggtgacgtactatgttgttgtagttagttttcctattgtatttagttctgttcatcaaactgcccacagcacaaattatctgcaccacataaaaaatgtgatttgaaatcatttgtggtgcagttgtaatttgcatttttattaaactgagtgagtacagtgcgattttaaatttaataattacagttcaaaccgcactgcactatataattacaaaataattatttttacaatataatttttgttttattttttataaatatataataagatttgtttttatattataacttgcaccacccaacaccgctaattgtattgttttttgtttagtgtctttattgtgacctgaccacaaataaaagtacagtagaacctctatccaagaatacacttgggactaagaaaataatattctaattcagaggttctaactaaatagagttccacttgaaaaaaaaatcaaaatatcaaaaaatatcaatgtaacaaaaataccaataaacaattcttaatactatattatatt

SEQ ID NO: 17162 - DNA, 7572 bp, Cannabis sativa
  modified_base (7343)..(7369): a, c, t, g, unknown or other
  modified_base (7544)..(7546): a, c, t, g, unknown or other
acccctacaccaaaccaaaggaagaaacaaaactgtgacagagtaaagaaatgtaaatgacatgcaactagaacaaaaagtcaaacttagtaataagtcaataataaggagaggctgtgcaaaatatatataaaaaaatatatgtatttatagaataaagcccagaatttggatctctgctatatattttattaaagagtattgacaatggctaaaccaccactcagagacaaacatgtatgaattacaattggacatacaaaatcacatgatccaatgtttattttgaataggataaaatatttatggcatttagagaatccaagaagatggaccatccttcccttctgaaccttccaaccatgtctgatgagcatgaatcaatgttgacccattgccaccctgaaaagaaatcacaaattctctttcaaaatcacaaagcaaaaccatggcaagaaaagaaactaagccatattcatttcttatattagtatcttacctttgagcttactatggcagttgccaaacaaccttttcgttcttcacctacaagagggtcaaaatttgatataacagcagcatgagatcattaagctatatacaattgagaaaaatgattttttttttggaaagctcatataaagggcatagacaacttgacatagttggcttaacaaacattaagtagagaaaatctacctagtgattcccacttgttgtacttcactagccatgtgtctgaatcgagttgtatagttgatactctatctacccaaacacgaaatttctttccctgtttgtcaccatagtgtttgctcaattcacttaggctgtcggtaagaagaatttcaacaccagatgggtgcataaagataccagttggatgctgaaaggaaggaaagcattcttaagtaccaaaaacaaaccaaatgagcacctatcagtgaacaaatcactacatattaagtaaaaacacagaaccagtcaatgaaaaacaagtcaaagacagacacgtgatgagaaaaacaatgtatgcctcaagcaaactgggtaaaactgccagaaacaatcaagtggtacctgttataaaattatacactgaaaataaaagaagacttgcacgtacacaatttgccttcagatttgcaatatacaagtcagatcgatcgatttctgcacgcaaccatctctcatagaacaagaaatatttgactgtttcaagaccagggttcatgcagtccattttacactccaacgtgtcagcaacatctctgggagacacatttggtcctagattaaaataaccaatagcttcaatgattccagcagcacattcctttgttgcatgaataattttaggattgtctttagcattttcagcgtgccagtgcagtaattcttcttgagcgttcttaacctgcacaagaaattaatgttaaaaaaagataagtaaatttccaaatctaggtttattttgacaaggtaaacaagctataggtacttaccatgaccccatgtacatctgggatgctaaagagctcggcatcatttccggaatcaccacaaacaagtgtattagtgggcaattttccttcagctgtaaatttcttgtgtaaataggcaagagcttgtcctttgccggcaccttgaggtaatatatccaaatcaattcctccactgtagattattttgacatccaactggaaaaattgaagcaacatttcaaagataagataacaaacaaaatgtcaacatacttcgtcaccaaacaaaaatttaacatgctcaagtaaaaatcattaagaggatttgacgaaattgaggttaaaatgacatattaccccacgcttctccaaagcctcggcaagagccttcgtcacagcctgagctttatctttttctacataaaaactgaccttatgtgcccgttgctctgtctctgcctgcattcatcatgaaatctaatcattcaggagagattataccctgacccttttttaacctaataaacattatatttctttctaaaagattctacacaagacttcaacatgtccaaacattcatagaacaattatcatcatttttattgccactatatacaattactacctgaagagtaagttcaggaaactttcttgtttcctccctaactatgttcttatcccacttctgattcagatattcaacccagccatcatctgggaccattgaggtaccataggttatctcagttccaacagacattatagttatatctggcgttatcatgggtttctccttcctcaactgtttgtacagtgttggtgaccttcccgtcgagaaaactagcaatgaatcatgacgataatatgcttcccacaaggcattaaacctaagcagagaaagattctccggatcatgatgatcaacctgcaataaaaccattgctcacttaataaacacaccaactaaattaaacagacagtggtgaagcaaactcttgtgcagcctaccattgtatgatcaagatctgaaactatcatgagacgggcagatgtttgaagccgatccatgattatcctacttccaaccggaatctgaaaatatgttttcactaactaagattatggcaacattcatagtgcccaatatataaaaaaattcttgaagatgatgcttaagttggtgtgtgttgttaacataagcttgttctcattattagaacatcataatttagtaaaacccaatccaaaatatttggctatgaagtaaaaaaagcaaagacgcttaatttatgaaaatactaacaataatactaaggtttactgacagattaagacgaaaagttgttgaaatcaatagaattaatgaactttaattcttcttttttctttccgaaatctcaactgtcaaatttaaatatccaaaatcttcatttctcccattttctcactaaccaaacaattaactaaccaaacaacaaaaactcataaagagacacacattcccatcccaagtgattcaataaacaagcacccaacaatggaagaatcaatggtaaccaaaatttcaataccgaaaaaccctgaaaatctttcacagtaaaattcaaaactttcacacaaacacagaatcttccacaaacccattaagttaatcaatatgattttctttaaaacaaaaattaaaatacctgaaatttgaaacgcagaggtgatgaatgcaagagatgaggataaagaggcagtgatggtgattaatataagaatggaattcgatccaaattcgttggcgctgtttttgttaaagcaaaaaatggccaatctaataaaacgttatttttcattgtttttatgttattatttttataataatataaaaatgaagtaacttcaaaatagctctcaacacgtggcattttttaacgggttacacgtgtccatgggtccttttaggtttgagatggacggtggtgaggaactttgcggtcccaccattagatatggtgtccacatgacaatttatatacagcatatataatatattttttttgctagaagaatatatagcatattttttagtatatgaataaatgcatattcgtactatatgctctattcatctgtcttacaaattttgtaaaagttatacgaaaataaagatggccaacttaatttaatataaaataaaaaataaaaaattagaaatactgtattgatatactccattgtgtaataaaattaaagttttgtaattcttcaaaggttaaaagtttctgatacctaatgtattagttatatttatcactcaaataaataaataaatcagacaaatatgcgtattatacttgtaaagtgggtttataccttttttttcaaatactttgttccatttgatcttttttttgaacgggaaatttcaaagttcatctattttttttttctagaataaaacttgttattataaattaaactgataagtcatttacaataacagagtagagagatggaggaaaagaatccatcaaatagcaagcttcatccaaccctaaagcatatctagccaaacaatgagcagctttattagttgatcgtttgacatgagtaatagatacacccgggagaaaggaaagaagacgagaaatgttaataataagatcattaaaagcagtaatacaatttgatcggccatataaagcattggtaaccattagagcatccgtttcgacatgaccaaattgaattcccagctgtgaagcccaaatcaggctgtggaaaattgtctttgcttccatttcatgtgatgcaaaattcccaatgagaggtttggagaaggcagcaataacaactccctcactatttcgaataacagctccaacgccagtgatgttgttagttgaatccacagtagcatccacattcattttgaggcttccaaagtcaggtggtcgccaaggagagtcgggaattggagcaggtggggggttctggtgtgcctgaacttgttgaggtctgtactttgcttgagcttgtcgatagttggacaagtaattggtagcaaaggttgctaaaagagcagttggtttgcctttttaaccatgaacaaccttgttcctttctgtccaaatggaccataaagtacaaaaaatttgctccatttcacttgctgaatgtagagtagacaagtgagctaagtaatcacctttgttcataagtgcagcagttttccaatcaaactgaaaattcatggccctccaaactgcccgagcatacttgcatccaaagagtgcatgcccaacggactcccaagcttgtcgacatatggaacatgtggaatcggtaatgatatgtcttcgcaccagcgaagtagcaactggtatagcatcatggaacacacgccagataaagatttttattttttggggcagttgtagtttctagaaaaatttccaccagtgtgtaggtgaattcgatgaggaggtgaggtcagaatcctcaagagaagcagcatggtgataacccgagtgaacattataaattcctgaactatgatggtgtcagattaacttatcatttgctgaaaaaatagctcaacggatggtgagtattcgttccacatcaaggcgtgagaagtattcatcaagtagttgatgattccattgccggtcctctgtgattaaattggcaacaacaacatttgatggtccctcatagtgtgttggaaaaaagttagtgtgttcagggatccaaggatcggttgcacagttgatgtgtcttccctctcctattttccatcgtagaccagggcttaagagctcgcgaccataaagaataccttgccatgtgagtgaaggggaatgaccatggggagcctccaggaaggaattgttggggaagtaacggctttttagcaatctactcaaaagggaggagggattgtcgagtagtctccatgattgcttggcaaggagagcttgattgtagtgtataaaagaccgaaaacccatgccgccatcaagtttagttttgcatagcagtttccagcttcgccaatgaattttcgtgccattttcattcgaagcccaccaaaaattagacatcattatttcaagctgattgcagatggttaccagtaatttgaagcaactcgttaagtaagttggaatagattgcaccacagctttgagtaggatttctttacctccaaccgagaagagcttatcattccaagtcctcataagacgccaaattttttctttgactttactgaacaattgttgcttatcacgatcagtatatgctggtaacccaaggtatttttcatgacaatcacggatgggcattgatagcactctatgaaactgaacttgggcagccaaagtcgtatttggtgagaaagagagtacttatttgtccgggttcaatacttggccagaagcacggtgatatgcatccaggcaacgtttgatagcttgacacgaactttcagtagcattacaaaataataagctatcatcagcaaaaaagagatgtgaaattggaggagatcttcgtgtgagtgagtatccgtgaaggttccctaaacgttcttcatgttgtagtaggcatgatagaccctcagaacaaatcagaaacagatatggagacaaaggacaaccttgccttagtcctctagtaggagtggttgaacccgtaatttgtccatttaagagaaaagtgaacttattcgttgtcaaacaagtcattatgagagttttccatctatctgcaaaccccatttgttccattacagccttgataaagttccattcaacccgatcaaacactttactcatgtctaatttcatagcagccacccctttcctacccgatgtcttgagattaattccatggattaattcaaaagcaaccagaatgttgtctgttatgagtcgatttggaagaaaggaactttgagtctctgagatgacatgtggtagtatatctttgaatcgagctaccaggatcttggtgataagctttgaaacagcattgcataagctaataggtctgaagtctttcatgaactgagcctttttgatcttcgggataagagtgataatggttgagttcaaaggagtagggtctgctccatcatttagcacacttaacacaacagaagtgaccatgtttccaactatatcccagttgttttggtagaacatggaagacattccatctatccctggacttttatctggacccattgagtgtaaagcaaattatacatcatctttggtaaacggtttgaggagtgtagcattcatatccatggtaaccgagaccggtattgtggctaaagttgcatcaagagcagaatgatcaatggatgaagccttgaataaattggagaagtagtcttggatgacattgctcaaatcagcttgtgaggtaaaggtacccatcttcttttgagagatgtaattttattattagatcgtcttgctgaggctttgtagtgaaaaaattttgtatttctatcttccaattgcatccaatcaatgcgtgaacgttgttgccagtacatctcatcttgttctaacaattcatcaagaacaaattcgttgagtttgagtgtatgtagatgcgtcatggctgagaataggagaattgtttagagcattcactttcgattgtgtttctgcaatattctttttcattcggccatacttcttgatatgccactgctgaagcgatgttgtacatgattccaggttgttgagaacattgctgatggggtctgttgtgcaatttgacagccaacaattgcaaataatagtcttgctttcggggtccgataaccaaagcttttcaaatcgaaannnnnnnnnnnnnnnnnnnnnnnnnnnagtagtaccagaaaatatttcagcagaaattacacgatgatcagagtgaaagtagtccaaatgtgagatttttggttgctgaaaagtggaagaccacacatcattcattcacaaaacaccagtcaatacgctctttcaaagtgttggtcgaagttcttgttgggttttatgcccnnnataaaactctttacaatctgattagt

SEQ ID NO: 17163 - DNA, 2935 bp, Cannabis sativa
gttacaaactaaaagtttagccgccaatatcccataaataatatatcattattttagtagtttagctgtaaataaaagtttatatatttatcaatcaaacttataaattttcacagtagaaacttaagtcgttttgctaatatcccccaattacaactaagtcatttttctgtttaatgttgaaagaaatccaaacataatcttttagaatgactattgttacatcaaaagtactttgatggtgcaacacatatagttttcttctgaaaagaccaaacaaaaggtttaccgtagtagaaaagaaaaggcttctttccaattgcatgcaccatcagaagttttcacagaaggaagaacgaaactttggagtttaatctttctttgatcttggattttggctgcattttgtctgtcttgtaaggatagtaagaagacaatgttttcatctactactcctcattttttcaagataatttttcaagagactcataagcttgtaaggatcatctttctcattcactctcatatagagatatttcactaataggtcgtttgactcatgcatatgatcatctctgacgataaagcataaagttttattagttcataacaaaatagttcaaatcattgagttttcaatgcatgtaaaacaacccccttttgtgttttttccaaatactttaacctctgatctgaccaaatatcatagtaccaattgatacatttagtgttagagacaattcttaactttttcttttatttgattttgcagcatattcccaaaaagtttacaaggaaatatggtgaaactttatccaattcggtgttggttaagcttccatgtagttcaaaatggaaaatggagttaacaaagaaagatgagagtgtttggtttgataagggttggctagattttgcaaagtattatgccataaaaaggggtagcatattaagctttagatatgaggggaattctgaatttaatgctgtcatagttgatttgagtttagttgagatagactatccctctgttcccaccaatttggttagctctaacattgatgatagtgacattaaaatccccaaaagggaagtttttgaagatgaaaatttggatgtgttttcaccaagccacagaatgagggaaaaaacttcattaccatgttcacggccacaaaagaaaatgagaactcaaagcaatccatgttgtcgaaaactcgagtcagaaacaaaaggcatggagaaattttactttggaacttactatgcttttcttagctttaacatatttggcatgatcattttaatttgttgcaggaaaacacaatttgcctaatgcaaccgggcaaatgaagctgtcatcaccgagccgaagggatgaagctagtgaattcaaatcgagccgaccatttttcaaggttgtcatgaggccatactgtgttcgtggtagcatgatggtaagccatttgctttaacaactttccacaccaatagtaatattatgatcataattgtatattacatttttgtttctatagaatttgcctagcagctttgcaaaggaatatttagaagcaagagcaacatgtagcaatgcaatacttaaactcccaaatggttgtggtaggacttggtctgtgctatgtaagtttaaagtgtataatcatgaagtaatatcatcaagatttcaggcaggttggccagcatttgttaaggacaataatctgaaattaggtgatgtttgtgtatttgttctgcttgaggacataacttttacatttgaagttgtaatttttcgaggtaagcaagtatgatttgtccttaactacatagttttattttatttttgcatctctctttcctgttttacattcctttggtgaaatttttgcagaggacaaggatgccatggatggcgaaactgtcatgcctaatggacgtgtgactactcttcctacaccgaaaaagcaacaacaatacttttcaatgattgaaaaagctaagcttcttgaaatggctcaattcaaatctgaatatccctttttcaagattgttatatatccatcgtttctcggttcaaggtattatatggtaagattctaacactatatgagatgatctttgcatcaagttcttttgaccataaattctctttttccatttttggccaggaagtaccaatggaatttgctaagagaaaccttaagaaggagggtgatgccattctttcggtttcggacagtggtggatattggcctattcaatttgaaatgaggcacatgaaaagtaaggggaaagtgagagctgaattcagatgtggttggaaagaatttgccaaggacaatgagttgaaagttggcgatgtttgcattttcgagcttcttaaaagatccgaaaatttgtttagagtttccattttgtgtgctgttgatgatgataatgatgcataccacaaaaattgtcaaggtttattacttattattataatgtattcaaatttgatttgggcatgtgtatagatttgttaacattaagtttgtatgtgggcagatggtggaagcaacccaaaaattgaagtgggagaaaaacttgctagcttttttgagttagctctttactgaaaatcccttaggatcaaatgtatttaatatacatgggatgttaagtactaagtagacctctttttgtatggacaagctctagtcttaattagtttggatttgtttatcatctattaatattattaagtaaaggtttgtcgtttgtaatgtaattattgtttttgttttaaatatattgtcgttttttggatcaaacatttatgattgtcaaatgagaaacattgtcgttgatagttgtttttttttgtcattttgggactaaaatgttactgtcgtttgtaaatggctggggtgttcaaaattttcacataaaa

SEQ ID NO: 17164 - DNA, 5877 bp, Cannabis sativa
actaggggtagaggttcatctggttatcattagtatacttctgataaacaaaggcttaactgcttctgttggaatagtgagaccaacttcgtggaaaaccttcaacttcatttttaattcatgtgatgagagcaaaaaggttttgttcgattaatttgataactacacttaaaaggaaagcagaatgtgatgtctcatgtctgaagctagatagattataactcatgaaattgaccttgtgataatgaagctgtttatatgtcttgtgcaagcgtgattgtgttccttttatttttctcttacgttagggagtcgaacctgcaataacatacaagaatttgggacttcctgcggagtggtatggagcattgggatgggtgtttccagaatgggcaaggacccatgctctcgacactggtgaagctgtcaacattctaaagggtgcagttgtgacatctgatcggatactgacagtcagcaaggtttcttttcctccactgaaatgatatttcgattattattatcattgactgcaaaaactagaaatacgcatttaattgatttcattgtttgatgctctaattgtgaaaaggtgattgaaatctaagactcttttataaaacatggtacagattttcaattgaatagggaactatttgtgtgttactttatacttaagtagctgcatttcttttaatattttgttataattttacagggatatgcttgggagatcactactgttgaaggtggctatggtctacaagatctgttaagcagccgaaagagtgttcttaacggtatatctgttgaaattagttgtagatgagtggcatgcttagaaaaatgactgatacaagtttatgaatgttataaaaaattaatggtttttgttttttccttttacattaataggtatcacaaatggaattgatgatgttgattggaacccgtctacagatcgccacatcccaaaccattattccgctgaggatctttctggcaaggtagcaaaattcttttgttttgaaaggaaaaaagatagtattgttacaaaacagaaatcttacaccgcctcgtgttagtgatgtgtaggtccaatgcaaggttgctttgcagaaggagttaggtcttcctgttaggcctgattgtccattggtaagaaacgaattcctactaaacccatgactggtggtagctggagaatgtgattgcatcccattatccatttggtttcgatttatgtagattggattcattgggagattggattaccaaaaaggtatagacgtgattcagcaagctattccagagctcatgcaggacgatgtacaattcgtaagttcttaattttttttttctttgggaaggggaaaggttttattggagaaccactttactttgtttgaacaaggagaagaaccatcttgattacactctactttttgtgcttccattcatatatcaacaagtgtagatcactggagttgcttcacaaattgttgttatgaaagtttttatgaatctaaaaaactccttattctctttctcactagttagttttttaatgtagttatctatttatttagttacattgttgtgatttcttccaaggggtaagtaaggacaacaaacaactgaagttatctagcatgttgcaggttatgctgggttctggaaattcactgtatgaagaatggatgagggaagcagaatcatcttataatgacaaatttcggggttgggttggatttaatgtcccgatttcacataggataactgcagggtaattttcatttctgtttttgagtactattacatatcccaagtataatccaatagaaattcttttataagcagtgttgagtggaaaataagttgtagtctttcaatttgcccaaatgcaacatttccatgaaaaaaattcgcgagattcactaatttagattgcaactcggttgccatattttatagatacgcaaaacttgggatgtgactctttatttcactatttaaacataatgaaatatgttcatgggactgactgattcttgatctggttgctcagctgtgatatactgctgatgccttcgagatttgagccctgtggcttgaatcaattgtatgcgatgagatatggaactatcccggtagttcatggcaccggagggcttagagtaagtccattaaacatttaacaatttagctaagtgttttattcttcttggtgatattttttttcatactatttattttgcttcaggatactgttgagactttcaatccatatactccggacgggggagaaggcaccgggtacataatttcccttaaactcctacactttcatacatgagaatccttagagaagcaaaaggctttgtattttaaataagaaaaaattaccaataacttttgctgcttggattcttatttacaaccatactgaattgtatttacaggtggacattttctccactagccaaagatgagatgttggcggtatgttattttattatgcttaaataaccgttattaacattttacttgagagtgttaaaatggttgagaagaaatgttgcttatttgttaatctttggcaggcattaagaacggctattcggacttacagagagcacaagtcttcttgggatggattgataaaaagaggtatgcagaaggacttcacatgggaaactgctgcagaacaatacgagcaggttttcgaatgggccaccgttgacccaccttatgtcggttgagccacaaggcgatgagaaaaaaatggttacacgagtaaaaccgatcctggtaatggctgaagtaggcgatactttttgttgatcataaatccagctgctgcataaaacagattaagtgttgcccttgatgcttaggtagttaagtcgttaccataattttgattcatcttcttttgattagtgattctgctatttaaactgtcattagactaactgctcttatgacctttgtgttacaaaaaagctactgtaaaatgttgttttacaatgattggaaaatgggaatgtccatattttgtgttgttgagccaagtatgccattggatttttgatattgtgactaaacttcactgtttatctttcagatgtttgatgtggaaagagttaattttatttgatgatatcaattggacgcatttattactagtgacccatttctgatattagtcctttaagttttgaatttgtaagtgctaaaaacttgataacttttttagtaactaagtacctaaaattgtaattttcttctaattctgttattagactttatatttgtcttaaattccagttagagcagtgtttagagtcacaaacttaaagatgaagggttttaaattatgagataattacttaaggtattattttttgtaaataagttatatttttacgtttatagaatttcttttacatttttacaattttctataaaaacgatacgaaaacaagaaaattatataaaattaatatgaaaataatattaaaacaacaacaaaaaataacacataaataacaaaaaatgaccgtattttctgtaaataaaatcaaaaaaatcgtaaaaatttataaaattttataaaactgtatttttataatttttttgcatttgtaaaataagcccttaaattattgtggctcattgtgtcattattaatgtggatctcaagatgtagaaaccactctcccttaacaaatgtaatccacatattttcactttaaaagagagctctttataatcaagtaattattatattcaacatctagttgacattgtacattagttgaatctaaaaggaaaccacactattacaaaattttaaaatttactcaataattagattaagtaaaagatgaaactactaagcttcttggcatagaatctgtgttattccccccaaaaggaacagattacattattcttgtgtctcaatttttacccacatggggtgagcttcttgttccctgcgccccggggattatcatctttccagtcatcaaatgcccttgctttatcttgggcagcctcatcatcttcgtcttcatcttcatcatcttttctaggaccagttatcttattgtccttgtaccatgaagaattggcttcttccatgagcttagtattcatctcctgccaattgttcattatctccatctctgtcaaaccagcttcttctatgctcatggttggcatccttttcacaaagagatattagcattacaagtaaggtgtctaaagtaatcaaacaaatccaattggcatgtaagatgttttattaatcgctgtactgagatttacctgaaacccggttggaaaacctgtgctgtcatcctttctctttcacttgaaaagcttccactaataacactctgtggtccaaatatcatgggctggtgtttatgctcgtgtgcttgtgagacctttgctcttccttctagaacatcttgtgcaaaggtagcacatgtgataggtggtgctggtttagtgtactgtgctcgaactgaggcatcacgatgccaggtctcagctcttctggtccggtcatcaagaagatcccgaaaaaattgcgtatcaccctcctatagtacgtgttaaagaaatggatcagacaatttcacagaaagtaagcaacaaattggcaaactaatctgctcaactggtctaccaaaggagaagttaatccaccacaattaagcttacaaaagaaatgcttcttaaaatgtccatgatagataccctagtactaattctaaaaaaggaaaaagttactaatggtgtaaggattcttaaatgttttagatacaacttattatgtaatcataaaaaataacatcatcatcagcattctcagattaagaagattagtaccttttcctgtttttccttcattgctgatagcatctcttcctctttctttagcatttccaacaaatccaaagcctgaagttgataacaatacaaaactaaattaaatgttgggatgaaagaatataaataataagttttaaagggaaaaagtccaaatgatgaaagatttagttccacgaacgaaccttacagatagccaaagagatggtagtgaaccaggcctacaataaaaaaataaataaaaaaaagagcagattttcgtcaaatatgaggagccatagacataagaagcaatcatggccaccttagaccaacataaggagaaataagctaacctcccgctcttcttctccatcatcatccagcacatcttcctcgccagcctcaacaggagtggaaagggcagctgctctactagagcgtccacgacgttcttttcgctccttaatttccagcaacttagattcagcagctctttgacgtttaaagcgagcaatctagaatgagaatgatgtatgaccatcagctcatttcaataccaatcattgagttcaaccaatttatggttaaagagtaatgcagtagaagtacagacaagttagcaatttaaacatcttgttgcaacaatattagcaattttttgggcagtatgactgaagaaatagcagattttttttttttttttatggaagagaagattatgggacaagctaatgtttttgatcacaaagtgggtttataaatctaaatgtttcaaaggcttttctatcatagatttatttatctgttttctcttgtttactgtaagattccttttattttatttttggttgctttcaagctcgtggtccttattttgaagaccatcttggtcttagtttctttgcattctattcttttgaaatagtgcaaaagttttgcctctattaaaaaaaataaaaaatagacaagttaacgacaaaactaaacaga

SEQ ID NO: 17165 - DNA, 2579 bp, Cannabis sativa
aaatgcatctcagaatttaataataacagtataattaattatttaaatagctataaataatttcataattaaacgtgcttaactgctaatttctaaattaaagcatccagccagtgtaaagtgtactcaatgtccaaatcaaaatcaattgcacctatgacatattagactcatgtatggctatataagccaaggaaaagaatattatttttaatgataatgataatttaaagacattgtaggactcaactactcctacaaaattgtgtagtaaatagttatcgtcaatttttattagatagtatttattgaaaacgtggttgaggcataagaaaagaaaatgtttaaaacttaaagcttgaaaattcttgccaaatggccccagcgcccagctttctgtgtagataagaatcgaaaatatgccccatatgcgattacatttggagattatagggtcacactatcgtcatcatcatcagcaaatttgtttcaaactttgagtgagtgggtgcaaatatcaaagaccaggtcagagtcagagtagagataatgtggatgatgcttcctactacacacacacacaccatggataagtcttcttctaattcttcttacactcactcacacagaccctttatacatgtgtttaattaatttataataaatatttgatttttgtcttacaaacaagttagtttcttcacaaagcagtaaagtaattctaatagaaataaatacttaatgaagtggtcatcgtgggatctgactaggatagtaccaattaacactctcatgctcacgtattatgaaaagcaagtaaacctgtctatttgcttggcttgcgttggaattgtaataatggccacaactttgatttcttctttcgatcttcaatttaaacctaacaaaaaaattggtcctaatttcagcaatttttatttgatagtggaggttgggacttagtaggaaattcagtaatattgatgtgatgtcacctatattttatttgccaaaaagcagtggaaagaaagacgtgtttggtcttttcattttttaataagctgagcaaatcaatgctgctttaactttgatgatttttttgcttattatagctaaaatataaagttgatataaaaagcttttcaacgtattggaaaatctaaagaaagggaaagcttaatagtagtaagcaatggaggaatggaatggagccaccgcccttatgacgtggccacacacccatgacctagttgtgactcactgagtttgacactctattggtaatcaaaaagctttaatatttattaaataaataaaaagaaaaaaagagattcccttctttagctttttgagtctttataagcaacgctaaaccacttgagatctcccccttttcttcttccttcttcttcttctttcttcctccattgttgacttgcttgagcttagttttctttctcaaaaatgggtttgtttgcggatgatctaacttcaagcgcaattgttactcatatgttatacaaagcagctctgataattgcagtaacgagatggattttagcttgggcaatcagcatcagaaacaaaatccaggaatattcttccagaaaccctaatttcttaggaactgaaaattcacgatttccatctccacctccgtgttctccttcgattgaattgatcagagatagtctgactctgaccacgttcggcgaaatgacggagagattcccgaaccaggaaggccattgggacacgtgcgccgtgtgcttgaaccaactgaacacgaacgacgaggtgagagagctgaggaactgccgccatgtcttccaccgagaatgcctcgaccggtggctagatcacgaccagcaccaccaccaagagtctcaccggaagtcgtgcccgctttgccgtgcgccgttcctgactcaggaacagtcgcagagattgaccatgggcgtcgcacctcagcccagctgggccgtcgagcgccttctctacctttttggggatgatttgctgttgtgactcgttcatggatttcatcgaatcgttctcttctctactactgatttttctttttcttaaacctattttttttttttttcttttttaggatcgttttagtgtaaaatctgtgaatattatgtatttaatattaaatattttattggattgatctgtttctctgctcagttttattatgactcgatctactgtaattttgcactctgtgttgttgttcttatctagacttaattagcttagagagttttcttaatttgtgtatttatttcagttattgtaagactaatcattatttcttttaaataaattgactattatttatgtactccttttctgtgcacatgggtgtagaagctactatcaatctttgaaaaattcaattaaaggaaaatagcttacggcataattttataattttatttttgaaagggaaaaaaatactaactatacattgattaatgctaatcaaaacttgcactgggtttccagaaagtcatcaaatcctaaccgtcccgatctaataaaatcggacatctaattataattggatt

SEQ ID NO: 17166 - DNA, 3626 bp, Cannabis sativa
aaaaaaaaaaaaaaaaagagtcgggtcggatcagatccgatacgaataagtcgggtcgaatatgatccgatccgagtatctaatctagcagagcgaacgggccagatccttacatgatctggatcaggtcggatcagatccgaccgaacccatttacactcctattcaatacccctctattatgactacttaagttagccttaaatagttattaaaaccaaatataatattatatatcatattattgagaaatggtaattaagaagttggttcgaagatgtaatttaatgtaacaaaggatcactagcggacataatatcaatgctctataacattttatttaaagaaaaaacatgactgacaatgacaagaaagtacatgacttaaccaatagaccccactgcgaatgcaatcagaagttatcaacccaatacgaccattttcaaaccttacccccttatttagtttgacccaaagtcaaagttgttcgtagctagtttcttctcttctcatactaaaagggccccatgtagtttcccaataccaatcagaattcggcaccacaatcaaaattgaagtagagtatcatcaaaagttattctcctttccagctgtatgtctttataatctgatcactcgtattgaattttattaacaaattaaaattaaagaaaatcaatatattggacaattttaatttatagaaaaatattttaatttagaaccttttcttaagtaattgtacaagtacaaatcccagaattaattactgcgcattaagaggaataaatgaaaaaggaaatataactcagcaaaaaaattatattaataataacaaatatatatataaatcaaacaagaacatctaatgggttttgttcatgatataaaataccatcttgcgaagacttgttgaagaactcgatacaatcagctatggcctcattgtagtgtgagtgagatgagtagtaggagctgcatgaagtcttgggaggatcaaacgaccgaacgtcgccgtttcgtggcgtagccgaagaagtggaggaggaccgatgatgttgatgttgaggtcttgaggggaaagaaagaataagcctcatgagaatcttacggaatcgattgaagattttcatgggagagagttcaaataatcaataattaataataagttgttgttaatattgtagtgaagggtttcaaggctttggttgtagaataagaactaaagaaggactcgtataacaaagcatttttctctcatgtgattattatgtttttgcattgtattctctgaatcaaaacctccgggaagtgtaatgttatcatggagaagtgtcgtttgattgttttttatttttttaattttttaagactcaataaataaattatttctattttatttatttattttgttttaaaaactaattaattaataatttgggggatactctcaagagcaattaatatggcaaaagttaatttgttggacatgttcatgtgcccaaatcatttgcatgggcttcactttgtcctgacatgtttgatttgtttatttctcatcttaattaggaaagacttgattaatttgcatcttggtccactatcaatttcaagaaagaattttcaattatgttcttattactattacagagcactactcattaatctttgctaggaacttgcctccttttctgccagtttttgtttcttgaccaacctataatttaatatgttatattattatatattatacatacttactactacaattataacatttatttttcagttttttccattaaaatgttaaaaaactgaagagagatgaattttaatactcgtatatctcaattcataatattaaaaaccggtctttggttattccctgataacggaagatataggtcttcaatattagggttgcggagtctcacgactaaaaaaaaattatctttagagacaaccttttagtcacaacataaatcttttgtgactaaatatgacttttagagttcgtttagtacgttgtattaggtcgtattgtgttgtattgtattatattgaattggattatatatatatatatcatatttttatataaaactatattaaattttaatttatattaaaatattatatatgtaaatgtccataaaagtcattaccacaaataattttacataaaaatattgcatgaaatataatttaatacaatactatacaatacaatacgttgtaatacgacgtaccaaacgagtccttagtcataataaaaaattacttgtgacgaaaacatattatttagatacaagttgtcaataatttagttttaatcataacaagaattatgattaaagacacctttagtcataacaaattgtaatttttgtgactaatacttttaaccacaaactttttagtcacaacataaaaatgataatttatattagtcacaatttttttttaattacttttaatcacaagttttgttataactaaaagtaaattttttttgtagtgtctattcgcctttacttttctttcattctctccttttatctcatttgaaaatccatatggaaaccaccattcttcttggcagtccactcatttttcatggttttccactgttttttaccatttttttttcaaatcatcgttttgccagccgataaacacatctagctagcatatcgattttttttttaaggttatcacatcgaaaataaattttatgaggcagttttaagtgagtttggtgtgatcggaaaactgcgaatgcaagtggtttgatagtcttgaatagcttgcacagaggtacgactcaatcttatttatttattttgaagttacattgcattatttttatattttagttttttattttgggtgtttgatttagggcttttgcacgttggtggtcgaagtacattggcgtcatcggttttaacaggcagttgtgattattgtgtgtatataatcttccattagcttagaacattttacaacgaaagaaagaaaaactatatttacactataaaaaaacaattatttttagtgataacttttaatcacaacataaattttttgtgactaaacgtgactcttggtcacaataaaaaactacttatgactaaaacatagtatctagacacaagttgtcactaatttacttttaatcacaacaagtattgtgactaaaatcacatttaatcacaataaattataatttttgtgactaatacatttagctacggaccttttagtcccaacataggaataataattaataattagttacatttttttaagttttacacacaaattttgttgtgattaaaagtaagattttttataaagttaattttctaacttattaaatttcaatctctaggagtcaaaagtagagttccctattctattcttattcattagccaaaatctatttcatcaaattggtggaataaaaatctatttgaccaaaatctattccattctctatagtgacctttctcacttttattaaaatatatttttccatatatacaaatgtatatatttatatgtttgatatacgtggatcgtatacgttttttgtttagtgtatatatgaattgagtatatgt

SEQ ID NO: 17167 - DNA, 5876 bp, Cannabis sativa
tgacatatactggggttccaaggttagagtaatcctagttttagttctgtcttcgactgccactggttgacgtccagttatggcgaccataatgagccagtatatagtcaggttgcaaatcttttacaagtttgtttttactggagtaactgccttttgtactcttgtgaccctttccctctcgagataaccaaattgtccattcttcttgtggaagagggttataatcttcagtcgctcgagttattgggcagatcgaactgatcataggcatcttcctgcccctttatatatcgatgaaggtgtccttgtgatatgagactttctatctcatctttcaattgacgacactcttatgtggtatgaccaatatcagcatggtattcacaccacttacttggatccctcttatgcctcacatgtttcataggtcttggctcgctaaaaacagcttcttgtacatatgcgaggtagatcttttcccgagtttcattgagctcggtgtattcagtataaagagggatatacttgttgggtttcttgtcattaggcagccttttggaatcatttttttattgatcccgaggcttccaaatcaagttttccaacagtatcatgccccaattttctcctagatttcgtgatgtgatgtactctagacttattctccaacccactcattcgcaagtggggtgaatcctttttgtcttgaacggagttggttgacggaggtcaggcttttttaggttcaaatacttccgtagatcattcttgtcatgattgtggctaaaccctgcccttcctccagtttcctcaggctgcatcccctgagagctctgagcatacccctgggtcatctcctgccacttgacttgtgagccaagaggtttgcctcgtaaatctcttttctcaaggtcaggttgtttttggatacaatctcccagcgttgcctttacggcagctatttcacgctccaactcggcattacaccggtttgcttcctccaatcgacgcctaagatggcgattttctaattccacaatcggtatgtatatggttgggtcgtaagcgccatcctcatcaacctgattaaggagtgaccgattgttgctcttccaaggtccgtcgagccaagggccccaatactgggtctttctagggcttgcattctattcaggcgatgattcagtagatccctgaggacttaatggttcttttctaggatgatgattgattccttcctaaggactattaccggtggtgtcgtccattacttttatgtcaggaggctttttttaagatttttcacagaggctctccatgaaagcaccaaactgttagcgcagatttttgttaaccaaatttgagcctcacgaatatgattcaacacagaaaaaatatagaaaaagaaggaacaccagatttttacgtggttttgcagttaaaattctacatagtccacgagtcaatcttattgagatttcggagtttttttttcttaggggccttttgtatatgagcctccctcttttgatcttatctgccactatttataattgcatagtgacagttaattacagagctgacaaaaattcatttacggccagtatccctaaaattgtgggatttgattacaaatcaagccaaataaatgaggtttttacacaattttgagtatcctgcctttaacggaccgagatgaatgcataattaatgatataagataagtcgtatctcatagggatgtctcgccaagggggtgccaagatcactttgataacgagcagctggttgtcattttggcttctcgagactaatattgtcttaactctgatggttacaccttctggggtcgagaatattttcctcaattgcaaaacatcttttagcaagataaacgcctcattgtttgttatcttgactcgtcatactatctatactcagtttttatatcgtatatacgctaagtatttttagtgttgtcggtttttctttcacgcagtgaggctgaggcctcatcatgaacatgtgcgtccacatggtttctcgtcaatatataagttagcagttcgcacgtttctgtctcgcaaaaggctattcagccagccgagttataaacagaccctgcaagttgcatttccaacgagttgttccatgctaggcacacttgtcatttgcgtgtttgagttcttcctagctcgacacgtgtccccttcttatgttctcaccgaacttcgggtatagcaacagcttttagaaccactatggatagatgtttcttgaaagatattcctttttatggtgatgcttttacatgggctaagaataggaaaaatccatcagctttaaaagaaaggttggactgctgccttattaacaaaatttggtctgaaagtgtagtaatacctacacttactcatctagactattttggatctgaccaccatgcatctttggtaaatctttgcttctcaattccctctgaacttgttcaacatcgcagatcccgatttcgctttgaaaagatgtggttatgcgatttctgatataattttcagtaattggatgcaacaacaaacaggggacattatcaccactttacaatcaaacctgcagaatgttgcagatcatttacaaacttggcatacccaaaagtttgggaaaatgaaagttgatatttccaaggctcaaacacgtgttaatcaactcaattcatcatctacttcggatatgtctcaagctcaacatatacaatttgtagaatccatacttgatgatctcttagctagagaagaacaatattggcagcagaggtctcaccttgattggcttcattcgggcgatcacaataccaagttttttcatgctaaagctagtgccagaaattctaccaacaaaattacatctttattggatgctaatggtcatcttgttactgacagagaaggcatttcaaacattatttccagatatttttagaatcttttcactgaaaaagatgaggatcattgggccctttctcatgtgctatcgaccattcctactacaatcaacaatgttcacaacgagtctcttttgcgtgattttactaatgatgaagtgcttttttctctgaaatctatggcttcagattaaagttcggaattagatggtatgtctgctatgttttaccatcatcattggcatattgtagggaatcttgtatctaaggttgttttacatatcctcaatgatggtggaaatcctacatcattcaataaaacccttctcacattgattccaaaggtcaaaaaactgaaatccatgaaggactttcaccctattagtcgttgcaactttgtatacaaagctgtctcaaagatgattgttatcaaactcaaagatgttcttcctcatgtcatacccgaaatgcaaagtgcttttcttccaaattgattgattattgataatgtgttagtagcttttgaaatgattcactccctcaaacatcgtgagaaaggtgctaaaggctatgtagccatcaaattggacatgagtaaggcatttgatcgtgctgaatggtcttttctgacagcagtcatgggtaaaatgggttttaatattcgatggatttcacttattatgagatgcttacacacaaccacgttctcctttaatgttaatggtacagtcactggatccatcactcctctacgtggtttacgacaaggagatttgctttctccatatttatttctcatttgctcagaaggactatcacacttattacaatatgaagaaaatattggctgcctcaaaagttttgttgtctcccgtagagctcctctaatttcccactaattttttgcgaatgacaatctcttgttttgtcaagctgatgaccgatcctgtggggctattaaacatgctttagatatttatcatcgtgcctcaggtcaagaactaaacttggacaaatcggttatgtctttttcacctaatacaccggccagtgttcaacgctcattccaaaatatcctcgcgatgcccattagtgaatgccatgaaaaatatttacgcgtgcctgcttactctgaaagggataaaaaacaactctttagcaacatcaaagaacgcatctggaaactaatgcactcctggaatgatagacgtttttttaattggtgggaaagaagttttattaaaagctgttgtccaatcaatctctacttatttcatgagttgctttaagctgccctctactttcagtcaccaacttgaacaaatgatggcccaattttggtggagttctgacaaggacagaaagaagactcattggaggaaatggaaactcctttgcaaaactaaaatggaaggtggcatgggatttcgatctttcatccattttaatcaagccttactcgttaaacaagcttggaagattattcaatttcccacttcacttctcagtcgagttttaaaaggaaggtatttttccagcaatgattttttgcaagctcaaaagggtggctgttcttctttaacctggcaaggaatatgttgaggtcgtgatctattggtgaaaggattaaggttaaagattggtgatggttctagtatcaaatgtggctaagctccctggattccaaggcattcggtgtttactcccttgagatatactagtgatagtcaaaatcttgtctctcattacatcactgacacaaaagaatggaaccttcctctactaaaacaagatttctcccctgttgatattgattacatactcacgattcctctatctctttcgaatgtcatagatagatggatatggcactttagtaatacgagtgagtattcagtacaatcgggacatcaccttgtaaattctattgaagaggttgatcttacttctacctctactagttagaaaagatggtggaaatatttttagaatctgaaacttccctcaaaagtaaaaatattttcctggaaggtgttccacaatgccataccaactgctgcctctttgttctcttaaaaaattatagactcagcagcttgtagcctctgttcgaatgcttgggagtcagtggaccacgccatgtttatctgtaaacatgccaaaacagtctggaaaacagcatgcatttcacttgattatggtgcatgctctcgaatgaacattggtgattatctagtacttttgtccacgactaaaacaaaatcagaattggaacaaattctttgtacaatgtggtttctatggaatgactgaaacaatttcatacatggaaaaccgactctccattcatcacaaatttgggtaaaatctgctgcctatttctgcaacttccaacaacatacaactactcagcatgcgtctctcccgacttccacaggtgcggctgaaggttcaaaatggcatcctcctcctttgaacgaattcaaaatgaatgtggatgcagcatgtgatgtctctcaaaacaaagttggactgggagttatcatttggaattctacgggtcaagttgttgcagctttctctaagactctaataggtagatatagaccacaagaaatggaagcaaaagctttactcactggactagattgggcttctcatcataacttccttattatttctatttaatcggattctcttattttagtcaattccatgatagatattcgaaatcatttatcatatctctcctttgtttgtgtatctcatgttaggtcgcgagatactaaccaagctgctcatggcttggctaattatgctttggtgtcggataataattgtatgtggtttgaggaaattccttctaccattttctctgttgttgtaaatgactccttttaatttataataacatattttttttttcaaaaaaaaa

SEQ ID NO: 17168 - DNA, 3649 bp, Cannabis sativa
atttttaaatttattggcttaactttaaaattaaaataaaaagaaaaattatgtagatatttatataaagaaatttaaatttaatatattatatatatatatatattttataatcatatttgtaattttattattatttattttatattttaaattaaaatagttgtaataagaaattgattgcttttcattttagttatggtaaactgattcacacaccatatttttcgtttgggaatgaaaaagctttatataaaatttacgaattcagcctatatataaacacactcaaatttggttgtgtgagctttggttaattatatactaaattacaatgtatacattatcaaatacgttacctaattaaaataaattaaaatttaaaaaatacgtatatataattatattcaaatgacactagcaatagctaaaaaaaattcctaaaaatcaaaagctcaaactccatttcaaaaattaaaagaaaagttattacctaattaaaaaaattaaacaaacatatattgcacttaacatcacttaattaaacctaattaaaaagaaaactaattatatgtacattacatgtaatatctacctagtatatatatatacacgtggctttcttattattattattttctagttattcatacctattaaaaatatttcatatatatatatgtatataaaagccaagaagtggatactacaacggtaaaaaaaaatgaaagagaagagaagttgttaaatagatttccgacccaagggagtgctattaagatgtacaagtttgtctggttgtgagagaaatgtgaaactactagaatgcttataaccactaaaaatacgttctttaatttaaatctttttttttctttgatttcacttaaaatagttataccatgaaatcaaactatataataactatctacatatgttaagataataatataaataaaaataaaacaaaatcagacacattattaataatgatttcatgttgatttatgttttgtagaagtaaatttttcatagcccagaataaaaaataactacatacatatagaactctttttattatgtcagttggaaaattgtcctatagtttctatataaccgagttcagtatgatcacttcattagaaacctctctacctcccaaatgtatgcttattaaaagcttaaaataaaacctaattgtaaaataaatatataaataaaaaatattatataaagcaatacaaaatacaaggaatatgcatgaagctcgtataatgggaatagttatatatatatgggcatagttatatatgagggcataataataagcttacttaattttatccaacagtagacgtttgacatgaaaattgatgcactgtgaagtgaaaccctgcagtaacaggaacagttgagaacatatgacaagggttgatgaatacgaaaatagagtcttcagtttatcattaaaaactagagactgagaatatagatatacacacttttcttgttcatatccaagtccaccattgtcaatgactcttgggcgcatgcaactgaagatgatctaatctagtaagagaatagagagagagaatacatagttgatacgatagctagctagaaggtttgtgttctttttttgtattaaccttttttgagaaccatctccatcttttactcacttaggcgtgaagtttccattcagtttttacccctttaaccatcatacgtagaaactttctgtaccacatatcaaatttattcaagtttttcaatgagatttttcacaccacttcttttttattactattattataatttactctaggtaaccttcttaaaagattaaaccagactgccagtcatatgtcactttctcatcatacaatttcattttcttctcattattttttcatttcagtattgtcattgatataaataaataaatatatatatattattatataaagttgaacatatttgtgttcagaatacttgtaagtgcatttatggtttgatgattttatgatatgcgtacgttggatctagctataaggatatatataactgacggcatatataggcaatcatacatgcttctatgtccttacaactgtgcatagatagcatctcattatgctgagactgtacacttattcatttttatttatttgtactgtgtttttattgatttctcaattttttcgtttaaaggaatttaaaataaaacaaacagtatagaaaaatttaatcaagttattacttattttaaaaatttatgtgtttatgtgataccttttttttttttttttcaaaaacaaggttaactttctaatattttcctcaaaaaaaaaaaaaaggttaactttctaataataaggctctattatctgtttataagataccagatttacgaaactgatagaatataacatctcgtgatttatatgtgcagtggcaaatgttgttagaccgcctagaagaaatccgccaaaatgtaagattagaatcacattgatatatatcataatcatgtatatatatatatatgtcatattagtaaaatagagttgtctaaactttttattttttctttctaattgtaataggaccacagtcttagagagacgaatgaacagctgaagtccaaggttcgtttgctaattgattcaagataaataatatatgcatcgattagttaaatcttaatatatgtatatacattatatatttataaatgaatataacattaccattcggttatttttattaatattaattttgttttaattagcttgaagaaggaagaaataagggccggtctaataaaaatcaagggaacgatatcgacccacacgcagaaaacgattatgacaccacctataatccggactccatacaacccaataatcacaacctgatttacacgacaaagggttagtaaaaaaattctccaatatattacatattatttgatcatttcatatttatgtactgtggttcaatttataaaactcattcgaatgtgatgacaaggtcattcaaattttaagaatggtaactaaaaggttgtggtgtggttctgtgacaggccgtatcatagatacgttccccaactaacaaatgaacgtgatcaaggaatgtttatatataggggttgggagtgaccttatatatgcgcaccaacaagcctaatcgtttatctgaattaggtttttatatagctaaatatataaatatttatatatgcatatttttggattttggatatccatatgtatgtaaataaatgcaagtgcaggatattagctaaatttgtattatgatgtgtgatgatcgtttgcttactattagtaaaattattcgaactactgggattgaaagataagatacgactactaataactaagtgaatacgtaatcatgattataaaattaaaagtgaggttttcgtttttgtttttttctaagattaatcacatcaagcattaatttcaataaaagtgaggttggtaattagacaataattatgatgtgtgtcatacaattaacagtgagtagttctatatatatatataaaaaaaaaaaaataacactgatttggtacgctgaattgtattaaattgtattgtgttgtattagtatt

SEQ ID NO: 17169 - DNA, 6854 bp, Cannabis sativa
tttttttttttttgtgattttaggttagttctagtgtggtggtggtggttgtggtggtgtggctaggaagatatgttagggtggagaggattagggtttcaaggaaaaaaagaagaaaaaaaaagaaaataatttttttatataatttttaaattattttttataatattttaataattaaaattatgtggaccactaaaaatttaccatgtgtacatttgtgtatacattagtaatactaattgacatttctaagcagtcttccaatatagagaagtgtaaatatagtaaaacataatgaaggtttcagtaagttttttttgtcaaaaaattagtttatagagataggtgatacaaaccacaaaatttaagtagttttacggttaatattccaaaaagataacgtaaaaggaaatatacgtccacgtcatcaccttagtatttacatttatataagtatataaataatagatagattttgagtgtgtgagagatattcaattggagagagagttgtttggaaaataaaaaagagaaagatgttaattaatgcaaatggaaaatttaacagtggtggtgaagttattggtggtaaaatctttttatgttttaatttttatacatttatttttattttttttttgataaaactcgtttaagtttgtttatctttgtaaatttgatgcatcagttaaaaatatctgtggaagaccaactaaataatcactgtgtatatatgtgtagacgtgaaaagtaaaacttcgaagctaatacaataataatttaattagtatttaaccgtaatatctaactgacattttaaatttataaataaaaaagcaaatataaagaggttttgtaaaaaaaaaatttaagtgtataaaatttaaaatataaagatatttaacctcaaataacccagtattattaaatatctgtttgttggcaattaggtggaacgatttaagtgtagctagagagacaagcacaagggacaagaaaatggggactatgtagttgttgggaataaagatcacgtttataataatttaaaccttatattattcacgagatatatagttgaactagtttggattgcattatgctctcttggtagattttttcttctcttttctttgtgaccatatatattcttatttttttagttttcccttggaattttatattaattagggtgtcaatatattgggactatattttatttaaatacaagttatatatattatgagtttttaataatatttattaatttagtattttgtattttaaaatcatacatatttatatttagtactttaaatttaaattttatatattttaaatttaaatttaattatttgattatatatataattaagatctgtttagttaaattgataaaattatattgattaaattttatttaaggtattaatatgtaaaatttaaaaatatgaataccgactaaatattatttaaaacaggtactaaatttttgtcataaaaagacaagataatattctctataaattaccacagccacaaagcgatgtatcaattgtttgtataacagatggagctagcttttgcttaatatattataatttgttcatgtgatcaacctatattcaacaagtaaatagatctatcgaagcaaatggtatgacacaatacacacacatttatataataattaatctatgtgtctcaacaaataataatatattatatatatgtgtaaatatatatatatatacaggggtcgacgtcgtcagaattagaaggagtgatttcgattggagcatgggggagtcgttcaggcggcgatccatggagctacaaacctaacactgcctctccaataagagagataatattcttccatgaaggtggtaatatcaagtccatttcgttcaaacaccaagatagttttatctctgggggattcggtggcagagatcctaatgacaggggtacttcagagaccagggtaatatattttcgatacatatatagttgttatatggctattggtgtacgtagcagtgttactaataataacaattaatgttgtttactaaatatatatatagattactttgcgaacgccgtcagagtatttgaaatccataagtggaacgtatggtgtgtacaatggggtagctgatgttatactttcactatcttttcacacaaatctgagtacatatgtaccttttggtcgtccctctaatactggcacgcctttcaccatccccatggaagacagtgtcgtagttggatttcatggacgagctggctattaccttgatgctattggtatctatgtaaaaccagtaagtatatatagtcagctatatttgtatattattattggattcgggtacttattattaattaattgtagttaaatccaagaggaagcatttcacttgggacatggggtggtccgaagggagacccttttggtttcatggtggggactactagttggattaaacagataattattcgacacgattccaatatcaaggctctctctttcaaggatgagaatgaccacaactatggaatttttggtggcaagaatcctaatgatcttggtagagaagccatagtaagtaattaatactcctttatatatatatattaactgaattattgactatatattagttggtagattaaggtgaatgaggttttattttaaaattaattggtaatggacaactcgattataagagtagctctgttttggttcaatatttctcatcaaaagttttttttttaactttggctcttagaacaattttttttttatatttttttttgaattggatagtcctacgtactcattagtaatggaaaataaagtattttattcatcttctatattaacaatgtgagactctttaatttgcagattgagtttgatgggagatctgagttcttacatctataagtgggacatatggaagttatgtaaactacgcgtcggtgatcacgtcattattattcgaaacaaacctgaatacatatgggccattcggaagagaaataggcactactttctcccttccaattatgcgaggtgccgtcgttgttggatttcatggaaaatcaaacatttacattgattcaattggcatctatgtcagaccggtccgtaatttttttatttttttttattttttgccctaattaatatataatagtcatcactaataataatttatacacgttttttctaatgcttaattttattaaatgtttaatatagagaacggtcggctgatcaatacataaaatggagtggcggctgaggaaatattcaacctgcgtctatcacataatgtttccttggatttggatatatccttgttttacatcatgcttaattactaccatgcattttggccatgcagtcttgatcttgatgaggactctttctgtttaagcttgtcacaataatatgtaatgttttgttattatatatttagtaaattttctctcttcatgatccatttaaaattttattgaaagataaaaccaaaactttcttaccataaacagctaaactttaacttcatttacaattcaagagactcaggatccctagaggtccaggcaggctatgcccgtgtttaggacctaaaatttttatgtagtaaatacttattcactacacaaaaaaaaattcttacgcccattattaatcaaagttggccctgaatcacgaacaagtttaacaaaatatttataatcaatttaacaagttgtatttcacttatggacacctgagaacaaatggagctttgccaactgagtttctcgaagtattcacttttgattacagtggtatttcaacagagtttcactgtaacaaatatgagtattaggggccacaaaagtcacccctaaaatcataaaatatcgcctctaaaaagttgcctctaataattcgcgcctaaaaatactattagaggtgacaaaaaagttacctcaaattaagggcaacatttgtcgcccctaatactcctaaaagtcgcgcctaaaaagatgtgtcaatattctatttttgaccttcacacactgactccttaaatggatacaaatactatattcattttgttgatatatactctagattcacttagatatacatgttaaagaataaatttgaggctttaaaggtctttcttaactttaattgtgaggctgagttacaattaggattcaaattgaaatgtctttaagagattggggaggagaatataggtcattcattagtaacttacaagaaatgggaataactcatatacacccttgtctaactacttatgagcagaatggcattgctgaaagaaagcatatacacattgttgaaaatggtcatgctttacttgcttaagcacacttaccctttaaattttgggacgaggcctttagaacttctgtctaccttcataatagacttccaacactagtattaggaaacaaatttcctctagaaattctgtttaacatcaagcctgactatagctggttgaaaacctttgactgcacttgttatcctaacataagaccctacaataagtacaagctccaatcagatccacaccctgcacttttttagggtatagccttaatcacaaaggctacaagtgccttagttcaaatggtagactctacatccctagagatgttatctatgatgagcatcaattttcctatgcttaatcaaatagttcaaacatttctaaaaaatgtcacgtgcttgaaacattttcctcagctcacattcccatgttctcatattctcttgtaccaataaatccaactacatatggtccaaatgaaccacaagcagatccctcatgttcaacttctcatactaacagaactgttgagttgcagcagaatctctctgaacaggttgttggcagtatgcagcctgttaacacaacatttgtaactactgatgggcaaacaacgatattcaagttcttactgttaacatagcactttcaccagtagctggttaaacagaggttcaagcctccactacttcgtctgaataagctaaacatagtcatgcacatcctaatctcactgatactgcagacaatcaacaaaccaaacacaaaatgcaaactcagtctaagtttggtatctataaacctaaaacattcattgtttccgaactcgccgagtcaattcagcaagccttgttgtatggtcattggaacaattcaatgttagaagagatgtttgctctaaagaaaaacaagatttggactgttattagaattcctgcagggagagcggtaatagggtgcaagtgggtatataaaatcaaggaaaatactgatggttcagttaataagttcaaggcaaggctggttgccaagggctttcaccaacaacctgggtttgatttcactgagactttcagtctagtggtcaaaccagtcgcaatgagagttgtgtttactcttgctctaagcaaaggttggtgtgttagacaactggatgtaaataatacttttttcaatggtgatctccaagaggaagtctacatgctccaaactcctaattttgaagatcctaccactcctcatctagttttcaaacttcacaagtctttatggtctgaagcaagcaccaagtttgactaagtttgactttctctcatctaaggcagatcactccttgtttattcaatatatatcacacttaattatttttattttggtgtatgttgatgacattttgatcattggtaatgatcaagctatcattgcctctcttatatcaaagctgaatcaagagttctctcttaaagatttgggtatgttgaactacttcccaggcttagaatttttgtacactgatcaagggatgcttctcactcaaactaagtacatcaaggatcttctctgcaaggctaaaatgcaggaagctaaacctaatccaactcccatgaaaagtggccaaagactctctgcttatggcaatgatcccattgaagatgctcagctatacaaatcaattgtaagagccttacaatatctaaccatcacaagacaagggattgtctttagtgtgaataaagtgtgtcaattcatgcacaatactctacaaagtcactggctagctagcagtcaaaagaattttaagatatgttagtagaatacaacatcataggttatacataaaacaatcggcataacttgatctcaaagccttctgtgatgcagattgggccacagacagtgatgatagaaggggaacttctggttttgctgtgtttctaggctcaaatctgatctcttgaaaaagcaagaagcaacatacgatgtcaagctctagtactgaagccaagtataagagtttagcaagtgtggttgctgaaatctcctagctgcaatcattgttctctgaattgcatctcaatctgcctcggacatcagtgatctagtgcgataacttgagcactataatgctcactccaaaccttgttttacatgctcgaaccaagtatattgagttagatctctattttgttagagaaaaggttcaacagggcctcattgaagtgaagcatgttccatcctttgatcagctagaagatggatttactaaggctatttcaagtagtcgatttgctatttttagaaccaatctcacaatcgaagatgcttcaattatgagattgagggaggatgttaagacaattaaatttagtattagccagctgtctttagtgttagttgcttaagttagttagattcaattgagagctttggtgagttgttattttgttactgtaactaactctctctctctctctc

SEQ ID NO: 17170 - DNA, 6500 bp, Cannabis sativa
  modified_base (6014)..(6017): a, c, t, g, unknown or other
gggcataaaacctaacagttaggtacatcaaaccacctaggatacaacgttatcaggtgtgaaagtgactttaaattctataaattggggatctgatgaagttgtaaaaggccaaaggctcattatatacagggcccatgaattcatgtaaatggacttttgggttggtgaataaaaaaataatatttctagagataaaaggttgtgagatttttcttttcaagcatttttctatcaagacctccaaatactattttaagtccttgttcgtttgttgacgagttcttactgtcaatactagctctgaaacctgaccgaagcgttgccttcaaatgaggcccaaagctcgagccgagaaaacgaggaatcaagccaccagccacgaccatcctctgcacatcgtcgaccggcacctaaaaagacgaccatatgccctttgacatatcgtgcactaccgtggcccccttaccactcttgacccaaccattgggcaccttcaatttgcccgagaagcaactcggataaggagacaacatattaagccattggccacaaagagggaaaggaataccctgaggattcaaaatggtcaccagcgaaactagagagcaagcactcctctagtgtcccagccactcgcacaagtagcaaaaattcccaagtttttcatacttgatttggatccatctgtcttctccattcactaatttaaaaaaatccagtgaattattcacctctatttccacttggactctaatccaattgttccatgaaactagtttagattcatctaactcgatagagacatctctacccgcctgagctcccaacaagttggcattcgccctaaagaataaatcatgtggaaggttatggatttggatccacaaacgtctagtgttaaacgatagctctttaatgccaaaactcgaagaccatgacatcatcactagtaaatctcctttaatgcaccaaggaccatggtcgagcacccactttctatccgaagctttttcaaatccaaaacagaagatattcgaataagctttgaccaagaatggtaaatcaaccttcaccctagtcttccaaagagaagcacaataactttccacccccatttccataaaagctaatttagaagagataatcttaccaataagacaaactttgaaaggaccagagtcgtagaagcacttgggattagagaaatagaagcctcaataaaagggatacatttcccctcttaccaacatgctgctcattaatatcccccataataactcccagtcaccaacctaggatgacaggccaaacacacgtgaataaaagccactaccacatgtgaagaacaccacaaacacactcccccaaccccactcgaacacaataaaacaccacatctgagaaaaggccaaaagagaataaactaggccaaacaataaggaacacaaggaatgtcccaacaaaagaaacacataaaaatcaaacaagacgtgaaggaagtcaaaggaaaaaaaaggaaccgaatagaaaataccaaacaaaagacacccaacaacaccaatgaaacacaaaacaaactggccaccaaacagaaatcactccacaagacacaagtcaaataatggacaaacaaacagggaaaatggtataaatgaagaaaatgaacaagagagaatagtagaaaactattttctttgtttattatccaaatgaaataatttccaattgaaacttcctttttttttgaataaaagtgaatttaaattaaaacaaaaaattagacctcatggtcattacatgaaacgttatccagaatctcaacaagatcggccatcccagttacattcctagcaaaagtccacttagccatattatgggccacaaaattatattgtttagaaatagaaataaaattacagttaatgaagagatttgagagttatttacattgaatcacatagttaccgatgttccaataggagtaaattcccttcaacgcattgataaccttctcgaagtcactctcaatcatcacaaaatagtacttctttgagatcgttgattccacagctaacagacaagccatcgcttctcaaattagagggtcagagaagttgagcactttggaagccgcctataaaacaatctccttatgatccctagctaaagccaccacacacatcgaatcgaagccaactttcacatcacaattgattttgatccagtcattcgggggaggggaccaagcaagagacttagatgtcatcaaagaagttaacaaacatgaaccataatcttctaacacctataaatagagtcaatatactgtttaatattacatatagaattattatgcactttctcattacgggttttccagattgtgtcgactacaattgaagcatacagaaaaagttcctgaacattcacacctctagtctttagactctatagaaatttaacctaatcccacattcggggtccagattccagaattgggaaaataccccatggggaagattccaaaggtgaaaggaaaagttgcaatagagaaaaatatgttccatcgtttcatcactctctccacaaaaaggacaggaaacaccctcaatatgcaaccttttagccaaaatggagcaaataggcagagctttagagataatgctaaaccaaagcaccttgtgacgctccaaaatttttgaattctaaattttattccacatactcggagcaacactgcaatgaggagcctgattcagggcctggaccaggtaggccgacttagtagagaataaaccattcgattctttagtctaaatccacttgtccgtaccctgacctccatgtttacctcccttaataatgttctttgtagtttcaagattgaacatagcttagagcttagttaaattccagtccccattttctgttagtaagtctgctactttctctaaaccttccacccgattgcaattcggttgagggtaaaaatcctgaccatgcataatcagggatcctcccaaatattagtatctttctcgtctaaaatgattttacaggccccctgtttaatgatttccttagtttttaccacattcttccagaaccaagagtccgagctcttgtaggcacaattcaagaacggtcttccttttaggtacttagcacttaggaccttacaacatagtgattgatccctagtaagaagagcccaaccctattttgccagaagagcataattcatttcttgagttttcctgaagccaagactaactatagactttggcagacagatctgatctcaagccttcaagtagatacccctgtttccctgctcacaaccccactaaaaatccttaaccataccgtcaattttagaagcaagcctattagatagctttgttgtttgcattgcataaactagtaaggagaggcatactgatttgatcagagtagctcgacctgctttatagagcaatttcaacttccacccatgaagcttggagacaaggttatcaagagtgaaattaaagtttgcatctttattttgactgcgaaacagtggaagccctagataattaatatttccagtggcaatgttaaggctaagttctttcttgatattacgtttcatcccctcgctggtattcttcctaaagaaaatgaaagttttcaatttatttatacattgagctgaccagtctcagaatttttccagacacctccaaaatacccttagcctcctacaatgtggccttgcccgcaagaataagatcatccgcgaataatagatgggaaattcgaggaccattcctactcaacttgattcctttaatggttctattgtctagttccctttcaagaatacgcgatagaatctcggctgcccatatgaacagataaagggataaaggatcttcttgccttaaaccacattcaggggtaagcttattaatctaatatccattcaggcatatattaaatgaggtcgtggatatgcattaccttacccagttacaaaacatttcaggagccttaaagcttcggagcacatgatcaataaactgcaaacttactctatcataagctttcacgagatcaattttaacggcaaagaaaccctcttttccttttttgagcttgaacgtgtggatgatttcttgaactaagatgttgttgtcctgaatactatgcctagggacaaatgcagcctgagttgggcatatcagtgtggggagcacatgtctaattctatttgcaattatttaagaagtaactttgtacgccacattgcaaagggaaatatgcctgaactgcaaaactttctttagatttgggaccttggggatcaggaccaccttagtaacattgatacctttatgaatcatttctgtaaggaaaaaatctcagatggcctcacaaaaattcgtgcccactgagtcccagtaatgtttaaagaacaaaactcatgacattccatccgaacatggggctttcaggcttcccatatagaacaaagtttgtctgatttcctcaggccctggaatcacttccaactcaagttgttatagcgaggaaagggaatttgcaattaaatgactcagattctccatcggaccctggaccgggtttgtgaacacttcttttggaaactctgaaaaactccctgccaatctcccttttggtcgttacccaaaccccgtccttatttaatatactctctacctcattatgcttattacagataggtggcggtagtaaaaaaaaactttgaacatttgtccccctcctttatctaagaaatacgagatctctattgccagtaaagagctttccgtctaagggcctcgttaagggccttccttacttctaattccttaacccaacttctactactcgccggcatcctctggatgttcgtgagttacttttccaattggctgatgcacgtatccagcttcccaaatcgttctctattccacttactcaacgtctgatgagtagcttcaaccttcttaaaatttctagcaagagcctagtcatgagaaactgaattccacgcatgatcaaaaaccagagtactccttgggtccctagtccaccaagcttcaaactaaaaccggcatttttctcttatctccaggaacagtgggacactgtgcgaacaaacaggggcctatggtatgaattgcaggtatgtaaagagcgaatcgaagctttcaggaagagttgtagccactcctcatttaccaaagctaaatcaagagcagatttgatgtggttcaggccttccagctggttatcccatatcaagttatcacccttgataggcaagtctatcaaggcatggcgcttaatagataagaaataaatgggataaattggtcttttcctttagaaccgacccgctcagagctacttagcacaaagttcacatctcctaggatcatccaaggcccactaaacttgcgcccaatgtccatgatgttcgactagaaatgcttcttctcatgaaagtacggtggcccgtaaacataagataataactaaggataattcctaaggtcagagtacacaatgccagtaatttagtttttagttaaacaaatgctttcaaaactaaaactgtttttccacgctaagattaaacccttgacattacccacaacaggcatactaatattgaaataaaaatgaaagttcttaagagtgcgtaccaaaaaattaacatccactttgagttcagtcacaaagataaattcggagagcacgaccaaatcagggctttcagttccaaaactgtagaggtctgccccaaccctctacaattccaagcaacacctctcatgcttcccgtggaagagggataccatcctcctccacatgggtcacatcatcagcaggaataccaatgggataacttgaaaaatacctgttttttgtgtaagtcaaccaaaactactagcaaactatattcatttaaattatacccacttttataaggagattgnnnnatatacccccacattaacattaaagaccgaaaattaaatcatactgttttgggttaaagaaagggtattataagaacattaactatgaaagtgggtagaaaaaatgaaatattaaaaagagggtaaaaattaaaatggttaacttaaagtgggtaccccacgtgattttttcaataccaattacagatttctcatctttaacccgaaagtcttccttgacagggatagaaatatccatcaaccgatccctagctttccagactgtaagtctagaagactgtcccgacgagaccagtttgtcaacttgttgcgagcagaccgacatctccttaaagcgatcaccccttttgacttccttaatacaaccataaacttccttaatcaatgtaggtgtatttttatattactagcgaaaagttacgtacgaggcacgtatactaaattttatgctaatttttttctacgttattaaaaagtgataca

SEQ ID NO: 17171 - DNA, 3354 bp, Cannabis sativa
tagatcctggtaaaacaataatccaacagataaaagccttgatctttttaggattagcctcaattcctcgagagctaacaatataccccaggaacttcctagaggagaccccaaaggtgcatttttttgggattcaacttcataccgtaccttcttattaccaaaaaggcttctttaaggtcttgaccgtgctcttcggaggttttggattttactagcatgttatctacgtacacctccatatttctccctagttgattcttgaacatccaatttaccatccgttagtacatggccccaagttcttgagtccaaacagcatcaccttatagcagtaaacgcccttgtcggtctagaatatggtatggtcctcatttatgatattcatcttaatctaattatacctagaatagatgtcaatgaaggtgagaaacttgtatccagacgtggcatctactgtttgatcgatctacagaagcagaaaacaatcttttgggcaaggcatatttaggtctataaactatgcacatcctccacgtaccgttgggtttcagaactaataccagattcgcaagccataccagatacaacgattcctagaggaagtcattggcagtcagcttgtcgacttttatctttaattgcttcggccctgaccgggtctaaaggcctccttttttggcgagttggggttgcatctttgtagatattcaaagcatggaaaattgtgtttcgatcaatttcggtcatgtcagaatggctccaagccagcacatcttggtttttcttgactgtattgatgacgtcttctcttatgaccggaggtagattctttcccactctgatggtcctagtgggttcttcttcactaatactcacttcttccacctcctccatctgttccatatttctctcaatcccaactctcagatctaactcatctataaactcttccaggacagtttctatgccattaagtcttctaccccgggagcaacgagtatttcttcctggaccatgaacacagtccgcgtcgacacattgtaacatttttttgcacttcgctggtcgtctttgatagtcccaatgcatccattgtcacatgggaatttcatgcataaatatcggatagaagtcactgccccaaagtctattagggtttgtcgacctagtatggaattatatgcagttgggcaatccactactacaaaggttgagtgtttacacgtgcttgcctcattttcctctttgagggtgataggcagctggatctttcccatgggcattaatgcatcaccattaaagccttgcagttggatggggcatggagttagatctacttcagtgagtctgatcgcttagaatacaaatctgaacaaaatagtaatggagtttccattgtctactaagactctagagactcgtttgttagcaatctgtgcatcaatcaccagaggatcattgtgagggaagcgtacattcttggcattgtcctttgtaaaggtgatcggcaagttcatcattttgggacgctgtgcgggagagtgtaccaacgcacacacttctccttcctccacttctctcaggtatcttttttgtgcattgcgagtaattctcgcgagatgggtcctcctgaaactgttttaacatgtccatcaacaggcggtggagcgaactaggagggtatggggttgctgatctcagggcaagaaaggccaccccagctggagttggcggagtaggaagggaaggtaatgatgttcctaggagggttgtaaataaacttttgtaaactgcccaaaccaaaccgagataacctgacaaaaaatacaaactgaaaaatcgaacaaaaatataacccgcccaatctttatattgggcgggttgaaattaataccaacccccccaatccacccaaactaacccgaccaacccgattaagagggtttttttgtatatatttataattttttattatatatatttatatatcatataatttatatgacaattaaaaaatataaagttgaaactaatatatttttttattgtggttgatttgaactttaaattcaatctatatatatttgtctcattattacaattaattaaatataacaattaaatgtaaaaataaaaaaaaaattgaaaaagtattagtggttggtttggacgggttaacctgaccaaactgacaaatttcattgggcgggttattattttttttttaattgggtgagttgcacttagatttttgtaatccaatttttacattgagttgaataaaatgtaccataaactgatcaaatcgaccgatgtacactcctaattcctagagcttgagggcgtcctacccctgtggaggatttatagcgccctactgtctcgaaactatcatgtgtccctgaaccaccccctatccaggataaatgatcgggatgcaaacccattgtcccaaatttcccgctcatactgacatttcaatttcatcctttaaatactcacactcgtttgtagtatgacccttctctgcatgatacttggactctttattctggtcgcgcctattcctcccgccatgcgacatacacggaggctttcagtaatgaaccatgttgcatgtggcttggtaaacattttctcatgtatatatcaagcttgtgcattcaatatacttcaagtcatattcctttcttggcttccttacaaaacattgcggctgtaatttttacccctctctttctccgtgaatgtcccgtgctagagtctgggacctcattcttagcttgtttgggagccatgttgcatcccgtttgtgccacgtcgtacccggagaaacgggtctctataggaacgagaccggatgcagtaggcccatagacagttggggaaaactaaggtctaaggatggacaaggctggagaaggagtttgggatggaaaactgggaacaaccgtggttggagtcactgtaggagggactccaaaggcctgtatgtaagcatctttaaggttaattataccttgtgcttttgccataaattcacataatgtttcagctcttttcctctgcattctccccacaatagggagcctacaaccagtccagattagagggccattagcttcatatcgtcactgaccttagttttcgtggctgcctccatcattctctaaataaaagccttcaagctctcattatgttgtggcttgacgttggtgaacgaaccaacttccatgtcctcttctcatgcagccatgaattacttgcggaaagccaattgtgaatccttacaactatcaattgatcccagagccaactgcttccactaatcctctgcgaacttagtcaggg

SEQ ID NO: 17172 - DNA, 6979 bp, Cannabis sativa
aaaagtatttatgatatttaatttaatttactttttttttttagagattaatttactttattttgtataggattaaattttaaacgggaattctatcattccttcctactaaacacataatttattctctctttccaatattttccttccaaaacatcactgtaaataaaggacttcaaaagaactggaattacttttgagtgcggtttcggttttaaacaaatagaaccttccagatgttcacccgaacccactcaactccattccattgtcttctctctctcacctggccctcttttatcatattattctcctcaatccatttctgcaatattatccattataataaacaaataaatagacattttgtcacaacctatcgtttatcatatcatatcatataaatcctcaaattcttctccctccacaatccaattgtatctaatttttttaagaaaagaaagggaaaaagaaaacggaagtcatattgaagtaatgaagtaaccaaatgatcttactttacagagcccaacgagggtgggtcccaccaatcacatcacataaatcgatcataaactccacgtggcatcatacgcgtcgcttgttccctataccatacgcttctccatattttattttatttctttaaaaaaaagaaaaactttcttctctcctttcctgtccaaaagcagcagaagcaaactcatccatattccatatttcaatttcgtccgtctctctctctttgacggaaatctagacacacaaaccaaatcaaaccaaacccaagtttctgaactgagtccaactcaggtttgaattgattgcaacacaacaacgcctttttttttttttttgtttccattcacaactatttggaagtctctggtaatctattactgctcttccgttttctaaactagaaaattcaaaagtaggtctgaagagctacttcatattttagtttgatcaaaacattttgtattggttttcgcaaactttaaaatgatttgtttaggagtcatggtttcatgcatcattctctttaatatttaactgggatcatatttaaattttatatcttttaaattttaggtaatgggacaggaatcctttcctcctttttcgtttatttaaggccataaatattggtactatatttcaatttgtctggttttcttttttattttcctaaaaagaactcgtgttgtgtcactgttctgtattttaagttaaaaatcgtttgaagagtgattggagacatgatatttgtgtaattatccgttaccaaacatggattttggttgacatatccatttctctgtaattcgacacctgggtgggtcgagttgggctgtaatgtttcttgtcgtttttcgaaatatcgaattttgttcattcttatctaattttctgtctgtattttatttttgggctggtggcagaaacgaggagccatcttattaaggcggtgagagagagtaaaggtgacacgttatagaatggtaagaaaagtggagctccaccagggtgctgctgaggacttgaacgtcagctttgagaagcttatgatgctcggtgttggtgatcgtagtggtggaaaagtgaaaatggaaggtggggttatcactgattggaaggatattcctatggagctgttgttgcaaatcgtttcgattgtggatgatcagacggtgatcatggcatctggggtgtgtcgtggttggagagatgctatttctctcggcctcacccatctctctctatcatggtattgttttgaataccttgattaatttatttgtcgtttttttatgatcttaaggggtcttttaggtgtccagtgtttgcaacctctttaattctaaaaaaatcttaaatttgtcaaattggcttttgaagagattggaaagaaattgtttaaaccacaagtgttgtcgtatcgaggtttttctaattcaggtcttttgttttggacattggacatagctctattaaagcctttttacatacctgtttataagacatagctctaataattacaaattaaagtagttcaaattcaccttagagaaacatcttcttttgcaattaatttgattcttggagctgcgtgtataatttccactttcaaaagtttttataaaatttgtaacaataagtgttaggatgagcgatgattcatattttatgagcaactaagttatctatgcttcaaaatctttatttagcatgttcgtgaatggccatctaatcatctgaagctgctatcttttttgtttaggtgtaacaagaatatgaacaacttggtcctatcacttgctcctaaattcacaaaactgcaaactctgattctgcgtcaggataaaccacaacttgaggacaatgctgttgaggctatagcaaacttctgtcatgatctgcagatccttgatctcagtaaaagcttcaagcttagtgatgactcgctatatgctttggctcgtggttgtcaaaaccttactaaactcaatatcagtggctgccctgctttcagtgatgttgctcttgcacatcttgctagttgttgcagaaacttaaaagttttcaatctctgcggatgtgtgaaaactgcaacagacagggctctgcaggtatgataagctcttacaaatttctccatggtttgatctgagatagttcttaacaaatttctttattatgttcaggctattggacgttactgcaatcagctgcagtctttaaatcttggatggtgtgacaatgtcagtgatgttggagttatgagtttagcatatggttgccctgatcttagaaccgttgacttgtgcggatgtgtccttataactggtacaatcgtactaagatcattaactggtttcgtttaattataagatttattattttactgggtttctaactatgataataatgaccatttaagttttaaccctttccgcacttggttttttcagatgatagtgtgattgctttggcaaataggtgtgtccatctgagatcccttgggctgtactactgccagaacatcaccgacaaggcaatgtattctttggcccaaagtcgagtgaagaacaaacctgaaacatgggacgatgaggaggggcttaaaactctgaacattagccaatgcacggcgcttactcctcccgctgttcaggcagtgtgtgatacatttccttcgcttcacacttgttcaggcaggcattcactcatcatgagtggctgtttgaatttaacatctgttcattgtgcatgcgctttccaagctcagttccgcagccccaccatgttgcctccttcagctcattaaaactcactgggctatgtcaattgtctcctttagcctctccataaagaagtgtctttcccttgtagatatgtgttttatgtccaagtgttcagagactgactagctgcaagggtttttcagaacctgcagactatgtgaattactactatttaacttttgcaagatttacatttatgaaatgggaaaactgggtgtggctccaagcttctaggcccagtagtgtatgttatgtgtgagtgtggtggcgttttctcttatggttatggaaactatttatccatttcaacattaaagttataaccatatctaagatgaatattgagtaccatgcttaaagaaattgaaaacaatacatctttctttcgaatccaaacttgtttctctatagtttgatgattagcaaaatcaatacgaaaataatttcatttgcttttaaaagcagtgaagtttgcaatcagtgatgttgtgcccgaatgagatgacaatatctgtaatagtaaaacaaatacagaaaatacaaacacaaatcaagagctttctctgttataagaactcaaagtcggagtggaaaaatcctatcaatgcacactttttcttatatttatttcctgatatacacccaatgtttggtcttcagctcttagtttgtcaacggtagcagaatacaaagttaatgttgccatttcgtaaggaacagcattgcgtatagtgaatggttgccgtgtatacgaactcatttgcttttgtacacaatctcttcatcgtccacatcgaacgctgggttgcaaaggcatctaaagagtctacctatgccctgccacaaaataaaatagttgaccaagctcattgaatttatgatctataatacatgtatcattgagtgaaaaccttaagtatcactttgaagaaacggatagaagaaccaacgtacataatattttatggattacttgcctgggttagaaatggtgttcgatacgtgagtgatcttgatgagtcgtcttcgctgtcagaactgctgtcatcatcatcactatcagcttcattcttccttctggaagtcccgccatttcgagcatgtttttcctcctggtaacataatctttaaagcttagtatcaacatagctaatgtaccgttatttctatttgaatatgggaatagcattgttttgagaaaagaatattgcaagtgtttgacctgaaatatcttgcctagtaatttgagagccagagcacgaagtttaagttcttctttcttaacattattctccttaagcacctaaaagtcacatgtagagacatgcatatattataaatatatatatactacttcataatgaaagccctttggataatgaaaacaatggctctcaccaattggcaaacgtgtaaaagggttacttcaatatcaacaacattcaacttccacagagagttcataagtgtgtctttgtttaaccgtatgtgggattctaaatcgctctcttggctactcccatttccctccatcttaaaatttctacgcatgtcttcttggagttgtaataactgaaaagcacctgaattgttgtttatttgcagcattaagatcaatcaagccaagcatggtgaagcattatgaaagcaaatacaatgatatacagtagtctatccgtacacaccttttgcagcagttagctgggacttccagaaatgtcctttgttccgaacccactcagccaagaatggtactccaaggaatatggctttctttccaagctctaatgctgcttgcctcgagtatatgtagccgatggtgtttaacatttcaattccaaaagctgcatgatataataagcctctagaatgaaataacttgcattgttagctagtcatagaaaactaaaaggtgcctcaatcaaacctgcatcagaaagtcgtttggcttcagtttccgcgtgtcttatgaacccatccttgtcacctctaacatactgatttagaaaatctttcaataaccttgctagcttttcttctctttctcgctggacagcctgcattagcaaagagtatgtttatgaaaagttaaccccgaactctaattcaatccaaaatagtaatgaacctttgaagagactgatattcatgtggtcaggaaaggaatttttagttgtgtaatgattttaagagcatacttacctttaacttatcatgtagtttcccagggttttcagtatctccaactaattcggaagaagccattgatgccactgccagatgtcctacatagtcttcaaacaattcacttccaaataaaagagcaaagaccgctgtagggtcaagcatggtttcccttcaaagtaaaattacaaggagatcaaattagttttactataatcagttcagtaaagatattgattagctgatcagcaaggatctcgattgtcgagtccagtatacgtagttccgcatattaattcaattccatttggtttataaaataaagtagatattatataatatagacaagtgtaagggtcatagaaaaacgagaaaattaccttgatatgctgtactttccattacgatcgtatgaatctctttgcactggatcactcaaaacttggtaagcctcacctagcacctgtgtcaacattttacaataataaggtaaaatgataataggctgatctggatcctgattttatctacttctgttagtcacttaaagactccaataaactacaattagataaagttggcacacccttttccatatttttctttaaaaagtaggtaaatgcttgattgtttgtgttggagtgacttgcctgaaatctttcagcagcttgaggatcgttcggatttttatctggatgaacttgccttgcctatacaaacatgccatttggatcatattattttattgcaattatacaacttaagaaagataatatcaatgaacaatttggttactatatgatcaaagcaatgtaagggtatcaacaatcatgtgagtgaaaagataagacgtaattgaaaaagataaaatggcaaataatgaaccttaagataataggccttgcgaatttcttcctcagaaacagaaggagtgacaccaaggacatcatagtactcggtttcctttaccattgtggctctgttacctgagagtgagaagagattgagtatacttacacagagaaagatgggaaagaaaaaagtgataagaaagatagaaagaaaagaaagatgggtgagattgaggacaggaaggggagccccacgagcttagttgcctttccagtgctcacaccaataaactaatccttcaaactgcctttccgcgggagcatttacactattttaactgtcaccatagtggcgcttatcatacgttttgtcaattaaaaaaaggaaaaagtttgagagctgtcttgtgggcttataatgcaggccttgtatcgctccactttgagagtgtaataattgtgggccaacacattggaccttgggcatgacttgtccctttagattatggatccttactccttatagtggttcttctgatcattggggccctatgttcttcgactggacacgtagagaagcaaattttctcttacatatctcgcctaagagcatttgtactacatattctaaaatat

SEQ ID NO: 17173 - DNA, 3437 bp, Cannabis sativa
gaaccttaatttttgtattttcttaatgtatagggtattgctaaagaaactttcggtgatgaatttaagacctataaagggttaggcaaagttgttgatcgatttatcgttgttgtgacataagaccgagatcatcgggcgtttctccactcgggttggctgacaagcatgaatttggattaaatataagaaaagtataattgtactacataacatgtcgtgtgtagatacaattgttatcgtttataagatacaattattattgtttataagacacagtcatcaccgttatgtgagaaaaagtcatggctattaattgaaactattgttagattttttatttttcggttatctcattaggtaacagtaatgacatatggttattgagataggtatcaggactgtcttatgagacaacaaaaattatatttgaatatcataatagggattagggttgtcttattagacaacgataaaattaattactttataagtaacgaatatgacttgttatattatacaagtacttgtgtattgttaaatatttatatatttgtaaatatatgattgtgattatctaattatgatgatctgagtttaaattaatattatttatgtactaatttgagatattatattattgtttttcttgttgagtctttgtgattcacaggtgctatgtggtgaaagtaagggttatagaatatttgggcagccatgagttagggatcttcttcaacgaatgtacatattagctaattcgacaagtgaggtcgagttgtcgagattcatattttttacaatgttttgaactttaaaatgtattttttgttaaaatactgcagtgacatctcttataatatttttaaaaagattctcaattttaaaagtgtgatgtccaaaattttttatgtttcaaaagaattaattagaaagatttttaatgaaatcataatttttatactacaaaaaataataatgtgtacattttatatgtaattttaaataattacaatatacttaatcataaaaaaaaattaaactaaaactaataggaagtgtactataaattttttgtctactttatactatataggaaagaaacctaaaacctaaaataaaaaacaaatataaacaaacaagtgttgtgttaattgattgatggagtatcttaatagtaatacacataaattagtaaccatgtgtaggatttaactttaagaatgttgataccaatgatttaacttagaggtaaaatttcacttcttggagtgaaaaaacttaaaattccaaagcaaagtattgattttaattgggaagattttgagtgcaacaatttagaagtgagaggccatgcggaccccactccatctaaacaccaagggaacaatttagaaaaagcaaagcaaaaggtcggtcccatggtcaccaaaaccccacactctttcgaccattgctttattaccataatacccttactattcaatcaattccccaaaagtcactacccttatcatcctcaatcattaattttaatactaaaatttaatttttcattataaataaatattaaagtttaatttttaatattaataacacctaaattataattttaaaactctcataagtatataattgtgtcaagtcaatgagcacatgtcaatccctaattgatttacattattgaatttttattttttttatttaaattcatttgaatgtacaaataaaaaaatgacacgtgaatattatcggtaacttatgtatttatctataacttgaaattaaatttatatatttatctgtaatttaaaataaaacgtatgtacttatttgtaatttaaaattaaatttaaaaatgagaagttctatttgcacggtagatacaccttatcattaaaagaataaatttaaataatttttaaaaattattttagtttagtattttattttattttattttaatttttttctcatattatttaatgttaattttaatacttattttgattttattttcatattactatagatttttttttaatttttttaaaaaaatttcatataattttttattttaatttttttgttataatatttaaaatatggattgataagtatattttttaaaaatattaattaaaaaaaatattaaaaaaatttaacacaattaaaaatataaattaacatctctttataaatttttggaaggtgtataaaattttcgtttaagtacatattacaaattactttaaattataggtcagctcggctcggctcggctcaaacaaaaaactatctctcactcgctaaaacagagcgcgtgtacaggccatggcactttttaaaatttcaaacaaaaatcccggctccgtgaaaaactcctctgtcttttttttcctcactttttatttattttattttattttaaaaatatatttatttatttatttttgaatttttattatttatttatttgtttgtttgttaaaagactgtctttactcgttctttttctctctctgttccactctttcgtttttatctgagaaaaaccagagctaagagaccttcgatcttcttcttcttcctcttcttctttttcttcattcatcaaaaacccttttaaaaaaatctcattttaaaccaacccatttccttcattttcccagaaaacaaacagagatacccatggaagcttcatcaccagtttccatgcaaaaaacaccaccgccggcggactcatcaccggcgacgaagaaaccatacaagaaaagcttcgtaacaacactaaaacaactccgttcaccgtcgtttaaagaagactcatacgtcgtttcaaacctcaaatcatcagaaaaaaaagctcttcaagagctgaaagacaagctaatgacttgttccgaagccagagaagcgtcaatgtggaacattcctcttttaggaggtgacgaaagagctgacgtcatactcctaaagtttctccgagcaagagatttcagagtagccgattcactcaccatgttggaaaagtgtttagcttggagaaaagagttcggaaccgacgtcgttttggatgaggatttggggtttaaagaacttgaaggtgttgtggcttatatgcaaggcttcgatagagaaggacaccctgtttgttacaatgcttatggagtttttagagataaagatatgtacgaaagaatatttggggatgaagaaaaactcaaaaaatttctcaaatggagagttcaagttcttgaaagaggtattaatcttctccatttcaaacctaatggagttaactctcttattcaagttactgatcttaaagatatgcctaaaagagagcttagagttgcctcaaatcagatcctttctctctttcaagataattatcctgaaatggttgctcgtaaggtaaatttaaattaaaaaaa

SEQ ID NO: 17174 - DNA, 3674 bp, Cannabis sativa
  modified_base (49)..(66): a, c, t, g, unknown or other
gtagggtcagtcatcaatccatgaagcaaccagagtggcgtactcgtgnnnnnnnnnnnnnnnnnngtgggtgtaagggcccaatgaaagcttgaagctaggacgttacatgtatacactaaagaagtcacttaaacacaattttatatataacatatctaaatataaatatatatggttatttatattttccccacttcatatcctttaattaatttcagttttctcctattttcggtagatatacatatcaaagtatcaagtagagctaattaaaataacgtttggtaatccttttatttattttattttttaagtcacaaaaataaaaataaaatttttgtttctttttttaaaaaattatccgtaactaattttatttttcaattttaaagtaaaaaataaaagtatgttttgtaactacttttatttttaaattttgaaaacaaaaataaagatctaaggtgcatggttcgaggtcaagtctgacgcctagtatataaagttcaggttcgaagtctgtgaccgtgtttagattgaaggtttaaatctgggtccgaatctaagtttagagttccaagctaggtcaaggtccaaagtcaaattcagagccaagtttggagtctaaattcgaagcaaccaagtcaaaatataaataatgaaacaatattaatgaaagaaaatttgaaaggattataactaagaaaaaaaatttgtttaaataaatgttaaaagtgagttttttcaaaattttcattttcatttttaatttagtgaaaacaattttgtataacaattttctttaaaatactttcatttttctaatttttttttttaaaaaaaaaacacctcaccctaattaaaagcaaagatgagactgaaatattggttacaatgaaagataggagagttattctatatgagacttatttgcatggtatttgatgttgatgatgagtatggttatgtataattttgtactcatcatcacaaataaatcaaacaaagaaataaaatatgtcatttatattaagtgatgtatgaacacaattagtgtgctaatgactattcttattataaagttttgtagtctcaattagaataaatgtcatggaaaccaaacatgcataaatctaaagccaaaacaatacaaccttgtcacattaaatgaagtgagtttcataaatgggcaaattgatcaaaattattatcccacaaagaacaatttgcataatcaagttttttaattccaccaagcaaaatgaacaagttgagcaaaggcagtgttgtaaattcttttccatatctcttttgaggcatcttttcgggacaaccttattatcggtgagaacaaatgttgttttcgataaccctagttgtcccttgatcgtgtcgatgaaggcaataaaatgtgaagaagttaatcgaatgaaccacattcttgacaattcttaagatggttgagacaaggaaggggtcatttaccagaaaacatctaacactgcagcaacctctacaacctgtgcaaaactcagtcaattcaaagaatttaaatcgagacattgtaagagtttgaagtaagaaaaaatcaccttgcaagttctccttcttttcttttttgatggaattaaaagccaaaaggaagagaactaacaaaaattcccaaaacaataacacagtccgaaaaaagaagcaacaaacaacaacataaccaactgacaaacaaaagagaatctactagtaagatcaccattctttttaaacaacagagcccattttgctagcttattagctactgtgttacagcttctcggaatccatgtagcctccaacaaaccaatcttgtcggcactgtcctggaaccatctcaaaggctcctgcaaacaagttctacttgaaaacctccagcaagtctatgtcaaattcatttgaggttgtaacttgtaatcattaagactcgccacagtctatgtcaaacaacacaacttaaccgtgtttaaacacccagacaaaactctttataacagaaatttgggttgaaaatcaaattaatgtacagagcccttatgattaaaaccacaagctaatgtcaaagtaaggtcaagagcatagaaaatcaagtgaaataaaagatttgaattagtaaacttatacctataaatttcacaagaaaacttatatctaaacaaaaactttaaaccccacatagctttattccatcaagtggatcagcatcaacaatccaaagccacaaccatgtatcaaaattcgacaatggacgaaatgaggtctccaaagcacatataaacttcaaatccagagataaaatgaatatgataggaacttgttacgccttaatattagtctcggcagtataactcaagtccttagtgcctgtgttcagtgattctaaatttgtgtcttctaatttggttgcctagttaggatagtctagcctataaatactgagagttagtcttctaagaggtagtgaatttttgtgtgaaatacttatagtaatatatcactcagggagttcaccaagtttctcgaataacttgggattttgtatttgttcttgctcttaccaataaactactgaattgtgcacaagtgtgtatcagaactcatatcagaaaatggctattaagccttctctattgatactcaaacatggaatatacaattcgaggattccttaagcctcccaatgaattctaaagaatccctgcaattacaaaataattccacaccccacaaatgaattccctctgcctataatatattctacatacccaagccacactttaacataacccctctaattaactctctaagtctataacagataatgaacaagagccaaaccaatataattagaatcccaagtgtacatagaaaatcctttgtacatatcaatttaaaggtcacaaacagattcacactcttctacaaaacatatatatataaatacacacacacacacacattattatccaagaatatcaataaatttaaatcagccaaaccttcaaacctttgcaagtatatgtccaattgcagatacaaacacctgcaaggctgcaaagaacacctagataacgatgaagaaatgaatgaattgcaagagccaaggatcaacaatcctctcaaggctgaaataattgcagtaaagtatcaatttttatcaaacataaagtaagagtttttaagtagagattatatatgtatgaaagattgaaaaaaaactgctctaacagagcataatctcgttcttcacatatcattagaaatagcataacaaatccactaaaccctagatttaatcatatgattacattcagagaaattactggtttgctaatctaatctttagtagagacgccatacttctcttgcatcctagcaatctcttcctccttcttcttctgatcgaactttttgctcatcttagcttgctggtaataaagcacgatgaggtaacgattagcgacattgaagccggagaggtggtcgactgcggtcttggcatcgtagatatcttcgtagacaacgaaagcagtgccgcgagtgtccttattggtaccgattcggatttggcgtatggctccgtacttgccgaaaatgtcgtacatctcttcgctggagatgttgaatggaagatttctcacgta

SEQ ID NO: 17175 - DNA, 3032 bp, Cannabis sativa
  modified_base (1861)..(1875): a, c, t, g, unknown or other
aaatattacaaaatgatgacacataatatataatgtcatatgttacatattagtttgttacatgtatttaatctacacattatattattgataaataatataagaatgggaacttcatgaatagtcacatattataatttcaaaccacaaataatttaatatcgtcttttaaaaatgaaaagaacgtaggttttcttcctaagtttctgctttcatgatgcatatgtttaactgtttgtattttttttttatcagtgtgtttttctaatacgttatttaatattatgcatatgccatatggtattgtttgtttattatctgacaataaattaataaatggaatgaattgttgttttgcattgcctttctctagtgtttttttttttttttttctcattttcctatattgaaatgttttatctataagaaattaattaataaccaaatctttcggagtttcgtattctacattgttttttttttttgtcatatttttttcttaatttattaatttttttttttaaaaaactgtactagtaatattcctcacaaaatacatgcaataattataatatgaaaaagaaaattaaaaatttactcatcaatcatcacatttcgaattaatttatattgatatatacttatattagtttgagacaatgagaaaggtataaaagaattcttaatttgtatacaattataataccaaataatacaaagcatttgttcttgagtggaaactgctatattatttgttataaaataatatagtatgagaaaattaaatattatgtttggaaaaattaatttgtagtgaataaattaatattttgaatggtgtaacaaattcggtaacatatttgtaattgtcaattcggattgtttcaaactaagttctcaaaaaagtgttttacgtatttttttcatcataaaaaataatgaagattcatgaaaactcgaagagaaaacaacaatcttgagaccccagaaatagggtccagcgcccagattgagaatccacctagtgtgctggtttcgatcactcaaatacaaaatctgattcgatcattgaatatggaatagtcaagaatagagtataggagacctcatcctcatgttctagaacattggaagtataaaaaagtcaacctaggagctcgaaaatgagtacccaacgcagaggttgacaaatggcttagtgagttggcgtcttcttattcgattttctatttcgagcgtccgtctattttttacaataactacgatccatgcgaagttagagaagaaaaattcacatttctattttcaacatgggaaactcactcagaaatgaagggttttgagtctctcatttcttcagaacagcaatctccaagaaatggtgaccagcttcgccagaacacagaaacaaactaattaaatgatttcaaaatatcacttaagcatcttaaagtacatctcctgaacgttttttcattactcagcatccaagttgatggcatatgtcaacttggactctgggatctcaacttgggcgctgggtcatgaacatcattcaggaaaatgaccagaactcactcagtattggttcgattaatgcaattcaacttgtatttctaagaaattttaaggatctatcaattcatatctcacacttcaatcgtcattctaaagttattgaccctaaattttacccccaatggagagttaccaaaataagctctcgctattacctagagtgggtcccgccatcgcgactgaactcctaaaattgatgatcaattgccgaagttaattttcatctttagtacattatctatggtcaaaaatagcctagtatttttttttcctatttttgtgnnnnnnnnnnnnnnntaaaaggagagctcccttatctcattttaacattcagataactacctataaggtcagagcttctctctctagtttctctctttagaaattagagttttgacatgtagccttttctataatatcatctcttgattaataaaaactcaaagtagatgtagctctaatattgtcagaatacaaggagtgaactactataaattagatgtgtctctcttataattacttaacaactatttcattctgaccaatctagcgagcgggtgtggcttagaagttttagtccacatttttgagtcaatgttagtgcttttattgagagccacaacttaagaaagttactagcaatggttgaaacacgctccacaagtgttgacagaggaatcccaacatctggccaaacaactgggggtgcgccagttgatggagttggaactggagttactcctccgccctaggtgccaggaccatgcattggaaccggctccacaactcgtcctttaaggccagtaaacgctcccaagactggcaccaataaccagctcgcacatggggagcctcgtgtggagatcaatgaccttgaggaggtcgatactcaggttgcctagctcacccaaattgtggctgatctataatagcagctgcaagactctcttgacagccaacacgaacaatttcaacacttattcatggaaaactgtaggaacatcgaaagctgacaacttgagcaagaacagtagagagcttacatgtctcaacggattagagaaggttatcgatctggtcgtggaactactcctcgaggggtctttttgagttggtgagagactcccggccgacagcctggtcacgtgggaaccaaggggaaacccttaatgcacagaacacaactaccacacctagtaactgtgcaagcactaagcagacaccaggcgtggagacctcctagatggaaagcacgttcgagcaagagctcgaaaggactcaagctcgtgggcaccaaccaatgagccctccactagatgttgaatgatctcgcaacaccaagagagccaacatcactcctaggggtgttcactaagtatccgatccaatccagtccgcacgatccaatccaatccaatccgcaaaatgcggatatccgcacttgcgcggattgg

SEQ ID NO: 17176 - DNA, 6795 bp, Cannabis sativa
gctttactagtaggtttgcgttgggctcaggatgtgggacttcgcgtggagagggttttttctaattcactttctttagtctaagcttgtgtatttaaatgaactgggggttatctttcgtgatattaaagtcctattgtctagttttcctcctctttctgtgtaactttttgttaccgttgttatcttaacctttatcggttgcccaaaaaaaatcaaattttggatttttgttaaaaacccaaaaacctgtcttctgatctcacactctctctctccaaaaccccgcagccaatgccatagctaattttagccattgttgttttttgaaactcttctctcatacagattctcaattctcaattctcaatctcaaatttatgtcttcctctaaaaccctaatttcttagtgtttttccttttaataatcaattttttactaagtacactaaggtataacaatggaggactcggagggggttctcagctttgacttcgagggaggtctcgacgccggagggctacccaaccctattggcgggaccggaccaattgttcagtcagattcggcttccgtcaccgccgtctccatcaacccggtcggacaaggtcatgtggtttcggcggatcactctggtcctggcgccaatcataataagcgtgggagctttcgacagacggtatgccggcattggcttcggagtctttgtatgaagggagaagcttgtgggttccttcatcagtacgacaaggcccggatgcccgtttgccgtttcttccggatgtacggtgagtgccgcgagcaggattgtgtttacaaacacactaacgaagatatcaaggagtgtaacatgtatgtatgccattgctgccattctttaaagctcttttagtaccctaaaagccatgatagactgtttggaaataggaaggaatgttgggtttttggagttttgatagtgttgttgtggttatgatgtcaattattggtatgccgttgtgtttattataaggttatttgagattatatctatttgggggttagaatttctgttgtatgtgtatgatttaagtatctaacatgatcacgaatattgaaattgatgcataaagaagtaagattgaaacttaccacttaattgtttgactaaaagtttaattttttgaatgattttgttggattttttggaatatcaaaatttgaaaggagttattggacttggacattgcaggtacaaattaggtttttgcccaaatggtccagattgccgttatagacatgcaaagcttcctggacctccaccccctgtggaagaaatccttcaaaagattcagcacttgagttcttatggctacaataacaagttctttcagcaccgaaatactggtttttcccaacaaacagaaaaatcacaaagtgcacaaggccccaatataatcaatcagggcttggttggaaaacctacaatagagtcttctaatgtccagcagcaaccgcagcagcaggttcaatcgtccatccaaccaactggtcagaaccagttacaaaatgttcccaatggcctgcctaatcagacaaacaaaaatgcgtcacctctgcctccaggaatatctaggtgtgttcagagtcccaaggtcttttataggttatgtaaataaatttattgtatttttacacagacattattacaaagggtccattataatcaataattttccagatgagttttatacacattgttgagctgtacttagctttctttgaacttacagtaactacatccatataattttttatgctgttgtacaccacttgtatttaacattttatgtatgtatctctgcttttgactcatgtttagcccattttctcattaaaatttttattttctgttggtattaaaaaatgtgaagtctgagtttggtttctccttattttttgatagcttttttatgcatagggatttattgatgattcacattgtctgctgctgcttgtctttttattcaagccccttttagaagagaaatgagaaaggtgttagcaaccctttttcatgggttttcctgctgcagtataacactagagaataacagttttactactactactccacctccatcatttgataaattcactcaattttcacttgaatgtttagaagacatctttccttttttcttgtgttcttgaaattcactgcatttagtcctttttctattatgctcgcttgcatataggggcctcacaattttatatctcttgaacttttcatcttagtgatttatgttcgattatatattaacggtgaaaggaaacatgtagacctctgtattttctaacactaatggttgaaggatgttcatgtatctcctgttgtgattttctttttttaaattagaaagttacctgtgcttgattttgatctgttgatacttgatgattagtaaatttcatatgaattctttatctcagggctcagaaagcctaacttgatgatgctctggttttactgaatgatattgtcttagttattgttgttttcggttagctggattgcaaaaaaataaaaataaaaaagagatttagtgattggagattcttaacttgattcctaaaattctacaaatattatagactgatcttatgcagagatgagactgtattgtagattaaaaggctggagtgtgcttaatttcaaatctttatttaatgcaattagcattcaggatagaacccattggcagctggccttgtgggaaactgtgttagaggaaattctgtgataagctggtttgctgattgaatattgaggagtttagtgttgaataaaattttgatttggctgttttgtcttaaaggattcatgtaaactgcttatatttgtatggatggccgagttaattttgctgtatggtctaaagagtttcatttctctgtagtttgttgtcaaaactgggtgtagtggattttatacctagaacttagaagatcaaattatttactggtaaagtattttgtatgctataatgagagaaaaattgatcactattactctcttttccttttggagctctaagatgacaattcaaaccagcattgcatagttgttaagtgcttgcgtagttgcatgtgcttccacctatgagaggactgagcaggcacttcattgagtttttattgaagttcagtgacttcatttagactcccatcatgtaatagtacacttttagtgaaacttggactagccctggataatcaatattcctcaataccagtcctatcctatgtagtcaaaaagcataatttttttttttgatgtgaagtgttgtctctgttttgtgtgtaggtgaacttgctaacttcttattttccattcatcttttaatctttttctagttagagtgggtttttattaatttttttgtgagtgtgtacattaagaaatgggtgtttgtcttgttaaaacacaatcaacttatttatttggaaacatgtaaatttaggtattttattgttaaaagttgcaaccgtgaaaatctggaattatccgtgcaacaaggagtatgggcaactcagagaagcaatgaagctaaacttaatgaagcttttgactctgctgaaaatgttatcttgattttctcagtcaacaggactcggcatttccaggtacttgcaatttaatattacataataaccaaattgtgctatagattattgtggttcttaatgtaagtttcatatggcttgctaggatcttttaatttcccaaactcttactatttttagcatagatgacatcaactggctatgtttttgttagggctgcgcaaagatgatgtctagaattggtgggtctgtcagtgggggaaattggaagtatgcacatggaactgcgcattacggacggaattttgctgtgaaatggttgaaggtattattcattcatattatgttgtcatcatgtaatttatgcgcattatagaaggttttttcctttttttttttggctattctaaatcacttgattagatatggtgttagaattcacgatcctttgaaactcttgagtaggttcttggagttattaattaattgttgtagttcttgttcccttttggctgtggttctcaaaagtaatgagctctaataacttaattagatggatgaattttattgtcagtattattatgtatttggtttcttcggctttttttattattatttatttagttgctcggcctaatcgcaattttttatctgcagttatgtgaactatccttccacaagactcgacatttaaggaatccatacaatgagaacttaccggttaaggtattatactaacaactaaatttttgttttgggaaattttttctctattcctaagtttgatgttaatgtcatgaattgttgcatgatatttaagatgtgagatgaaattagttgaaatgctttttagaaagttgagagtacagagtacattgcttggaagatgctgcttatgcttgcttgacttaatgcaaggggggagggacacggtccttgcaaactcgcaaaaatataagcatatgtgtcattacattggggtaggatctagtgggaacgtatagtatatataagagatatgttatgctgagattagtgaaatttaatttacagcatcatggagaggaattcctgtggaacttgtgactcttgacatttttctgccattctataatatctcagcttctcctcttcttctgcaactaatttcaatactcctgttactgctctctagctattattttatagttctgttactgttctattgggtttacttaactactaggttcgagtattataaagtttctgaagttaacgcaagtggataataaaattctagtatacttttctaccattgactctttcaccatattttataggcacatctgcaatggtaaagctgtattccttatcacatgaaagaaattaaactgtctgttttacaaatgttgcatgatgggtacaaagatgcctgaacaaacccggcaaaagcaatagtactttaaaaattcagatgacttggaaattatagttcatatgtaacccaaatatacatacatacatacatacgtatgcctatgctgcattttgtcattattccccaacacgcattgttgctggattaaatattctggttcactgttacacactcacaaatacattatctcattcttatgttttcataattgcagattagtagagattgccaagagttagagccctccattggtgagcagttagcttcgctgctttatcttgaaccagatagtgaacttatggtatgtttactttctgaacaatgggttataaatattatatataagaagtttggaatgaattttttttgccattaagtcaaacttgtaagttacattaacttgatcatacgatgtcaacataatgatgcaactttgctgatcattatgcttttggttgtatcatcatcgatagtaaaagggaatgaataataggtcaaaccctacttcaatagctagttgtgtctagtgttgtaatcttctgagaaccttgaagtagttaaaaccgaagacatagcattgatgacatgttggtttctaatagaaattcaattatgtacaaatttttattttcttgaggcaaggaataccaattttgattgctgtagatttgggctgtgctgtggttttacgacctgaatgagactcttttcagagtgaatatatatgtagtatttttatttgtgtttttgatgtgtattcattttacacgtgttgcttttgatgtatgaatttgagatacgaaatgttaattgtttctttgttgttacaggcaatttcagttgcggcagaatcaaaacgagaagaggaaaaagctaagggagttaatccagacaatggaggggagaatccggatattgttccatttgaggataatgaagaagaggaagaagaggaaagtgatgatgaagaagagagctttgtgcaggctcctggggcagttaatcaaggtagaggaagaggcagaggagtcatgtggcctcctcacatgccgctagctcgtggcgctagacctatgcctggcatgcaaggttttcccccagttatgatgggtgctgacggatcaccatatggacctgttacacctgatggatttcccatgccagatatgtttggaggccctcgtgcttttaatccatacggtccaaggttttctggtgattttatgggaccgggatccaacatgatgttccggggtcggccaacacaacctgggggtgtgtttcctggtggtggctttgggatgatgatgggtcctgggcgtggcccatttatgggaggtatgggagttcaaggtggaaatccaggccgagctgttcgtccaggtggcatgcccccacagcagatgtttccaccacccccgccacagtcttcacaaaacgctaaccgtggtccaagaagagatctgaggggaccagccaatgatcgaaatgacagatatattgttgcagggtctgaccaagtcagggggggtcaagagatgtctggtccagctagcggacaagatgatgaggctcactaccaacaagggggtggtaaggctcaccaagaagaacagtttgttgctggaaacagcttaagaaatgatgatagtgaaagtgaggatgaagccccaagacgatcgagacacggggagggaaagaagaagcgacgaggctccgaaggagacgctaacactggatcagatctctaaagtaactaaggaataat

SEQ ID NO: 17177 - DNA, 6452 bp, Cannabis sativa
aaattaaaaagtgaaaatagtttttataaaacatatttttaaaaaatatttttatttttttaattttaaaaactaaaaaatgattaaaaaaatattaccaaacgccacctaaatatttatgcctaaattattcaatataaaattggttattatattaaaaaaaataatttgcagcataaatacttaagtctaacaataatacttaagttatatttttggaattctgtaggtacctaaatattaagtaaattatcatgtggtaatccttgattggtccaagttatgaattttttaattttttttaaataaaataatttatatatactaatgaaaaatgacacgtggataatgagtaatgactaactacagagttctagaaatataacttagtattattactgctaaaaatgaaacttaggtatttatttacaactggaagttaaatttaggtatttatggaacaaattactctaaaaaaaatggtacttttgcaaagttttatctttttatgtaattatgaaaatatccctatagactctttagttgaacacaaaccctacaaaaaccccagactctactaccgccttctctctctctgcttcttcttcttcttcttctgacccaaaaagctctgatttttcttctcttccaatcaaagttccttactttattcttctatggtcaagggttttctatcaatttaatcaaaaaatggccaaaagttatgcaattggactcattacagccatggctactgcctccgcttcattatctccttcacaacctgctcatgccgattctcctttcaccttctctccttcctcctctgcttcttccggtgtttctcaagctgttgctgccgccgccgccgcttcttcttcctcctcttcagatcaatctaaggttggtggtgacaatgctgagcctcctcctcctcctaaggttcggaatgataatcctagaactacttcagctgggtttgatcctgaggctttggaacgtggtgctaaggctttgaaagatattactagctcttctcaggccaaaaaggtttgtctttttttcatttctctatttttttgttttttgtttttaacttaattatgtataataaaaattaattttcaggtgcaatgattgaaacaatttaggttgttagaacaagctgaagttttgttaatgttaatattaggaattagtgtagcattgacttacatatttttagtaatgctaaaagccacatgtgtgcttatgtaattggtagaattaagtatcgagtcccaagtaatttaatttaataactttgactgtatatcgctaattatttgttggctagtactaccggtgcctaatagcaatgtttattttcttattacaatataattgcttgcttactttatctgattttttgtacttaattttgtagaatgaagattgtttttggggtgcaatgattgaaacaccttaggttggtagaacaagttgaagttttactaaaataggaattagtgctagcaatgaatgggatacattttcttattacaagttcattgtttgcttactttatcaacatttattcattataatttgtcatttgcagagaatagcttttttgtgtaccaagagtgcctcacatatatgtgaggtgttgtattgttattggtaatatttagctattggggtcaatgtattttagtttaataataattatgatcgaacactgcaaactatttgtaagacaccacctcgtattaggtaccaaataacagtgctcttaatttaagtcattcgagtggctacttagtttaaataaattgagtaatagcaccagtgcctggcaccaccatgaggtggcactttgtgaatagttaacgatattctataataattattaaattaaatcatgtgagacccgttacttaattctattaatagcgatatgataccttaaacagtgctaggcactattagtgcctcttagtatttctcaaataatttagttggggtagttcttctatttgtctttttgaaattattttgaatctaataggctttccatttgattttcccacttttgaattctgaaaaatcactttaactgatggtcttttgtatgactttaaggtgtttgaggttataaagaagcaagaagagaccaggcaggctgagttagctgctaaggctgcagaattcaaggcaatgcaagctcagtcagaaactgtaagattttgttcttcttgaatttcgatagtctttctattcgttttgtggggaatgaaacttggaataataattgatgtatcattagtttttttttctttttctcactctacttcattgccattcaggagagacaaagagtcatatatgatgagcagaaaaagctagctcaacatcaagcacaaacgaagtctcaaatggctcgttatgaagatgagttagcgaggaagaggatgcaggtattcaagcagcatctgactttttttgtggttttgattttgattttattttattactttatggaaaagatttcatttttgtttttgccttttgcaggccgagaatgaactacaaagatcaaggaatcaagagcttgtgaagttgcaagaagaatcttcaatccgacaggagcaagctcgacgagcaacagaagaacaaatccaagcacaacgtaggcaaacagagagggagaaggctgagatagaacgggaaacaatcagagtgagatctattgccgaagcagaaggaagagctcatgaagcaaagttagctgaagacgtgaatagacgaatgctagtaaaccgtgcaaatgctgaaagagagaaatgggttgctgccatcaataccactttcgaacatatcggtggtatgtaatcaaatagctagctgtatgtagtaaatttcatatcaacttttcaaaatattgaatttcataaaagctttaataactagttgatctttgaggattaacttaccttcaattccattgtcattgtatcttcttcaactaatgtgtaaaacaactttttcaatcatggtcaggtttagaatgttagaatattgtcttactatgttgtttttgtataactaaggggttgacatgtagttttgaatagaatccgatatttgttgcaggtggtttgaaagctattctgacagatcaagataaactagtagttgctgttgggggtgtgactgctttagcagccgggatttacacgacaaggtaatgatgttgatagcataatcctagaatatatataggaaatcggtattcactttttaacattcgtaattgcagagaaggtgcgaaagtgatatggagttatgttgatagaatattaggacaaccatctttgataagggaatcatccagagggaaatatccttggtcgggattgttttcacgtacgatgagcacccttcgtggttcagataaagcgtcttctaataagggaaatggattcggcgatgttattttgcacccttctcttcagaaaaggatagaacagttggctggtgcgactgccaatacaaagtcccatcaggcaccctttcgaaacatgctcttctatggtcctccgggtactggaaagactatggctgccagggagctggctcagaaatctgtatgagatcctatctcaataatcttactgtcaaagtttgttatctctataatctctacaagttatgttctgattttgaatttcccttgtcttcagggattggactatgcattgatgacgggaggtgatgttgctcctctcggttcacaggctgttaccaagatacaccagctgtttgactgggccaagaaatctcggaagggtttgttacttttcatcgatgaagctgatgcatttttatgcgagtaagttattcttgttaccttaaatttcgctaatgttattatgaactgtaatctgattttgttgaacaaatttgcaggcggaacaaaacctatatgagtgaagcgcaaagaagtgctctcaacgccctccttttccgcactggtgatcagtcgaaagacattgtccttgccttggcaacaaatcgtcccggtgatcttgattcagctgtagccgatcgtatcgatgaagtactggaattcccattgcccggggaagaggaacgttttaagctactaaagttgtatcttgacaaatatatagcacaagctggctcgagaaaacccggtttgtttagtagcttattcaagagtcaaccgcaacaaatagagataaaggggttgacagatgacatattgagagaagcagcatcgaagaccgaaggcttttctgggagagaaatagcaaaactaatggcgagtgttcaagccgctgtttatggcagcgaaaattgtgtgcttgactcgagccttttccgagaggtggttgattacaaagttgctgaacatcaacagagaataaaattggcaggcaatgataaaaagtgattaaaatgtatgaaagagtttgaccaagtttcatcctctctcttagaaagtagctggaaataagctttagtactaagtgagttacacatttgagaaagccacatttttccttttggctttttgggcattatgttatctcttatcatattattattatttgcccccaaagacttgggggatttttggcaattcccatatcatgtttcattaaattcaatgttgaaagaaaaaattgcatacaaatttacttaaatttttccatactttttggtcttatttatatgattacattacaagatgcaatgtatagaaagagctgcacaaggaagcttaaatagatcaaatcatgtactaaatcatgttctctgaatattttaggctgatttaggaattttttttaattttactaatagaattctaatgtggataaaaattcaggaattacgatttagtatattcgaatgtttgaggagcatgatttaataaatagtgtatcaaagttcgaaatgcatgatttaatacatgttcatttgttgtgttagtaaaattgaataacattggatagaaatctttcaatccaacaatttcaatagttcaaagagaatttttaacgacctaaaaaagttcaaagaacaaagaacatgatttggaacatattaaatttaaggaactaaaattctaattagccttaatattatttcagattttttctttctttctttttgccttgaaaggttacaagttacaacaaaaatacaagaagaatgtacatcagtcttgtcttttaaagcctttaaatggcctttgaaaataatcacctaactttcacattcatatatctatgaactatacactacagacagaccatcattttacaacccaatgaatcattcaataatgctgtcatttgtacaaatgctacaaaggaggctcatcacttccatagagttcattctgacataatcaagaagattttagcttcgaaccgatttccagattttctagaaatccaacacccaaatgcctcatcgaatccaaaacacttgcagcttttatttcatttcccgccgacctgtaaaaatgcacagctgcactcaaaatgaacctgtctgcattcacattctcgcttatatgttcgaaaaatttgatgcctactgtcacatgtccatagtccatataccctctcatcatgctccgatagcatgccaaatcggggttcaaaccaactccaagcagttttcgatagatcctttctgcttccaccatgagaccctcttttgcaaaagcagaaagtaagaggttaaaatgtgaacaggaagcaacaataccgattttctgcatagaattgattgtttcttcagcgaccgagtactttaaggactccgtgtatgctcgaactaaggacaggtatgtgaaggagtcaggtgagcaatcatctctttccatggctttgaaaagctgctctgcttcttgatgaagtcctccggtcgcaaacacattcatcataatattgtagctgatctgcatttcaagaaatgacaaggggatttcaataagcaataacaacattttatttggataaatttatattatttgtcagttgtatgtgcataccagtccgggttttattcctttttctagcatttcaccgaagagtaaggacgcttcacgccttttacctgcaaaaaaatatcgaaagaagggtaaccaaagtaatctaacaagtttagcaaatttgctgtccagttttccaagagtgtccttaatctatgttcactagtcgaccattgtctatggttgtacatgaactagctcgacatactcttcaggtagataaagaacttgtattgttagctagatgagattctcatcactattatttctattttcaatggatttgtttattgctacaaaaaaaaaaagtaatctagcacgacgaaaatattcataaagataagatattttcgttatgatgttgggtagagtggtacca

SEQ ID NO: 17178 - DNA, 5616 bp, Cannabis sativa
ggggcagtagataaagtgatcaggtccattgtttgcggtatctaggagttaaattggtaaagtactctccctcttttaacaggactggtataaaaataaatgttaaacaggcttccttagttactggcagattcttgatcaaatatcattcagctaatataatgtctttaatttcttgcgtgataataaaagatgaatatgaaatgatggagcagaagacttcatatttaaaatgtctgaagtaaaatgaagcctgaacagaagtaaatcaatggctcatcctgaaacattattaattaggtggatccttagaagccatacctgctgcaccacagaagaaagcaacctcaaaaaccattcaacttgtacaattatcattccaactttttctgctgcattactgatgagtgtctcatctaaacctatgctctggtagcgtgcacgccatcttgaaaaacctcttagctctccaattcggaatccaataatttctgcagcaggctgaagatgagattttttatttttcagtttctactccaactccttcttacaaggaacatgacagcctattgttaaagcaagaaactcctaatcgtttaataattttaacaacttccacacacaagtagaaccatggatcaaactgcagaaaaatacaaacaatatccacattttgaattctacagtgttaccttctcctttctttatttcttttatttattctgtattctttattttatatgaatgtttgatacctttttaaataggcacaattaaaaggcataaaatttacatatgaatccctaacatctaccaagtaccatgtaacttttctaccatattcgtaccatgttctgagaactagttacaagaagtaaaagttagttcttctttcccttcttcacatgaccaaaatgaaaaaccataccaatcatgagaaaagttacaataaactacctggagatgatttaagacaatatgctgaagttcttttccagcaccacagacaacctttgacacccgcttcaccccctgaaaaatagtacttgctgaatcaaatgtgcaagtatgtatttctgttttcgcaaattgggattttaagtaagatatatataccacttcaccaagagaattaacgagaaattgatggattggtggactggtccgagcaccaccaagaaggcttaaaaactcctcttgagaagaggaatcaagtcctatagcaaagatggaaccaataaatcaaaagaatagttatgaattaggatagagaatatatatctaacagtacccaataagttaccatggctaacaattagatcggatatagaatcaaacttttcatgaaaagtgtgcatagcatcagaccactgtttggacataattgatagtgacgctcgaataacctcagtcaattcttcaatgttagaagcttgttgagccacttgatggagttcatttttcctagatcagaggaaatgcagagtgagaaaggaaacggtgtgataaatatagttcagatgcaggtagtaagagctgagtagatataacacttggagaactttatgccagaaagaaatatacaaagaaaaaaaatatcattctgttgtcgaatcttctttgtttttttcccataaaagactattaaatcaagactgcaaatgaacacagttagaaattggaggagagatttcttccatctaagaaaggtcatcatgtagcctaaggcatgctttgtcaattcaaatgggccgcaacgttaaagttgctattaccatgaaaaaaagtcctagaaagttataaaatctttatatcagaaaagaataacaccgaattcattatgctgctgaatcttcttattcaccttgtcattgggaaagaagaaagaaaataaacagaataaaaggaagaatgattatgaacgaggcagaacttaaagctaccccagcccattcaaggtaaagagtccaaagaaatgcttcatgtgctaaatttccaaagtaacaagtagtgactatagtaacagaacaacgaaaaagacttgtttacaaaggaatctaacagccaaattggcattctaatgctaaaatggtagttttacttgtagataggagcttctctattatatagaatcacaagctgatgcaaaaataaaaataagtaccccctcccaccatttctctttaaagaaaatcttataggcttcattacaaaatctttggtaggcgtatttagaacgggcgaacataacatatttactacaagtttgcaacttccatatatctttagataaagtggtgattgcatgatctgtacatgtctatatcaacttacttagtgagcatgaagaaaggaaatcatagactaaatataactacagggtaaaaaataaaatacagtatttggacctcacaatttctatatcaaagttacctcttccaaaatattgaagtatcaagtgttaagcaatgcaatccatgtataccatgctcagcaattttgtagtttactgatccatccctgttattaactaattctcccgagcacatgaccaccagacgacaaagatcttttgacaaggcaacctaatgcaatggtatattagcttggtcaataagactagttgactcttatctttatgatatatattccatcagatcatatgcatttttagtactttaacttctataaaagatttgcacccgaaccttcattgatacatgcatatatctaaagaaagtgaactaaaggttgccttaagtatgaacatcattaaaaattacctatgaaaaaattccaacaagaacaaacattttgcagtaaatacatctttccaaagatcacatccacttgaacaatggacttaccttgtaaatcgaagcattttgaagtctgcattcggcgcgtgtatcagatgagggaacagaacactcatgtatgttctggcatattcacaggtttaaatgattcagttgacatcacatgcaattaaatgacacattaagcataaaccccattataaaaaaaaaaaataaataaaaactgcagctacattaatccaaaaaaaaaaaaacatgaattctgtttcaatcattggattgtgaatactttatgttttctcttcaaataggtttgtgtgactcaaacttagtcaattttttattgttgttcatcaaagtcaccaccaatataatgtatctacttcaaggagaagatgactactcacaatcttccctattggaaagcttccaaatatactaaagcagatgattccatctttgtctccactgcaaagaatattaaagcgttgttgcgaagaacttgacaggtcttgaaatgaatcttcactatcatccatgaagccagcatctccagagaccaatccttgtatccgaggaactcttggagctggtgggaagaagcgagaagtacgatcttcatatgtcgacatgctaccaatatcatcctaaaatccaagtaagaaaaaaagtaggattgcaatgagagtatttgttaggaaaataaatataattattccagcaaagagtttttttttaaaaaaatatttctcaaaatagtgataaatatttgagttttagcagacacaatgagatagtgttaatcatgaaaattatagaagcatactctaatctgctgtccatcctcctcccagtttagacaaacaacagcaacattatgggattttaagcttctaagtagttttccattctgtttgacattgacaaaagaaacataccaataagaacatcacaaatacagagcaataaagggaaatacgtagctgaaattcatgcatgtattatttgcatgaaaaataatttttagattttaacagaactatgacattgataaaatatgctaggacagggatctgaagcttggtcttgattagtcaaaatataccataagcatccaagaaacaacatcatcaagtgactaaaagcttctaccacataactataaacaatacatggctcagccttccaatatctaatgtaaagcctactgacagaacagagccacagataattttcctataccaaatgcatcactttcaaatacaaattttggcaaatgcaatttataaagcagtcattttaaaaattggtacgttgataagtaaccaagcaatacacatatatttattctactcacttcgacatcatgcaatgaaacagttccatcttcaagcccaacggcgatcgctttaccatcaggtcgccagcataaagatgttatacaccttcctatacaaattttagagggaaaaactttaggccaagaacaaaagcaaatgctcaaccatacacacaatatgaagctaagagacttctaataatgattaaatagatgagcaaccactttctacaaaacctgctccaatgagaataagaaataaaattgagttaaaaaaaatggtgacccccaagccaagaaggaaaagatagagacgaatattcaccaggtgagatggtccacaatctctgccaattgaaacgatgcagcaaaagcttggagtcctctgtgaccatcgccagtaagtctttctctggattccattccgctaatacagtctaccattccataattcaatgaagagtatagatacaatatcacgcacaatatcacacagaaatatatacttgactgtaaacctaagaaaaacccaaacctgagaggcgagcggcttatcaaactgcaactgaaagggaagccctcgctgagactcgtccgtttccatttttaagcttgatcgatatatgacactatagtgaaataacacaacaaaaaaattgacattcacatattaaaaactaaaagtttctaaccacaactaaaccctaaccatgaaatgaaacaaaaaccgcgaaagtatgactgtaaacgatgcaatttctgaatgacagaaagcccgagaatttgaatgggaaagtagaatttgtcagaataaaggcggaatttataagtagttcggtggaatggagcgcaaaattaaacaatgttttctctttgattttagtacaaaatgtctaaagacttcatttacctgtttggttgtgcaggtttgttgagaatagggaccgaggacgagtggccggtggaggagctctcggagcctgaggtaatgtgttcagaagaagaaaaacactgtagtgtagagagggaggagagtgaggttaatcttcagctgtgtctgtgtgtgtggactgtggactgtggagttggtgtgaagaacaaggcagtgcttgctgataggaaaaatatgactaaatcacttcctacaaatcaccggatatcttcaccctagctggcaatacagatttactctacaattttcttgaaaaaacgagacgccattgattattgattacagagaagagaggaaaggatgaagatgaaccagaaaagaatggcaaagttgaaatttttagaatgcaaacggcgtggagctcaaactcaaactcagtaactcgttcgtcatgttttgcgggaaaacacttaaaaataataataataataattgaaaaaaatgtacataaaaaatatatacgccgttgccggggatcgaacccgggtcacccgcgtgacaggcgg

SEQ ID NO: 17179 - DNA, 6650 bp, Cannabis sativa
taaaaagaattaattaatactgttgagtgtacaattaaagttctatattggttagaaatgaaaaaaatagtaattagtatataggaatagacactatctctattggtattagatattttagaaagatccctcaaaacaaatgtggagatactccaacaaaggtgatggagttggcctaataatgagcaaaaaaatgtagttctaaacaaattcgtgactcgaaactgcatagtcttttctacaagtgcttaagtttatgtgagtcctttgagtcttgtagttttcttttatttaaaagagaaaattttgttggtgaatagtacttgaggctagaaaaggtcaccctcttcttttgaaatgttattgttattggggagggattagtccctttgaatcccaattctttcactactgtaaagatttatggtgcttagtaatctaatatataattaatcattgagtaatcttgatttgcttttaatctaaagtaaaacatatttatatatctataatatcaatgtcaaagaatatataccacaccccattacttctcatctcaaaaaggaatatattaccgcatatataccaagtgatagtgtatacatatatatgcgccataggtggatcaaatccaagcatatgataaagtggtctagctaatagagaactaaccttttatattatatgatataattatattgcggcttcaacaaaattaaccgaacatgataatgatgggtcaggtggtcctctatatggcatgcggtggtgaaggtgattgcttgtcatttcgtggcttgtcttttaatatatatatatacatatctctcgttccatgcatttaactttactctatcacttcccattaattaccatcttcattgacctattttcaacaaaacacacttccaactatctatctatatatacattttcaaacatcccaattacgatgagacccaagcaaaattattcagtcacaaattcaacaaacattatattcaaatgataattttatatataaatatatatatatatatatattaatgcttatatgtgttttcacacaaatgccaaccaaagggtaaatgaatattactaacaatgtcagaactatacaaaggtttaaatttatatatataaatatatttaagtgtcttatacatatacatttctatatggattgtaggctaatttgttgttccaagaagtaaaatgttgaatttaattagtcttaacaaattttatgaatagttaaaaataattaaaaataaattgtgactaaaaattactttgttgtttaatcaagatcacttgttaaaaattggtgtcttttactgtgttaaactaatcgaagtttgacacattaattaatttaatttatattaaatatgttaactatttttgttgacaattagaggattaattttttatttatttataaaaaataagttaacgtttaacacagtataggacacattttttaagaagagatcttaattcttttttgttgtaccttcattttgtgagaaaatgtatgaaagtactactagccaaactaaaaattaccattagtccattagacatgttgttaaatactaattaaaaacttttgtggctaaaagaattaattataaaagtttaacttgctgtaactaaaagtactaaaagtgattttcatgtcagaagaaactttattatttatttatttatttttgtttagaaacacaagaaattttttattattactacataaaatgtgtgactgaaagtgaaactttattgcacaaagtatattggggccattagtcacccctataatacactgtaaagggcgaaacatggggttttaaggatgaaatcgtaatgattttttttttttttttggtagcgaaacaattttattgtttatgcatgatcacaccgtcacaaatgtttatgttataatatttaaaacactaaagtccatttggttggtaatgaaatataatgaaaaagaaattaaacaattttcattttattattttagttatatttttttaaaatgtaaaaaaagactattctaataaaagatgagaaaaaattaataattttttaatcgattatttattttttttttttttgcaatttatattttaaagtaattcgtaacataaattttaaaataatttgtatttaggagttaaatttaaaaatttatacagtaaattattctacattttattctattttatttttatacttattcttattgtcattgtcatttttatttttatattttcgttatttttatattgtcattgttattatttataaataataactatttttgtaatgaaaccttatcagagcctcaagaaaccaaatgctatgtataattgtaaaaattgagccatgttaaagaaagaatgaaacaaattaaaatgataaagagatattgattcatcttagaactaatattaaatatatagatacatgataacgacaatactggatggaatatgacctataaaaagctaattttaaagtacagaagaaaaaaaacactagctaggaaaagtacaaaaaaataaattaagtgttgatcaaattttttataattttgtttgaggcgttttatacagtatttttttttcttctttacaatattacaggaattcaagttatcagagttattactaatcaatccctcaaaaaaaaaaaaagagttattactaatcaagttaaataaactcaaaatttgtaattgtggtaataacatcacactaaatcactaattcccttagaagaagtaacatcacaatagtaaattgtaatttgagggattttgtttattggtggagaaaacagtacaaactggacctagtctacagaaagcagtacgtctgtttcagacatacgtaaccatttatacattgataaatatagtaagcagcctagcaagacaaatgcaatactgtcttatccctttaaaagaaaataaaattatgaattatgtgaaaaaaaaaaagaaaaagaaagtagacaattaatggaatacgaatgaacagtccctctcagtactgtatctatagctagttctaaaattagaaaaaaaaaaacacgtatgaaatactccactaaaatgtatagtttaacaaactgatcagatttcattattgaaactataccatcaaacttgtcaaaataggcgtctccgttgtcctgttaaatattatatatagcctcatttttttttgtaaattattataaaatcattacaaaattaactaattggtaaaattattctgaaaccaatttgttaaaccaagatttcttttctgaaaggaaattaatggaagatgggcataaagaaacaaaaaattgggcacgacaaaagaatacacgttatacttagaatttagaaaatttttgtctaccatatgaaagaaaaaaaggaaatatttgtcccccaacatactaatttattacacgttttctgctaattagtattgatgaaaattgttgttcattattttttgtaggttatattgatagacagtgtgattgtttatgtaattataagttaatgtacgattgtctattcttatcaagttgagtcttgcattcagttggttagttagagagtcaattacgaagttaggtggtatttgttttgatgtaatgtaatatataatgggaatggtaattgtaatatgaatggtaatgtaatggaatgggaattgtaataggaatggtattatgatgtttggtttaactatctaatgaacattgtaatcaaataaataagttgtatatagacaaaaatacccttagctttattatttttaatatttaaaatctaaaaaaaaagtaataaaaaagggcaaaaaagatatttttttaacaacaatgaatgttgtaattaatcatcattaattacatacatattggttttatgatgtaatggggatgacaatacatagtgtaatgaccattacaatgtaaagccattacaaaggtttaaaaatgaaatcaaacaatgtaatggtaataatgattccattacaattctcattacactaaaccaaacatgccattagttattttgttgtttggtttctttgtttgttagttgtgttctggtattggctacatgtataagtagctgatatcgttatgatgtaactgaacaattcattcaatacaattctggtattttgatccttcttgttttctctctctcttttccatttctgttcttgctcttctgagctaatatggtatcagagccagcctcgtgagctctgcttcttcttctttcttcttctttttgttttggttcttgttcatggctcgaggtggtggagctcaagcacgtggtggagctcaagcacatttcatgattcgaatatgttctctgtttttggagaaaattcacgatcgacaaatgcgaacgatctctcgaatccttatttcctttcgaatggtgataatcaggtgttgtgcttgttccaaaaattctcaaaggcagtgagaattacagcacctgtagaagatcgatgtcgattgccttggttgctagaaataaagtgaagttcgttaatggaaagttgccacaacctgacgatgatcacgaagactatgacagctggtgtagatgcaatagcactgtcatctattggatcttacatgcgatttcagatgaaattgtcgatagtattatgtatcacgataatgcagcagaggtctggacagagctgcatcaacgcttcaatgagaagaatgctcctcggatctttgaggcaaagaagacgatgcagagccttactcaaggatctaacagtgttaccacatactatacttgattgaaagctttgtgggatcaaattagagagtatagaccgcaacatgtttgtacatgtgttacaatgaaagtgatccaagggtatcaagaagaggatcgattacttgaatttttagttggattaaatgattcctacaactttgttaggtctcagattttgatgcgtgatcctcttccgagtgtgaacaaagcatatgctgctgttgttcaagaagagagaaaacgaggtttgactggtggaggtacctgttctgatgttgataaagctggatcgagtaacaatggacaatttgctggagctgtccaacctttcaaatccaagtacaattgtactcattgtggtatgaatggtcattctatcgagaggtgctacaaactcaatggatatcctcctggtcataaatattatggaagatttcccaatagtgatgctaaaggaaccataggaaaatctgctagtggaaatttttcaagaactaatgaaaaaccagaggaatcaccaatggagagagacctcatatctagtctatccagtgtccaatgccagaaacttatggccattcttgcttagaaagctactgagaacagcactcttaatgctgctgaagatcaacttgtggtttctcacttctctggtaaggaattttttgttcataatgcaaattggattattgacacaggagccacacatcatgtgtgtcctaatctttctttatacaaaaatacctatgttaattccaatttaaaaactgttgtattgcctaatggattgcatactgagatttcttgcatcggaacaatggccttaagtcctgatcttattcttgagaatgtcctatatgtgcttactttcaagtgtaatttgttgtctgtcaattctttaatagccacaactaactgcactttcctattttctcatgaaaattgtgtcatccaagacactttgaagaccaaagtgattgggataagtagaaagtttggcaacttgtactacttgatttgtaatcaaagcagtaataaagtgtttgcttctgtttctgcatctatttgtgattctaaaatttttaatgagactgtttggcactatagattgggtcatccatcatgtgtaaaaactcatcctttgaataaagctttgaaatttcatgttgattctaattctctattccactgctccatttgtcactatgcaaaacaaagaaaactgcctttcatttcaaaccataacattgcaaaaaaatgttttgatgtgatccatgttgatatttggggtccttataacaccatgacagttgaaggatataggtatttcatcactattgttgatgactgttccaaatacacgtggatcaaactcatcaagcaaaagtctgatgctaaagatgctatacctcagttcattaatcttgtccaaaaccagtttcataaaactattaagggaatggggtttgataatgcaaaagaggtccacttcaaagacttgttcaacgaacttgggattatgcattatcattcatgtgtgcagaaacctcaacagaactctgttgtagagagaaagcaccaatatttactcaatgttgctagggctttactaattcagtcttacatacctttaatgtattgggaagattgtgttgctactgcaacatatctaatcaatagaacacctactcccaatctccaaaacaaatccccctttgctattcttgttggaaaattgttgtgctccaatagaaatatcaaaccaacatgattacaactcaatgacaaataatacaaaggataaaaatatagattaaataat

SEQ ID NO: 17180 - DNA, 5900 bp, Cannabis sativa
cactacccagcggtaaaacttcataaactatcttgactttgtattaatgtggagcatgccattttttttttcttttcctggttgtcatattattatattggctgcaccttctagcaggtgaaaggtagtgatacatctactgctgagtcgggttctgaagctgaagatattggctctcccaaaacaataaagagctattcacatcttcggttgactcctgttcgtgaggaagtatgttgtcatcttttatgataaatcattagtaccatatatatatatattatatttatatgcactaatgtcagtcatcttataattaagacccttttttggaatcggtaatcattggatttaaaacttcttgtagttttgacacttgtatatatcataacatgcccgaaaggggagtacaaacaactgggaaactacatagcaattgctgtagttttctactcctaaaatggtagacttaggtgggttgccaatttgagaaaagaaaacatagttttctttcaggtatagtcataacaagtatacttaaaataaatgtgatgcaacataatatatgtacttaaaatggtctactcagaaaaattgtgcacttctatattttattcagtttttttattttggtgaatgttggttatttataatgttctttttgcgaatatgtagtctaagactgtcggaaaagcaagctatgctgttaactttgctgggtacgatgaatatgtacccatggttgacaaagccgttgatgctgggtggaagaagcagtcccttcaacgatcacaatcttgtaaaggttgtcaccatctgttagaatttgtttttcctagttcatttttattatttgctgctgctttatgtgtatgtttatgtgtctgttttgcttgaaccaattgcttgtgcttcgtaagatattttgactgtaatctctccctgatgacctttgagtttcttgtcatgctaatttcataggttatcttatcaactaaatctaggaccatatacattaacaagaaaaaccatgagacttagaacaatgtcatataggttatcaactagggatcataaaaatattgaagctcctcatgagtgtttctgtgactttttgaggaaccaataattcagttgtgtaattagtggtagttgtaggagaggggagatattactaacataaagttggagagtttagtagttttcaacaattaagagagctgtctaaactgggtggacctggatgtatgggacatacaatttcgaagtgcttttcctctgttttttgaatgcttgtttgacatttgagctaaattgaatttataaatcttaatttaatttttaaatttctgatatctgtgtttaatttgtgggtcatgtttttactttttaactttgtgttctttcatatccctggtgactaaatcaagtgaaatttttgtttccaattcaggaaacctttcccaatctgatacaacaaaaacttcagaaggaattcgttctcacactataatcatgcttactgcattctttatgactcttatcacccttttacgttcaatgacataccgggtaactggaaagattcccaagacattgcctaattgtgaccaaaatacttctgaccttactcttaatgcaacatccaaggaagactgtcaacccactcctgcaacaccatcatttaccgaggcagatattctctccacagtactgaaaaggctaggagagcttgaggagaaggttgacacacttcaatcaaagccatctgaaatgccctccgagaaagcggaattgcttaatgccgctgtttgccgtgtggatgccttagaagctgagctaattgctaccaaaaaggtaatattctccacaatctattatttcagaagtagcattcattgggatgtgttataattaggaaagagatcaggaatataatattactgatttagatttatgtgaaatatattgtataggaaaaccgattatttactttcctttttcctatgtaatttatccctgatttttaggctttgttttcacctagaatatcttgtagttattagcagatttgtactaattttttgtatttttgtgtaccttgtctatttataggttgttgtcataacttggctaacttttactctcaactctaattgaatatgtttgcttatgctgtcaattattctttctccaactcccttctgttctaaccagtctttgtgtactatgttacataaaatattatactcttaaaatatgttgtctcaatagagtagagtataatattgcctcagatttctcttctctttaggaagaatcatgctaatgttggtgttgtgtttctctgtggtacaggctctttatgaagctttaatgaggcaagaagaactactcgcgtatatagacagacaagaagaagctagactcagggtatgttgatcagacatctaaataaaaatacataatattatataacccctttatatgttttaatggatgggaattaaatgtactttattttgcttcttgtgctatcagaaaaagaaatcgtgctggtgaagatggaaagagactacaagaaggatctcctaaatgtcaattttagtgtgttggatgaaccaaactttgatcttacaaatgaaacatcaatcttaaatgatgtgatctttttaatccaaaaatccaatatgagaaggaatcctaaccttgtatgtgcatggggttccctttttttcttgaaacaatttgtgtgcagtttgctttgtattttcttcttgccttttaatttttgtgaaagaatggactttgataagaaaacaaacactatactaatgagctctattaaagacacactattaagttaaaacttaaaagtatgatattaacttggccttattttggtttagatattttataatttaacttcattttaggaaatgtggtagtcatgcaatgaatgaaagcttcaaatctagctagctttgatgctcacataactcaaaatatacatataaaatagtagctcactgtttacaagatcaataatgtacagaatacttaacatgaaattaaccaaggcaaatacatacatacatacacaaatcactttgaaatacaattagtggggccgaaaaatcaacatcgccaccggcttcaatcaacggttcatgacacctcttctattaaaaacagtgttcacaacatatcactcaccagcaaaatgggttctgcaatcaaaaaccaaagaactaaaaggtgaaaaatgacatgttagtaaaacaagtaatattacaagttggaaatgtgatgattagaatatatattagttacttacaaacttattcttcttcttcttctttttcttatcaacataagacacaagctcttcttgtttaacaagagcatcttcaagtgcctacacaaaccaaaaaacaccaattgtaatttccaacataaagaaaataaaagtgaggtgcttttgttgttgttgttgttgtttttaccttcttggctgctgatagctcttgttcaagagcgctgactcggttcaaagctgcattcaacatttcctctttctcagcaggcatgactactggtttcatgtttagaacagaaactttctcttctaactcagccatgcgcttcatcatgttcatgtactcggtgtttgagatggctgcaggcgcaggcaactggctgcccttgatcatggcgatctcatcgtagtacacagggctgccgtacactgctgcttcagtaattttctttggcatgtctcttgtgagacggacgacagttacaatccccatcacaaacgccatgattcccgaaaacagctggttgctcgtgccatttgctgccttgcaggcttcattaaccgcaaaagcttcaagagagaaaagaagaattctgttgtgttaaaacattgtagaaataaataaggaagtaattactattgtgacagttctttgtacctttattgcttccaaatttgttgttttttactgctttaggccaagatgcatccacaactttgtcaaccataggagtaaagtcgttgaatttgtagactttggttacaagatcaccctgcaattcaatcatttattcgattttgatgagaatgatcagcatatcaaacaaaacatgtctaatgaaattgaaaaagattagtgatgttacttacttcatgaacaggacttaatgttggatgctccaaaaaccttcttgaagagtgacacttcaaatctgaagtgtcttgacttgtttccgaattgaaagaatggcatctcttcaaattgtcccagcaataaagttagttgtattaaattatttgaaaaaaaacaagaaaatgtaaccagttttgtcataacatcagtttagggtcctttttgtacaattttagaaaatatatggtccattttgtcatttgtcaaaacagagggtccaattaataacttttacaaaacacaaggtccaaaatagtatttacccttaactcatgttaagaagttttttagtacctttgagcttgatttctcatcctcagagattctcttctcctcaatgcccgaaagaactcgtccggtgcattttccttccccattttgaaccatctaactcatcaaaataacaaactaaatcatcttccattcaacactaacacaaacttaacaagaagagaattagtactacaaatcaccttgaatatttcgggatcattccacgggcccttgtccgaacgcatgcagcctcccttgtcagcacaagtacaagaaccacctagaaactctggcaattcactggtgtagaattgtaaaccagcaatgtgagaaaacagaaaattttgaaaaactccaaaaaatattgaaactagtctaagctaaaaacttactttgcatcaattatctcaagcaacttgctttggtacttgttaccaagaacctggtttgcatagaatacaaaattgtttaatcttcaataatgtaatatgtaaaaccaaaatgagaaagaggattcttacatggatttttgcagtggttttcgggtcaaggaatgacttaacagtgctccacaatagcctaaatcctgaaccagcattgatgatgaacatacggttcaatgtctgttcataacaagagatttttcattatcaaacagcatagaaaacatgataagaaaacaaaaatgtagattatcaccgtcgatcaagtacctcaggataattgtcaccgtcgatcttttgaaggcgctggattagatccctcgccgctttgttgaagtttttgagcccctacacaagaatgtagcattttttttagagtaagatgggatcatggatcaaagtattaaaatgttatcatttgacaagtttgaattttaagtaggcatcatagtttgttcattttagtattaagatttttgaacaatcctaaaaataacctttatgaaattttctatcagcgaaataactttataaaaatttgtattgacaaaataattttctatggtcgtaaaaacaattatgaattacacttgtgcggccattaatgactattatgatcgcaaaatgactatagatttacactgtgcgactatcatgttgcataaagtaaactaagtgagattattttgtaaattttagtatttcaaatagtttgttaggcaaatttctcttgtgaaaaatgggactttcaataaacgttattaaacttctggtaaataatcatcaattttacttccgaaacttttactacttccaagctgtgctccttttcaataacgatcatagttcgggggtaaaattactcataatttaacggatgtcctatatttcattaacgatcatagttcgaaaggaatatttagacgatttttttttggccaaagttacccta

SEQ ID NO: 17181 - DNA, 1903 bp, Cannabis sativa
aacagaaagcgaatactgtaattccatctcatatcatagctgaagcaatatcaacattacatgatgatggccttggtcttaggtggtcaggtccaattacaccaacagaaatggaatatgttgagcaatatgtcttagcaaagtatccacaatatgcagggcttgttgaaggcgaaaaatttgacctgtctagtatttgcatcaacgatgagtctgctaccgatcatgttgcagatgacaagaggaaatctccaaggggagcatctagagagcccaccacaccctcctctggtggcaaccttcccgagctagataggacacagttagcaccatcaagattgctcgatatcctcacaactaaatcctcctttcctggtagtttcatctcaatccccgagatacaagctcgaaacaaggttttgaaacactgcggtttgcctgatgaagagtacctagttctcttcacaccaaactatgttgattccatgaagttagtaggtgagagctatccgttcttcaagaataatacctacatgaccattttgggagaggaagaagaagattgcataaaagaatatgcaagtttcaaagaatcaagagtgatttcggcaccagtgacttggttggatttgaggataaaagggtcacagcttagccagtacttcaggaagaaaagcaagtacaagcaaaaggggttgttctcttatcctgctgttgtaaatgggactcattattcattgcattgggtctcagaagctcacagaaattcatggcatgttcttcttgatgctactgaacttgtaattggcaaagaccacttgaatctagtcctccacaggcctgactttgtgttatgcagtcttgacaatacacctgcaattccttcaagaataacttgcctcatggtcaggaagaagtcttttgataccaatccagcttcatctcaagtcattgagtaaacagtacctgtaaatgtagactttgttttctttagtccaattagcaaccaagtgtgaaattgggctaaaggcatgctaatagtactgttgagtaagcttaaaaaaaaaagacattttgtttctaattaccattttaaaaaagatagcatggaaagatctcaggtttgcagtcccaaaattcagtctttttactctatatggctgcaaagtttcatttcactaaaaaacacaaaaatccatagctcccaaaatggcaagcatttccattttggactatccttaccaatctaaaaaatcataattgctggctgtatcctttttatttatttcattcaaagaaaaaaaaaaggttgatttgagtttgcttttatatgtaataagagaattattcccaaatgttatagggtctattaaggtgagcaaagtattcactcaaccacagaaactacctaacttaattaccattttataattttttttttttttttttgtaatatttactactttgtaatatgaggatatactttctatttctaatattattatttttgtgtattttatatatttataagaattatttttctatgtattttttaacacactaatccaataggtgccatttgtggctaatctcaaatggtattatccaacaacattagacttttcaaaatatactccttccttaagctaaaataggaagtaaatcttgaaaaaggagcttcaactactattataaaaatgaaaaatctctctaaaataggaaatagataagaggctctacattatagattagaaaaggaaacgttaccttttcaattactctacatttaacaaattcaaaattatatatatatatataaaaaaaagaaataattacataaaacactattttttataaaataattacatttttacgttcaaaagaatatttttttttttacatt

SEQ ID NO: 17182 - DNA, 6997 bp, Cannabis sativa
  modified_base (6139)..(6141): a, c, t, g, unknown or other
aaaaaaaaaaaaaaacatacttagcaagacatgagtaagaaggttaacatctttacacttatccacttctttatttagtgcgcttataaaatattagaatgacttcttttttactattttgatacaatagctatttcattaataaattttcattacatccagttaaaggcacctttaagatttccttaaactagatttttttttaagattagattattaataatccttcctttgcgcttacacaagtcgtttatgcacattgcaattatatcccccaaattagtgatgatacattctctatttaaatacagaacgttcaagttcatttccttttcaaatgccaaaccccattacagataatgagccaaagcttcttgattacaacactgatctaatatgcctcattatttacatacatgaatgaagtaaacactgaaactccataataaattttattttttaacactttatggttaatggttatgtgcaagcaaatagagacaggcctgttgtaacaccattttgcaaatgtaaatcaaatttatctttttttttctctatattttttgttctttgtaaaagcttttgatcatctctgttgaaggtgtacacgagtttctaatcatccatatccgaacaagataccctttgagtagggctaacactcccacctcggctaatttgtaatgccatcaaagccttttgaatttccattgtcatggcactgtcaacactgcctgatgatagcttcttgtgagatttctgcaagtgaagcttaagtgagctgctgctcagaccagcattcttcccacagatggggcaaactttcatcatcggttttctctgttgccattccatggaaacattcccatgcagtttcctatccagattgagtaagttctttgcaaatccatcattaggctgggctcggcgatgaacacgtttaagtgtgttccatgcttctagcaaagtgaaatttctgcaagatggaagggtgagaataattagtggttaaatgttagatagatatcacagaatatggaattcaattcacatataattctaactagtaaaatgtatttttcactacttacttcctgagcattaggtatgcaagcaccactgtggcacttctacttcttccctcaaaacaatgaactaaaaccttgccacctttttgctcaacatgatcaataaagtcagaagcatcatcaaagatactactgatgttttcatcttcgctgtcgtttatctgttcaaaggaagaacaatgaaatcttacatagtatccacaaagtaagaatttaagaaaatattaacttatataaaatacaaacagtaactaagtttaacaattctactcttacacctccttaaatgatatctgatccaaaaagagcttaaataaacttgggaaacccaattcatgaaaataaatgtatgctgtatgtatgactatttctttcatttttgagatattgatataaattaaactgcttttatgatgttaaaaattgttgatcataaactgcaaattgaaatgtatctcaacagaaatgtctcacatctaagaaatgacattcaaagagaaagaggaaacacaccaccaaatatggtccaacataagagtactgaccgaaaaattcttgtactcgaatagatcaggaaattgagaatctgactgtccgatttcattggagcaaaggcacaatatatgagtgatacctaaatgttgcagtgtgaatacagatcttgctgccagggccccaccaatgaacaagctatttgtgattgatgatggcctctcagtatttgcagcttctgatatcaatgaaatcctctcaagaatgtgctctagtctcacctgtaattcataccaaaaatttgtttctgagataagcaaaatgcaaaagagaaaattgttcctggtaatattttcactcaaaactactaaaccaatttaaaatcaatcaataacatcatcagtctctgaatgaaacagttatccattatgttttccatatcctatcaccacaaaaataacaatgaaagtcgaaagtgtaagaatatacaatacaaacataaaaattaccttcaattcgtaggcatcaatggcacaattattatcactaccctcaaaaaatccagtattaaaattgttttcttggcagagcttgactgcatcattctttagcatttcattccattgctctaattctttacttgattcagcatcaacctgaacaatattcaacgaaaaggaaaataattttggcattagttgccttctgtagtagagattcaacttagaggttacatgcttacttataaagaaatataataacaaaaagagagagatcctatacaaatctaatcctagaagaaatagaaaatgaaacctatatacaaattgagaaaagaaaaaactaaatgtataaccagattgaactgaactacaacttgggataaataaaactaaatgtagcataagaatttaacatctaaacaactgctcagcatttcataattgtcagatattgttaaggattttattgtagcagtatctttgttcaaatttaattctacatcacttaaaacttgtgcattgccatttcaattaaacagctccatttaaattataattatattcatacaatggccaaactatctaataaatctgtcttaaattacttggcgcattattgttgtccataaaatgaattaacaaggaatagttgcattaattccacctaaacataaaataataataataataatgaacatattatatctctaacagcataattgttatcaataaactttgagaaaattaccaacctttgcatatttctggaaatctcggagctttgctgtcaaacgcagattccgttcaacactacctttacaaaatcttccatgcaaaccttcacgtgaaactggagaacttgcatctgaggtttctttatttcctgaagaggatgatcttgtagcacttctctgctctgaatcacaaaaatctaaatgattatcatgaatacaccgctccttacttggcggagaagggcaatgagcatttccagcaacttgcaagggtggctcaagaacagctgaatcctctttgtcagattccccagaagaaattttacttatgatattccaaaatactcgtaacaagctttctagtttttggtgaagtgtgagtaggaatatatggaatccttgcatgtctctaagagcaccacgaaatccatttcgaaattcttgaacaactgaacccatttcaaacctcacatcatttgtgtcattgttttgagcagaagaagaacatcctaacttccccattgttatgtcaaataacaggttggatgagtactcagaactattgagtagtaactcaaccaacttaggataagttgcctgatcatttgcacgtttccctactggaggtcgacgaggaacaccagagtcaatagccacaattcggacatcagaaaacgttgatccatctgatagctgacttttaaagctcaactcactagatttaggtgattcagtgatatcagaaagatcagagttctgagacaccaatactgaattatgagatttcaatctgctatcaactgaagttgcccttctttctttttgaagagctcttagtgatcttggtatgtatcgcttgattacagaatctaaggcttcatccaaagtatccatgtatgccgaagacattttatcagccaataacaaatttgcactgttaccacgccatctaagctggcggcatgggagcctatcttcattcctgatgatcaggtccaacatgaacaccctaccaagggcggctgctgtcttctctgctgtttctttcatctcaaatgcattacaactttctagcaaaggtgatccatggacataactgcataagacaaggaaattcctaagtaacaacataacaaacttaatatttttgtactacatgtaatacttgtcgattttgaagacacaacaatcacaatcttctcttaacatacagaaaatgcaatcatgaattagttgaatctatctcagagaccagaaactcctgttctatttgaaataccaaaattgaagagaggacaacaaaaaacaagagctaatgatccctataataagtgacaaaaaataaatcaattaattaactcttccacaaaattacagacaccaaatgacataatatgcaatattattcgcaccatataattgcagacttgcagtactgtttacattatatatatttatataaacagaaaagaattaaattgcacctcattaagaaaaggcatctactaagttcaagagcttccaatagttctgagcaagtcatttcaccaacttcatctccttctgagcttgctgtgtctcttgctttttctgcagcttctttaatctggagccattcaggggcagaattgtggatgaccctggcctgaaatattccaacactaaagtaagaaaacattctggcccaaacaacatacaataatcacttcttaaatcaatgttaattactctaatggaatagcaaatataacacacaagtagtacaaggtaaaacctgaggagttcgaactccgagccactttgccaactcatatccaagacgttcagattgtgaagccatccttgatgatgagaactttataacagctgctgcttcattcgcaaaagaattatcatctccatgttggttgaaaagagcaaagaagacaactcctccagaattcacagtaacctatatgcacacaactaaagacaatatgagacaatagctttacaactcaaaaatcttactcttaccacaaacatataaagaatgtgcatttccatttcttggggttactaaaaattgatccatttcacgatttgtagaaaaaatagactgcagacctcgagggctttgttcatttcatcctcagattggtcagtactgctactgtgttcagtgtgatgtagtgaagaaagcctatcccaagagaaagagcttgattcgatatccatcattgcagctgtaccaagtctttcccacagattgatttctgtcgtttgatcagaatgaccaggaccctttgaatcattaattgaatctcctgcactgaatagtgatcatttcatcattaataatgacacaaaaaatgccttacaaaaggtaactatttatagaaatagttaaaagaaaaatgctagttcaattctacattggttctgaatctgaattgtgattataagcaaacttacctcatggttacataatgccaacacaaagtatccaaacagttagtgatgacagagaagagaaatatacacaaaactaaccaagaaggcatatcatcgagcctcagagggcggttggggaagcctgaggagcggttttggtggctgcgtttacgaaccagttccagccattgggtgaacctatacgctggtcctgcagcaatgtcacctaacatatacaaaacctgtattttcatcacaaaaaccaattcagtaactttccatttttcgattcttactcaatatctattccaacaacacaggcatttccaattccagaccccttcttcatcaacacgttaatttctaaatatagaaatgatatgagtaccaatcaatagaaatgaaaaaggtaactgacccgggaagtaacagttaagggagaaggggcttcaggctcgtcggatccaatgcccacttccttggcttcctctttattctgtaatttcgtcataaaaaaaaggaccaataatagatcaaactcagtgactttaaaaaagaaagaaagaaagaaaacaatgatgcaaagcaatggaaacccagatcctaaaagatcaccatgtgtacttctatctaaattaagccagagagacactcatttattatgatgttgattgagagaatgaaagaaacccagtacaaaaaaattatttttgaaaataaaaaagtagagggaaaaagaaaagtgaggaacatggtggggataggtggacctgaatggggttgatgattgctgcagagacttccttatgctcattttccataatgttaattttcggaggttcagtttcttttgagggaaaaagaaaaagaaaattaaaaaaaaaannnaaaaagaaaaagagagaaagaaaaatggggaaggagagagaaagacaacaaactggtctgaccaaagacacaaaatttggcgaaactaaagtagtttgctttttttaaggaactgactgtagagagagtaggcgcttttgggggtgtatctatctatcctcgtctgtgttatgaattctctactttatactaagcttaagctagccttcaatggcaaatacaccagttttaaggaagtgggtctctgagttttgtttcaaaactgctctgaaagcttggaaattggaatatggtgatattgaatactgtgctcttttcaatcaagtaaagtcggcttggattggagcggattatataaaaatatatatataagatgatataataacattatatgtttgttggtacgagtgatgagatcccatgaattgatatttatatattattgtataggttgttcttattgagattgattcttcaacggttttattccttggaactgaaaatttagcttatgacacaactcaacgacgttcttctgattcatttcttttaatttctacataaattacggatcaaatttctaatctttaaaattactgttttgaatctgtgtctatgtattcacagcacaagtctataataatttagataatgtatgaaagtagcattgtcatgttttttttaatctcatttctttaaatactgtatatatactgcatttaatacgatatccacgatgatataacgtttggataattaattgcattctataaaaaaatgttaaacttagagttggacctttaaaaaaaaaagaaaaaaatgttaaactaattttgactaattaacaaattacacc

SEQ ID NO: 17183 - DNA, 2425 bp, Cannabis sativa
aaattctacctacaattgtttttatttgatcattttatttttatgttatgtatcataggtacatgcaaagaggagcagaggcagttcactctgcaaacccagatgttcttgtgattttgtctggtttgaattatgataaagagttttcattcttgcgaaatcgccctctcagcctcacattttctgggaaactggtttttgaaagtcattggtatgcattcacagatggcagggcatgggaaagtgggaaccccaaccaagtgtgtggtacagtggtgaataatattatgagacaatcagggttcttgttagagaaaggatttcctctgtttttgagtgagtttggagtggaccaaagagggactaatgtgaatgacaacaggtacttgaattgcttcttagctttagcagctgaattagatttggattgggctttgtggacattagttggtagctactactatagacaaggtgttattgggatgaacgagtattatggaatcatgaactgggattgggatgaaattcgaaattcaactcttttacaaaagatctctgctattcaataccctttccaaggtatgttaataaaatctacaactttttgttataatgaatacatatatagctcaaattagaatagatatcaattttgctccctaaaaaaatcatgccctctgaattagatattaagtattcatcctcaactttgaaaatatttaatatcactaataattgggagtacaatttatagaacttctattaggcttcattatacattactaacatgttttggctgtttgaattacgaagggccgggtctatcagaaactcgagtacacaagaacattttccacccatcaacaggtctttgtgtggtaagaaaatctgtatttgaaccattgacattaggtccttgttctagctcggatggttggtattattcacctcagaagaaattaacaattaaaggaacatatttctgcttacaagcatttgatataggaaaaccagcacgacttagcataaagtgcactgattctgattccaagtgggaaactatatcagattctaagttgcaactctcttctaccactgccaatggtgacactgtttgtctagatattgactctgcaaataatgaagttgtaacaaacacttgtaaatgcttaagtagagatagttcatgtgacccttcaagccaatggttcaaacttgttgacagtacaagaagtccaaggttatctgaatctttcactaagatgaatccaatgatggagttgccgtttgaggattctgaatggaaatctttgattacaatgtgagagaaatatactaaaaagtggatcatatgtatggaccaaaagtatatactgtttagtgtaagggagcttatgcacaacaaaactcctagaatttcattgtctatagagaaaatgatggaatatgtgtactataatatggtgtactaatgatagaaaaagagcggaaaaaacagaatatggtgcactatattttaatagtagaatattatgcttttatataacaagttactaaatacgatatcttttattattattatttaaattaatcattaacaatatacaactgtgatcccacatcagttatgtaacccaataataaatttttctttaattcaattgcacaccaaatgaatatttttgtaatctattcaaactctacttgctttgttcatgaactcacaccatggagttaatttttaaacaatttcaatctcatcaaaataagataatattatttattttttcataattataaacattactaattttgaaatttgcaaagtatagaaagtattgcttctgacattgaagaccacatccaactaaagagttgttctttgcatttctagatagcatatttaggccaaaaatttgagttggtgagagaggagattaaataatttaagaaatgattccaagtagcacacgccatagaggacaattcagctaatgcaatagttaattcaataacaatcatataagttgtgtcgttatatgaaaaataatttacaatttttattgatgaataaaatggacaatcataccttattacatcgataatagacaatacgccttacactaagaaaattgtagaagaaaagaaataataaccaaataaaattctaaaataagcaaactaaaagaaaattataagttggcaattgggtacaccaatcgctcaactttttgttgaaaagtaactgttactgatagtatttacgaaggtgttgtctattccagtatcagggtattagtatgagattcatgttagtgtcgtagcacgccaacttatatgtgcttggggatacgacctctgttatttcgtatggccctttctagtttggacccaatacccctattgcagagtcttttgtgttagg

SEQ ID NO: 17184 - DNA, 5510 bp, Cannabis sativa
cccccccccccctcctatcttgatcctatcatccattaaattctcccctgcatcattagccgattcctccacatcaagtgcttggaaagagttcctcaccactgtgctattaactgctgagttcatatcagtaactgattttcctttcccatctattttcctagctttaaacaccttcatgaacccctcttcatcaatctgcacttgattcctattatcttgcttaataacccattgttgttttccagtagtgcttttcttacaatttgcaacaatatgacctaccccagaataatgagcacaagtgactggtttccattcatatttgacccttacagtcgtattcatgccaaattcattctcaaaatcatgcaaacctgatagattttgatccatcaagacctctactagtactctggggtaattcattctccatttccttagtgacagagtccaccataagtggcttccctagttgcccaacaatctttaacaatgatctttggctccaatatttcagttctaaatcctccaattggatccaaataggcacacactgcacatcttctttcttgaaatttacatttgggtcccatggcttcattataataggtctcatgttgaagaaaatgtagcccccattcaaaatcttatctctgtattccattgagctgaaacgaattataaaaatgccataagaaagcatcttcactcgatcaaccttatccttccatatcatgttaacaaatccttcaagaatgtgtaatggagggttcactcctagaatatagcacacaatcgatggtttccaaaacaaaatttcctcctcaatatcatccaaagtaatcttcaccttactatttcgatgctcagaattctgaaaagaattatcaagattacgaactacagaactagatcgcaagattgaaggaatcaaagacttaccttgtacaatttcactgttacattgctcgtttgctttgaggaactgcacaaagtcattcctaacatcttcttgcttatgaatcgcttccagtgaagatttaggggatagaggaggttgagagacatccacaagagcaggatctcatccgacatttccaggggttaatttccgtaaattgattcatcatactagtttgaattgcatcaaacaccaccttcccacttttcttcttcgagatcttagcagcagacttagattttccatgatttttgaccttgttttagccatagcaccagctttccagttgcaagggcaagaacccgcgggaaacaacatttgaagtatcactaagcttaaataaagagaggtttatgttgtgtaggtaagcttggattaatctatcccataaaagtgtgccacgtaatgagagccatgagtccacacaaacaccacccgtttgggattctcttacctcgactagaccgaaaagacgagaatgcacccatgttaataaattcaacacaatctacggtccagattcatctttggtcacacacgtgtacaaccgcgatgaatgtaagcgtgactctcgttcgtacgaattcatataattttcgatttatccttgtggagaaatgatcgtctgctcctcagccaccatatatccattttcttcatctctctcccctcagttgcactttttttaatcttctctatcgccaccggcatcgcacgccggaaaattcaccgttcggtgactggtcatcggagtcacttttaggttgttcttcacttccggaggtacggatcatcagctttagttcttttctttggagctttcgctcttgttcgcacttctgaagctcccagctttgcgttaagcttattgtataattgtaatgattttttttgaattacttttcattctaatttctgtttctcggtggtcatgtttactgatttttaagagtggttttattgggctttttgtttaattcactttttcttccccatgttgttcgttttacactgaagccatctttatctgtataggtatttgtaacaaacggggcacgtagctattgtgcgttctttgagatgaaattgaacagttttgacttttgaggatcagtaactgaaagtcagagtggaactccaaagtatttatgattactttgaagttctaggatcgaaatggtatgtacttctagtactattggcatagtataaatgccatgtcttatttttctctttagaaaatgagcaatgtttcagagttttgtaatttttatttggtttaataatgtttcaaattgctaagaattttccaatctttctttgttttcttattgtttgtgagtcagccttcaaaggttaaaccaaccttggagttaaagagattgggtcttaggtctttaacttgaggaaggtcacattactaacagagatagctgattggtggtctttaacttggctgcctgtaagggtgtctaattgctacttttttcagcttagagtatgggcctccattttgattgcttatgaattaacaactcttaagtttgctgttaatttttttttagtatctgataatttataaaattatttgttccaacttattataatcctataaattttagagtcaaaagctttggaaaagacctttattgacagtatcaattaaaaaaaagtttataaagaaaaaacaattagagacctcgtttcatctggcttagttattgacacgactagtgaggttccttatttgtatttcttttcataccagcctgggataaagctgaaactaagtaagtgcagggttattgtttttgtagtataatactataccataaaaacaagattattaccctgaaacagaaatttgcctcttttctgaaagattagataagggatatacaatctgatgaatgtgtcatgttgttcgaagcttgctttgttaagtttcctgcctgaagaattggcaatttagcatgttattcatttataatttctaacaagcaaatatatattggttattactaccaaactctccagaatgaggcgacttggatggagaagggtcctggacatgtaaatgatggagatttaggcatgactaacaccgctagaattggaactaagagatctcatcaatggtttgtagattctgctgattcagggttgtcccctgacaagaagcaagtattgcagactgtaaatactaagttgagttctagaatctcatacacaagtgttcctccttgggaaaacactcccagtcttcagtcagtcccgaatccatttgttgataggttaatcggatctgaagcagcaagatctgtcaaactttctgaaaggaacatttctgctattggaacagataatttgagtggaagaaagggtacagatagctactttggagatgatgtaccttttggtttatctgttgaccatggaggtcctgaaacatgtctcagttatgctggaataagaaaagttaaagtcaatcaggttaaggactgtgacaatggcatacatgctctaaggagacatgattctaataacagtgacctgtccactgatcatgcctttagcagggagaatgaaactaattttgtatcaatggggcagtccttcaataaggagcatgacagtataatgctactgggtcatacatacaacacaagtgatacccatatcagatcagcagtttcaaattatggcagagtggatgacaatacaatatcaataagtgacacttatagtaaaggggataccagtataatttcttttagtgggtttcctgatgaacaagacattatcccagtcggtagacctattgatagctatgaccaattatatcatcagacctcaatgatatcagaggcaccctgtgagaaagaaccagatccaattaatgtcactgctgttataaataccaaggaagtagtcaaaccaagatctgacttggtttccaagaacaaatcagataagacgccaaagaaagaagcgccaaacagctttccctcaaatgtcagaagcttgatatcaactggtatgctcgacggagttcctgtgaagtatgtttcattggcacgagaggtaaaacttcaaccatttttccattttgctttatggagtgtctttgttaaatttctcacggttttatttatgcatatgaaggagcttcgaggaatcataaaaggttctggctatctttgtgggtgtcagtcatgtaattattcgaaggtgagtctcaaatagttccatctatacgtgaggccttattttgagacctaacaattgatcaatgttttatgcttaaggtgctaaatgcttacgaatttgagcgccatgctggttccaaaacaaagcatcctaacaaccacatatactttgacaatggaaagacgatctaccagatagtgcaagaattaagaagcaccccggcaagcttattgtttgatacaattcaaaccgtctttggtgcaccaattaatcaaaaatcatttcgtgtttggaaaggtaacataaaagctcttctcatttccttttgtcatatgttttgttttgtgtgattgcattttcgaatctttatgagtttccttcttcatttgcctgcaactttctgctgcggaactcatattttgcatctcactttctgttacttactggcctcagaatcatttcaagcagcaacaagagaacttcaacggatttatggaaaagaagaattgaatttgtaagagtattatactgaagcttatggtaggattatcatcagatgtggttttttatgtgcagaagaaagatcgcttgtggtaaattctttagttatatatgacaatggagggaatgatgatatatgttactgcacgaagatgtaaatcttgtgatagagcataattagttgtagtttatgtagagatgttaatgtagatgaaattattctcctgctgagccttccccatgttcatgtgtgtgtgtgtgtgtggggggggagggaagttcttaatttttacttgctactgtgaaggaaaacgaattaggttaaaattcaagttttttactatcaaactataagtggtaaaaaggagctacaataagaaataaggagaagcttattcttagttatattctatcagtttggttttttttttttcctaaatattgtatcattgtttattttggtgcaaatcatgtatgcacaagattactaaaagagactaaaaattactgttaaaaagccaacttcaaacttcttgctaaaaataaaattcaccattatcactttgtcccaactttcgttctctgtctttcagtagtttagtttaagcaaaggatgaggatagaaattcctatataaactagaaaccctaacaagtattcatttaataaactgcatatgtgcagctagtggctacatgctgacacagctcttaagtggcatttatgtcatcgaacaattttagaaagaatctacatataacaaatagttgttctagttgttcgtgacaaaataaaataaaagcaaataagatagttaaaaaaattaaaaaaaaaa

SEQ ID NO: 17185 - DNA, 2327 bp, Cannabis sativa
ttgttgttggagctgtattgtttgactatgcctagttatttgaatagttgtattgttgagtctatagtaatcttttttcattaaaaaataattaaacgaagaatcttccaaaaataatattgttttctccacttttttttttttttttactttttatgcttttattctgatcataccttatatatattatttttttccctcaacggtggttttctacatataattttcattatcagaaaaatttattgggaatgtaattataagccagccttcgatactgtttgactttgaaaaaactcatttccatatacatataaatatacacatgactttcgtacttgtttacttgagaaaatggcctcatattctacttgctttaaatttgttctttgaattataatattaatattaagtctaccttattatgtgtgcaggtttcagcttgcaagaaagggtttcctaggtatcaaaagattcttcaagaggaaagaaccaagtaaattatttaacctccaaaagagaattttcaacaatggatttctacccaagtgttcaaactaacccttcttcacttcagccttgagttttcaggtaattgctctaattgtttattttattttcaaaatagaatatgacttaaattgtactattggatttcacccacccacccatgtgactagattacaagttggtcaaaaatgactcaacaacacatcggataccaacaactgttcaagttctgatttttttctttttttacttttttggcagatttatttaaaggaatcagtgaactcaggagtgtgtgtataatatataattatatatagtaaaaaaaaaacttagggaaagcagacagagcagagaaggtgaccacttgaatatgtcgaataagcttaaaatgtatttgacgtgtaactggtgattgcttatatagagaggctgccgtctgccatatctcgacacatatttttttcttttattttttggaggcttcttttatttctttaccaattgtacagttactttcattcatttagaaaaaaaataaggatagattgtaagttgggaaataggtctctgttgttttcttctttgagcttgtggtgtgaacttgtacctatgtcctctacaaaagagtgacatttttagtgatataatgttaatgtatgcatagtgtctttgtaaaaagaaaaaagaagaaaagtgggatgtagatatctaatatactttataaaccaacaagataatggaaacctcttatttataaggatgaagaaggatacaaactcaatcctatactataggttacaagtaaatagcactgaaaagtactaaagaaagaggagaagaagataacacaagacttgaacaagttttaaggggtttccaaaagaaacttgtttcttctctcacaagaatactattagaatgttttttttaaaacagattactattagaatgtttattaaatgattattataatttctatattttaacagaaattattagaagttctaatctttcattatgtccctatttctgtacaattgattattgtatacaacatccttattatattgtgtcatctatacttaacaacatgatagattgtcatgtccaagacagtacatagattgtgctcataatcttaattaatatttgttcatgcagtttttcatcaaatgatctaagaagatcgtacaaacaagaggactgcgacaaattaagttgtctaaataaaattgcaataaataaaaaaggacaccagagatttattatagttaaccttccatatcgcgatggcaatggggctacatctgttttatttttattaattggatccgacacaccagagttatgttctcaatgtgtgggtaatagtacgaaaggagatttctaggcgaaatcaatatcaaagcttatgggtaaaagactcatgagagacccaataccattattatcccaaagtttggacatttgacgtggcacttacacgtgacatgatctagttgatattaatatgacaaagaacctccacacaggaatgtgccaggcagatcccatatgaggctagtgcccatagactataaattgtcttctaggcagcagctggccaggccatcattatgttggctaatgaagggcaaatcaatgtaccttccatgattgtttcgtaagtaacttcatcaagaaaggcaagtctcgaaaagggtttggtcgagcagccaatatgttgttggaatatctttgaccaggatttacatttactaacaagtatgtttttaacatcctaaatatgaatctctaaaacgatgaaaataaac

SEQ ID NO: 17186 - DNA, 6262 bp, Cannabis sativa
cccttgtttagtggcagggacgactaagtgcctcagagccactgatcttttggataataatttggccgccactgcttctgtgggctccaacaaatttatgacccagataatgatttctccttttcactttgtattcttatgttgtccatacggattaaaaaaaattcctttgccagagaagggatgtggtttacttggcaacatctttgatccttgtcaatgtcatgctacattcacctcatttagtctttgcccatatcttctcacttcataatttgatgtgggattatcttaggagagtaatattttagccatctgaaatgttaaaattattattattttttttttttgggcctaatgagcacaaccatatgggaacaaagttccagagaaatgccaaaaaggcttaagtgtatgtgtgttggattaggggccaaaattggtaaagtttggttttttaagattggatacgtgtgccgtaggctccagtccaccaagatactggctaagatataaatttcacacacaagcttaactcatctaaccaactttctacattccccattcattttggggacaacccaaataaagtatgaccttaatgtacaatttcatggggacccaccttctggtatttgcttccttaggttttgtaacatctcacatcccacaaactctgaaccctttgatcaatgttttactttttgatgcttgtctgcaagtgtcaatgattgatcaagtttgcgtttgagtttgatcaatataagattttgattaaatctatggatacaaattggtgaatagcagccaattgaaatattttcttttagtggtgaaaaggagataagacaagtttcttatccccttgactccaacttaactttctttaaacaaggaagtgacttgggtaccctttttttcttgttgaaatttacagttgaaaagaactttttcagttgtatttcttggttcactttaactgcacatattatttgtaaacaacttgataagaagctagacccatccttttacggattatcaatcctcttggagaaaaattggccactagttattggtggttgctgtacctcgtagcactagagttgttttggaattatacttactagggacaccaccataagaggcatgtttgcttcttaaaacacagaaagatgataaagctgatgttgtgagaatgttctatacatggatatggctatattggatagccgaataaatgcaattcctgtaacatgatgtcgatatgtctgtagttggatatggctaggacgttatggttttcatgttaagctgtcctggaaattataggctcttggtcactgttgaatgcatttgcagggttctgttgaattgaattttcaggtatgggggtggaaagacatgggagctgggttgatattatatcaggttttctctataggtgagcagaaagttgagcttcttctgcctacaataccttcatgatagttcggtttggtcttctggttgctgcttcggttgcagcctatgctgtgaaccagctgaatgcaaaaaaagcagggtcttcaacctcaagaacccggcgttcaggtactcgtgtccatgagttttgcatatattagtttatcttttgttttgctgacaataaaaattaaattcaatatagaattccagcagcatgtcaacttgatttattgcaggtgaatagtaataattgctgcctgatcttaaaggaagatactttaacattccatttttatgtggattttattctctatttgctcatgtcattattatggtgttacaggaaatgacaaagcaacttttgatcatcaaagcgaggcagaagacaaagagcagattgcatattctcatgattaccacaaagggaatgatgtaagtactagtgctagcttctgtcaaatttccatttatggcactagcatagtagcatgcagacttcataggccttaatttggaaataaaatgaaaattatgctatttttaattgtctttctcttgaattaacattgcattatatgtatttcaggaggaagaggaagaagaggttaaattaattaatagcatatttagccaagctagtgataatcctcctggtagcattgaagatgatgatattttaccagaatttgaagatcttttatccggtgagattgaacttccattacccaataacaagatcgataattcagagaaagacagaatgtatgaaactgagatggcaaacaatgcaagtgagctggaaaggttgcgccaactggttcaggagctggaggaaagggaagtgaagcttgaaggtgaattgctagaatactatggactgaaggagcaagaatcagacattgatgagttacaacggcaggtgaagatcaaatcggtggagattaacatgctcaatattactattaactctttgcagactgagaggaagaagcttcaagaagagatttctcagggagttgcagcaaagaaggagctggaggtagcaaggaacaggattaaagagcttcaaaggcagattcagcttgatgctaaccagacaaaaggccatttattgctgctcaagaaacaagtttctggtctacaggctaaggaggaagaagctgttaagaaagatgctgacatcgataagaagttaaaagctgtcaaggagttagaggtggaagttgtggagctcaagagaaagaataaagaacttcaacatgaaaagagagagttagttattaagcttgatgctgctgaatccagagtagcagttctctccaacatgactgaggttagagctaaatgttatctcaaagttctcaatcttctatatgagcacaatgttttattttctatcgttttcattattgtgccagggaatagcttaatttatggtattttactttctttgcaatcagattttgaacacccccactttttttctccttaatttgagaagttttagtcagtaagatcatggaaagggaatagtaggctgtgtactcttgctatgaagctgttaaaatttctgctttgtcatctttttgtggtcaactgaagagccccatgagacttttaagtagaaactaatcctcatggatacaataatgacgtggttatgcatttgttaaaactcgttaagttcataattttttgttgttattgaaaatgtttttgtcaacgtatcatgcttatgtatgttggtaagcttacttgataatgttccctgcagagtgataaggtagcaaaagtgagggaggaattgaataatctgagacatgcaaatgaagacctgttaaagcaagtggaaggtcttcagatgaacaggtttagtgaagttgaagaactagtttaccttcgttgggtcaatgcatgcttgagatatgagctccggaattaccagattccatcaggaaagttgtctgctcgtgatcttaataagaacttaagcccaaaatcccaagaaaaagctaaacagcttatgttagagtacgcgggatcagagcgtgggcagggggatacagatctcgaaagcaacttttcccacccgtcttccccaggaagtgaggactttgacaatgcttctattgatagttctaccagtagattcagtagtataagtaagaaagctagcttaattcagaagctgaagaaatggggccgaagcaaagatgattcaagtgcatttttatctccatcaagatctttctctggaaattctccaagtagggcaagtatgagtgttcgacccagaggtccactggaatcattgatgctacgtaatgcaagtgacagtgttgctatcacttcatatggaatgatggagcaggaacatgcaggctcacctgaaacaccagttcaatcaaatttcaaaagacaagcttcaagtgactcactcaattctgttgcaacgtcattccagttgatgtccaagtcggttgaagggactccagatgaaaaatatcctgtgtacaaagatcgtcataaattagcattagagagggaaaaacatatcaaagaaaaagcagataaagcaagagcagcaaggtttggtgataatctaaatgttaactcaggctttgagtctagagccaagagcactattatactacctccaaaactcactcaattaaaggagaagccaattgtttctggtaatgaaaatgaccaaactactgatggtaaggctgttgatgctcaatcaataagcaagatgaaactatctgaaattgagaagaggcctccaaggacacctaggccacctcctagagcatctgggagttctcctgctactacaacttcaaatccttctactggagtaccgcctcctccatcaggtccacctccacctcccctgcctcctggaggaccacctcgtccacctcccccacctggaagtcttccaaggggagcaggcagtggtgacaaggtccacagggctcccgagttggttgaattctatcagtcactcatgaaacgtgaagcaaagaaggatacgtcgtcgttaatttctacaggatctaacaatgcatctgaagcaaggagcaatatgattggggaaattgaaaacagatcaacattcctcttagctgtatgtggaacttcctctttaattttcagcgtcaattaactccttttctagaagatatttatgcagggttgagagatattaaaattgtatgaactgatgtaggtgaaagctgatgtggaaacccaaggtgattttgtcatgtcattggcaactgaaatcagagcagcttcattcactgacattgaagatctagtggcctttgtaaactggctagatgaagaactttcattcttggtatgctttttcattaagatgttaattgaagtgattcaacatctaaactaaacggcttgaatagtttagatatcatagtgcttgtcgtgtgtaatgtttttcttttcctgccttcttaaggttgatgagcgggcagttctcaaacactttgattggcctgaaggaaaggcagacgcctttagagaagcagcttttgagtatcaagacctgatgaaattagagaaacgtgtaacctcctttgtggatgatccgaaactcccatatgaagctgctttgaagaagatgtactccttgcttgaaaagtaagaatttttctcatacatgttatggatggctatgtgctgttattttagctttggatattcatattatttttgtctttgttatgtttccagagtagaacagagtgtgtatgcactcttacgtacaagggacatggctatctcaagatacaaagaattcgggattccagtcaattggttgttagattcaggagttgttggcaaggtacgttctttttgtgaaaataaaatataatgtgatgaaatctatcttgcagttggttcacagttcatctattatctacattcatctacagacatggagtttgaaattacatcacagatgattaataaccttatagtcactgcataagttaaccatataacatcatagataatttcagtttcgtaatggcaaagtgtttctttgttctgctaatgttttagtttgcttaataggcttatatgaacagttgagccaagaagaaaaaatatttcatgtgctatatactattaaaagttaaacattcttctcattgcagattaagctctcttctgtccaattggcaaggaagtacatgaaacgtgtagcattagagcttgatgcgttaagtggacctgaaaaggaaccaaatagagaatttttactgctgcagggtgtccgttttgctttccgggttcatcaggtataatttaacaatgttgtgtttctagtccttgcaatatgaaaatcccaacaaaacatgagactgtatcaatgagatgctaactttgcattgtttcagtttgctggaggctttgatgcagagagcatgaaggcatttgaggatctaagaaaccgtatgaatacacaagccgggggagataataagctggaattaccagaatcttaggtttctttttgtcctatttttcttttttagtttcttttctattttcatttacccagccttttcttcagttcatccatccatgtttcaagaatatcatatatttgattttgtacaatgaataataaacaaaagaaaaaagaatctcacagaatagtagctaaaaattcttctttaaaaatgaatctccaaagccaacaggctggtcaattcttttcagtgacatcttacatgaattttagtatgaaaagatagtttaa

SEQ ID NO: 17187 - DNA, 3851 bp, Cannabis sativa
tcccattttttatttttgttaactaaaaaagtgggataaaaggtcccctttcttgtagtgaaataataactgagaaattaagaagaaacgaagacgaacgaataaaaactcttgaatgtagctttaaattgcaacattgatctcttaaaattgtttctttttttgtctctctagtcctgaggagctgaaatataatgttctatttatagaactaaaaagatgacgtttgaaaattatattaaatttgaattctgtacgcctggcactatggcgccaaagacacgacaacatgtgtgattttcttgaggttttgacttcatgcatgcgaaaatctatttttttttatatttggcactatagcgcctcaatcacagtgctacaacgcctctttttgatttaagcgtttatatattacatcatgttttacctgggactcgaacccaagacctccaacactcacacacccacctatggccacttgagctagccccaagtgggactcaatcacagtgctacaacgcctcaatcacagtgttacaacgccatatgtactttttttctcattttttatgattctcaacttgtttgcattccagttttagcattatgctcgtatatgtatagtttacgccaaatttgttataatttcatcactttaagctcaacattgcccactacagaaaacatatcaaatctatacaaaatataagaaacgaacaataattcatctaattaatgaccaaaatgagtgtataaatgtgcaatcatcaataatactcatataaaaatatcttatactttgaaattatatacatacattcgatactttcggataagattttattaaataataactaatttgcttttatatattgataaataatagtagtaccaagataacatgacaaacaatttaaacagaaaaaaataacatgacaaaatgaaaaagcaaactgtaacaaatagacaaagatgtaatgaggttcaatcacaagttaattaaggtgattaaagacctaatattctctggaggatccaactatcttatggctaatctttatttaacaatggagtagctcagttgagcacaaagatcgagcaaacaatggtgttttgcacctacaaaatagctcaccaatgagagtaggcaattaaacacacatgccaaaatcttgaacaaccctctcgtcactcatagtatttttatctaattttctctatagattgtcccctaaaagagtgtgcaacgagaccttatgtagacatagtgaggtctccaaaagagtgggaattaagaaccgagctaaatgactaaactaattaactgtcaaatcgaatgaccaatatttctaactggtagatggtatgtgacaggtaagttagttaaactaactaaccaaatgtttaaaatcttccacagtatacataataagtaatgattaaaataccacattttgatcttcttctttaattaaaatagaaaaatgttcctcgcaaaaaaaaaaaaaaatagagatagagagactcataaacgtaataatttagttaggtcttcagaagcgtaggtaataccctttgcttattctttcactgttacaagctatcgaaacttactaattattagttcgatatatatatatatatagcacaatgattcatttatttatttttgtttaagcttaaactaaaattgaaatatctagcacattatctcaaatattcctttattatttcagttgagcttgagggtccatcccatattgtcttcaacaaaaccagtttgaattcctgcaagcctttcatacagtttctgacctaatgctccttttcctgttctgtattcaaccctgatcatgaactaatataattaaaactggtatagttttaaattttaatgactactaaaaaataaaataaaaatgggaagatgcattaatattatagatatatatgtatacgtatataaatgagtatatatatacctttgaccctgatatgttagagtaccgatagggttgacagtcacagcagttccggtgcaaaatgcttcatccgcatcaagcaagtcctctactggtactagacgttcctccaccttaattattattattattatattaatatttttaagaggagagtgaattaattgacatatcttgcttggatatataaggtttatatagtcaaataaatatcttcttctagatcacaaatcaactttttactttactgcattaatatagctagccactatgtaatcgtgctctttaattattcactcttacagttactaaattatatatgttcctgccttgtctaaaattttaggagaataatttgctagtggtaatagtttcgatcgtgacacaactctacaaaaatgatagtaaattagttatgtgtctatttctcagcatgctatgatagaagaataccttttaatgacaatggtaatagatcattaagagaaattaagacaatgtaaatattcgaaaggcaaaatcagataataataatattttgtgataaagttgtgctatatccatattatttaaaaattaaattaataaaaaaatctaagaaataactttgttattacaatgtgaatcatatatctgggttacctggtagccaaaattagtggcaagctcaatgatgctcttacgtgtaacaccaggcagaatcgttccatctatgattgctggggttgaaactacattatcctaaaacatatgaataaaagagttcagatttggtaaatcttgctcaattaaacatgttttaatatttagatataaagaaattttcataaaacttttaatatttagatataaagaaattttcataaaatttttatcacaatacctttcaaaatctcaagttcttaaatcgtgtttaattcgtttagaatcaagattccttgttaaaaaaataatgttatactgtgtttaattaatttaatttatattaaatattaaaagttttttattataaataaaaaattaattgatgtgtcgaagttaaattaatttaacacaataaagtatgctactttttgacagggatcttaattctcgtgttcaatatttagatagtattttgatttattttttgggttatataattggtatagaaatgttaattttatgtggagaagttagctggagaaggaagctaagagaaaatcaccgaaggcacaaagcaacattggagaaaagtaaattttaaaggcataaaaaaataaaatgggactatttgtctacccatgtataccataatgattacattatttactatcaaattctataaaatgcaactgagcacatgatgcttttgtgcactccattactaagagcatctttaacgtgaataacatgaagttatttgtgacatcttttagagtgaaaaagaatgactaacaatgacatcttttagaacattgatattgtttaagggtgtcaaaaattttcacatgatcacttaaaaaatattaatattttattttatttttcttgcacattattttcgacttttattgttctaattaactaggttactattaagtgtatagcacgtatatttagtaatatttttaatttttatttttattatgtgtatttttaaaattttataaattaaaggaaattatttattaattttttaatatttttttaaaaaataatatttcaagttttaaaaatttgaggaaaataaattaaagtttaagaatattaaaattgaacatactcccaatattaaaaataacaatttaataacaataaaaaaataaatataaagtttaagaatattaaaatttaacatatcgcaataataaaattaaaaataaaaaa

SEQ ID NO: 17188 - DNA, 2948 bp, Cannabis sativa
aattgggaaacacttaaattcagggccggctctgagagtagacgggctaggcgtgtgtctcgggcccgaacatttagggctccgaaattgtgaaaaaaaaatattaatataaagataaaatattaaataagaagaaaatataacaaaaattaattggtgtagtggtaaaagatcttattttaaattaaaagatcatgggatcaatttcccatctctactttttaatttcttaaaaaaatatctaatgtgtagttatgaaggattgaaccataaagagagtttctaaaatttttaccattacactaagcactagaactattattttcataatagttaaactatatatatagggcctcaaaatttaatttcgccttaggtccatataccttagaatcggccctgcttaaactacacacatttcatacacataataatttattattaatcttaactatacaattaaaaagtgattaacatattattgttatttgttatgttcataattatatatatgccaaaattacatgatatggtattctatattgattacagttgtacgagttaattcctccgtctggaccggaagaaattgaatcagcagcagaagtgatcaattggttagaagaaggtctccaacctttgattaatgatttggtcaataataataataatcaagtggttgcagacttaacaacggttgccctagccggccatagtagaggtggaaaagccgcatttgccctagctctaggaaaatctgaagtgaaatgtaaccttaagttttcagtactagtaggggtagatcctgtggaagggtctagcatgaggaaccgaactgagcctcacatccttacatacgtgccgcgctctttagacctatgtattccggtggcggttatagggaccgggcttggctcggagaggaggaagccctatatgccggcgtgtgctccagatgggctgaaccatgcagagttcttcaacgagtgcaagcccccatgtgcatattttgtggccaaagacttcggccacatggacatgttggttgatcgtcctggaggaattgatggggcaattgcaaattgtatgtgtaagaatggaacaagtccaagagatcttatgaggaggtcagtgggtggtattttggtagcttttttaagggcttatgtgggtggtgatcataaggatctagcagctattgttggtgatccaactcttgccccaacaactcttgatcctgtcaactttgttccagcttaaatattagtcgtactataatgtcttacattaatatcactaggatacgtattaataattttatcagttcaataaaaactctcatgattatgtaagctaattatgagagtgctgttgcatgttattattagttaaatatataaataaagtgtacaatagagtacacatctttatgtggaagataatatattcttcgtttgttggtgcaaaatgtttttcacttaaatgtgtttattcgtttgtttctttctagaaattatattgtgtggtactgatcaagatataatgttaacacacatcaaatatagaaatgtataaatattaggggcaatacatatatataaatattaggggcaatacacatcattagttttattggtttgggaatctttttaacgttttatttctatagtagggaagctccaaatgtccctacccataggaacattttttttggttcattgattaaaaatagaatggtgtttaagtaataagttgcatgatagtaatataaatggtggtgtatatgataatttatatattttatattattttaataatatatttttactgttaatatttcttttgcagcaataatttacattgattggtcaatatttttaaaatttatgtattataattttcctagactaaactcttgttaaggaatagcaaattatcaaccaatcacctactgtgattctctgcctaacaccctgtaccaacaacctattcaacaccagcacgtgctttatttctttatcaaggaatgctggcctgtacaaattttattatgctttatgattgtgtaatcattataaaatcaggattgttagaatatttcttctgtaattgtatccagctatatagagttgtttggctcttctctctatatcctactactatataaatgaaataccttgcagctatcaaattgagctgcatttattaaatactctccctgcctaaatttaaattattctatcttttggatatatacataagataaaaccttatttgcaatacagataaaatattgttagaaaataattacataatcaggacgaaactaaaacaaaaacaagagtattgagttttattattcgttattacacacaaaattatgtctcagcatcttgcccaatctaattctatctaaacataacttttggactttgttgaatcgcctttttgatgctgccccctctctccctggcttattttaggcaatttcaataattactcagggttcaataatttccaacattttcttggcaaatacgatatgtctcttttgcatttcactggtaactgtttcacttggagatatgatgttcttcttgaacgacttgattggggtattgctaatcaagcttggtcggatctctatcccactgctaacattgttcatattcccttttatgggtcggatcaccgggctactaatatgatctatcatacttatattattaccaataaaaataaccgcagattattctttgaaaaccactggctgttggagcttattttttcaatctcattaaaaaaagttggacatctaatgtgtattcgactacctctgctcctaatcttcattcctttctccccaagcaaaataactgtatcaattccatgaagacctaagtaaaaatagtttcaagcttcaaattaagggtaaatactattttgga

SEQ ID NO: 17189 - DNA, 4959 bp, Cannabis sativa
  modified_base (260)..(272): a, c, t, g, unknown or other
  modified_base (346)..(354): a, c, t, g, unknown or other
  modified_base (3603)..(3611): a, c, t, g, unknown or other
tattactattaattgtaatcaacattcttctttttcttagtttccatttttcttagtgtcttaatatttcactcttgtatttgtataaatagggggttcggccattggaataaataactcaaaaattatcattcactttcttttcatttactttatattattttatattatttataacagtatatattttattaagatgtaattatttattatatagaggtatactttgttaatacgggacttagaaaatgtataactannnnnnnnnnnnnggttattcttatttataactgacctaaatcgggacttgatttttttataataaattagaggttattcttgaatnnnnnnnnnttaaatagagattctactgtataaccattataaagagaatttaattgtgaattgttttaattaatatatagtcgtctctaagttccaccccacatgcaaacgcagaatgacagctcgttcaaatggtacgtactcgatccaatcatgaaaatcacttttaataactattgtttctcctctctatttgtccttttaatgcaaaccacaaaaaacagtcccaccatcggtccacctcccttcattctaaaacatataaatatataaatatttatatgatgacttctttccaatcttactatatgctttaatggactgttgctatatatgatttttacacgatatatagacttggacttttttatgaaaattataggtaccaaaacaaataagacttttgaaacttagtaattaatgtacaacgtttttctaagagaaatttatcgaatgtacgtatataaaattcacatttttatggatttcttttttataaatatatacaatgattttttttttttttacagatttttcactagtaatttttcaaaaaataacgttattagtattatcacgttgattttctatattgacgtaaaaataacattattttgagaataataaaaaaaaaaaaactgttcatatttttataaaaatatataaaaaatgtaaaaatatattattatagtgtaaatttttcgcttaaaaatttaagagtagactcctataaaattaatacgtggatttaataggtcaaagaccccaatacaaaataggtaaattcaagaggagactcctataaaattaattaagttatttttcatttagactaatgaggatttaggctaatttagtaaatttgtacatttttttgaaataggtcaaagacctcaatacgaaattggcaaatattggccgaatgggcccaaatagaagttagctgaagtttttgtttagctctaatatcatgtaagatattgaaaaagcaattagcgatagaatagttcataaatcttctatatatagtattcattttccacgtatgtgaattgaaatcttgagtacattaattaggttatataaatttgcataagaaatatatttaattacttcttaaacaagtggatacatgatatgaacattagatatattaatatagtagttgtttgtggcatactaatcaatagatcgcatattaattaatataaatatatctatatagatacactcattttgcatattacagcaactgacacagctgtgtgctatccattaagttatgaaagtgaggcgttagttattaatttaatgttattcatggaggtagaagagtagcattccttagtaatataagagaacattaatggcaatcaatataaataataaatatatcatatgatatgcctaacttcactcaacaataaaaaattaatgaaaacactagcaactaaaaatatatatacatgcatcaatttcatcaaattcaactatttttataccgagaaaaataattagaaaatcatgcatgaagataagatataaaatgtatatcatcataagccatggataaatatatagacagttcattattttcttagtatatataatacaatgtatcccacaaacacagtaataaatagcaagattttatttttctgctatgttattattattgttatatatataaatcatagctattagccaacacatgggcccacacaaaaaataacaaaaagagatgtattattatttattgggtacagagttgatatatgccaatgttcattatcatttatcaatattattacaaataaactatttatatatataaataaaaaaaattattttgtacatgttaccacaccttcatttccagccaaaatcaagtatttatctctcctagtcagcatggtgcattcaaatcccaaggtcttgcctaactcactctgcacctgattagccacatcatacctcgatttacttacatctcgacacgtggacagtccggatatcttgtcgagtaattggatggtgtagatgggtgtcgggttcatgagaaagaagattgggtccaaatacttgagccctcccgcagtcgtaccgtggaacatgctgacgtgggtggtcactgccacggggacgatctcgtcagcaatctccgagaaaagcggactaaatctaagaaggtatggttctctacatgtagttccctcgggacacaccacaaggtcccctttacttaacagcttttccattttctttgaatcttggtcacggtttctagttaatcggacggttttgattggtgctatgatctcggagaatctacttagactgtaggtgactgcagtgaggtcatttttcaaagtgaaagctatgtaaagtgggtctaccaacgttctgtggttgcacacgtagacaattcctttgtgcttagagctgggattgagtgggccctcagtattgggcttattagttgtcaagcgaagcccactaaaggcgaggataggggatgagatgtcgtagggtagtaacatggcaacgaagattctagcaacagcaagggtaaatccaattgggccccacattagggcttgtagggtagcaagtgggctgggccttagagccaatctaccgtcgtggaagataagagcctttgggtatctctctcttggtaagatttgccagttctttttgtccgtttcactcacgaagtaaacttcctgtaattattttaagcaaaaaaaaaaagctgaaattaaaacccaaaaggctcaaaaaataagtaaataaataaacaaaaagacagagaaccaactcaaaataaataaatgttttgtacatgagacacgaaatttaatgagttctgattaccatatggtacagtatacatacagggacgggacatataataaaggaagagttgaagagaatttaaatctattaatgtacgtaatgacagtacaactatatttctatttttttttccttgataactaactatatttctcctataatattttattcataatattgtgtcatatgaatttatgacacatgtaaatacactaaataattaatactgaaaagtttatttttagcacggtaaaaatttcaatgattacttaaaaggtgcgtagcttaataattattatacacgtgtatatatagagaaatgttaaaaggggttagtaatgcctattaacctcttatgtgttaatattgttattgtctaattaagtatcgggtctcatnnnnnnnnntataatagtttttagggagtatcgctaaccaatcacaacgcgacatgtcgagaaattgatgattgatataagtgaagatttgagaatatagttactggtaaatattaatttaatttaaaataattataaatttaaatatgtgaaagtgtacttaattatcaattaataaacataccttacaacttgaaagaagttgttggttggaaaaagtagtattgaagtcggtgatgcctatcatatcatgatgatcagaatcgacgtttgcgatcaaattctcctccaagatattggaaggaacatatttggtatcatcttccatgagtcccaaaaagtagccatggaagaccttgagctctcgacctacaacacaatcaacacccaaatagtctctcaagaagctctcaaccatgacaacagggaaattggtcaacgcaacagtccttgaccctttttgaagcaactcaaacatctcaaaccctacatcctctaaataaaacttaggcaacacagccgtacctgccctaaaactctctttcttgatcccaaaaaatgagatcatgaccatccatttcaacctcatctcttgacttaacaagcagataaaagggtatgaaagtaaaagaacaattgacctaaagagacctccagcttcgaaagccacaagcatgaagtatgggaataaagaagaagactttaacaaaactccttccatattgaaaatcatagttgagtttgcaagatctgacgatgatctatgagacagacaagtgtacttatggcatgttttaaagattgaagattggttaaatgaagggctgttgctcaaacttcttcgtaaggtttttagcttacgaaaaagaattcgatatatgaataaaaataatgtctttatgaaataagctttcgccattttttgttgagatgatgattttcagagcaagctagaattgtggagctgtaaaatatagagaaggtgatatcgaagtatagtttggtagtaaagagaatttagaagctattgactattgtatcgtacttatttatagatataattaggatttgaaatctcgtcacagagccctcaaagttggactttgttattcacttaagtgttgtacgcgttgacgtgtccatgcaacttcattccctggtccatataatctgtcggttatcacttttattttttatgtgcaattgccccacacacacagatatacatatatataaaaacccatgtaaataaaggattttttttatatagtgtattaaatatacattagttgagttacacatttggaaaccctccacaatattaactatcccaaaatattgtttgtattttttgatt

SEQ ID NO: 17190 - DNA, 2852 bp, Cannabis sativa
aattcaaatgaatccaatcaatatttcaactcaataataaagatgaggttccatcaattagtgacaatttatttctatacacattaatgtgagaggggttacaaaataatactctttacgtaccgatgcaaagtgattaacatcacggtgatgagcctcatcagctcggacaacgagaacgacatctctcaatgtggcgttggccgggagctgccagtagtcgatggcgatggccggagcaggaacgttttcgatattgcctttgtcaagttccttgaggaattcggtgtaggagtggattgcttcctcctcaaggtaaccaaccactcggtgggcgaattttggggaaatcaaataccccacgaagtaagcgttgaaaaagatgccttggacagtgaatacaagggctcgttcgtaccatttgggcttagctacttccatgaatgtcattagatgcatcctctcgttctcagcttcttccagcaacgttctaatccacccaccgctgtgctcgaatcgccttagcgatttgcagtgaagcagtgctcctcccaccatgcctggtactgctgccaccgtctccagcatcatggctcgacatccatatcgtctctgttcataccatgaaataaaataaacacatcaacactatatatttaataattttcaaacttgaatatgctttttttcctatgtaataagcaaaaatcgccccaatagcattatgctacctatataataatagtataataataagtgtaaccaacaaggtggacataccaaataattcaaataaaaatatttaataaaaaagaatacctggaagaaaatatcagttggccatcttagggatttgacagtccaatacgctattttgtctaaaaaagttgttggggcgtggtgcttcttcagatcaatggacagatctgatttgtacgtgtcccatggcttcataatcaacaaaattaaaaaaaaaatcaataccatacgtaccaccaaaattagcatccacaaattaaagattacaagatgacaaaaaatgaaattgaaagctaaaaaaattagtaacacaccctaaagcaggaccacttccactcggttccatcttccttggtaagccggctcggtggtacgccccaataactcacaatccccttctcgtccttattatcattacttacattggcagattccgaaacgacaccgtttttcacctgcttcaccttctcatcatgctctccattgccgacagcaaccgtactagcacccctagcggcggcgctactactgtagcctctctgaacccaataaacggcgctgctgtttttcgctgtccatgcggcggcaccagtcggcaccgacctgataaggcccttcatgacggccggctcattggccaccgcacgggcggtgcctgaggagaacaaccgagcgcttaccacggccagctgcctggtggcgccactgcgagtcaccgacatcatgatgatgataatgatgatcaagaactgtacaaatatttaattacaagaattttggagggtggttagtttttttttttttttttgtgtgttggaaagagaggagggcgttgagttttgtagttgttgactgttggtgtgttttggtttattatggagaagaagggtttaaatacaatggcaaattggcaagtgtaaaagttggcaactcaagtgggttggtcttaggcggtttgctaggctgacgctgacttgtgtggtgtttattagggacacttcaccacgcgcctttatttggacgattcatcccctcaatagggtcctgaagtttcctcgttgtcatgtgcattattaaatttcattgttcaatttttaattctaactttgttcaaattaaatatagaatatatattcttagaatgtatttttattttatttttggtatatatagggcttttgaatagatatttaattatctatcatacggtgtttttggttgtttttaattttcccttctctattttgacatattatatttggcattccatccctacaacacattttgattatcataggaaaaaaaaaaaaaactcgtttaaaaggagaattccatcaaataatgttttatttgtatgttaattgggatttttatctctaaattttaacatgtatcaaattattttttttaaaaaaaaaaattagtgttgaatttaatctaaagagcatgatttattagaagaacaattactaaattaataaaattaaattaaaattaaacaaaaatactttttttgaatggaatttttaataaaattctttaaacttaacaatattaaacaaaaaattttaatagcggaaaaaattaaaggcgtaatttaatattaaaatttagagaataaaattacttcttttatgatgatagatgttctgtttccagttgacacaattgcggcccaagaaaacagggaagggtactttggtaaattagactacatttaaaaaaggtaattcagaaagtagaaagacggttggacttgattttcttgggcagcaagtacatttgtgtggcgtggggttcaagtatatataacgtactgttttattataacaataaatgtatatatatacgtattgtttggttgtatttattatatcaattaattaatcagaataagttgtttcatgttatatactcacaactctcacatgcaaatgttatcgtagctaattgaccaaaagtcctactgttctgggccttctggtggccacgagagcagactataaaagaaacttttttatatttgaattttcaaatttttacctcttcaatctctttttcacggcattaaaattttgatattgtattcacgc

SEQ ID NO: 17191 - DNA, 3878 bp, Cannabis sativa
  modified_base (26)..(37): a, c, t, g, unknown or other
agggtccaatctgtaacttttgcaannnnnnnnnnnnaaaatggtatttacccaataaaaaatagaatagataagaacttctattttcttattaatattattttaaataaaatcacataaatttatctttaagagaacaaattacattgaaagactcattgattttctatagtttataattactttatttgctataaaaggaatcatttcatttgtgatcatacagacaagtccatcttatttcttacaaacaactcctccatctattccactaccacaacttaagcttggtagatctaaatcttccaatatattttcttctttactattaatacccttaaaccttgcaacaacacagtcagtagcaaacaagtttgaagttttgaactctttgtctcctcccattataggcattttggccccaacattaacaagattcttgtagtttggcctatatgtttggcccaacacaccagttactttgctacttaaagataaaaacttgaatccgaggtcgagatgggcaaaggtatcatctttcgttataccataattgtgaatccttgagtcctcttcagttataggcacaacctttgctgtgattctaaatattctttcgaacccaactatcacattgttagtgtcatcatctcttacaacagaaatgcttgggacattactcgattgccatcgagcacctttagattctgatagcgtaattggctcaccatcgaatgagatgaagagacgatcaactgagtcatcccatctatctgttttaagtgcaccaatgaataattggtgcttaccgaagagaattccaattgattgaacccaagtaaagtctcttttcatatttaagttatgtttgccaatgaagtgagcatttatatgaaggtttgaatcagataacaagcaaaagtcgtgatctttcttgccatggaagtagaaagtgatgccatctccacctatgaaacgaggatcttgacacactgctccaggttgatcacattctgtatttggacaaaagtatataatattatcaaatctggattatatatacaaaaaacggttttactttatgagaataacatgcattaattaaaagaattatttaattaaaaattttcttttgagagacttactacaaattggcttgcatgttacacattcgacctcacatccactagggcaagagttgggacatacatgttcagtattgtaacattgaggatagttcttgttcttacatctagccctcttaacaccatcaccatcagattgggttggaggaggataaggcgtatgaggtgttggtgatgatggagatgggttcgatggtgatggtgtggttggtgttgttggagatggagtagggttaggttgtgttggagaaggtgttgtcggtgagggtgttgttggactaggactagagggtgttgtagaaggtgatggtgttgggggtgttggataaggtgtcaacggtggtggagaaggtattgttggtgatggtgttggagaaggttttgttggtgatggggatggagttactggtggtgatggtgttgatggtttggggggtgttggataaggtgtcggagctgatggtgttgttggtgatggagtagtaggagatggtgctgggggttttggagaaggtgttgtgggggatggtgttgggggttttggagaaggtgttgtgggtgatggtgttgggggctttggtgaaggtgttataggttttggagtagaaggtgatggtgttggggggttttggagaaggtgttattggcgatggagtagtaggggatgttggaggataaggtatttctggggtagtggtcggaggtattggagtggatgatgaaggaatagtaggaggagtgggatatactggcggagagtttgtatcaggcagattagggcttgatgccccaacacatatcggtttgcaagaaacacactcaacagtgcactcgtcaggacaaaacttgggacaaacatgttccaaattataacaatgcttgtacatttttgtcatgcatcttgcatggcttgggttcttagcgattccaggaggtgttgcttccaccactacttggaatagcaccaagatgagaattgagattgtgagatgtgggctatgttgagccatatttgagacaactttctctatatgctttgctttggtcgtttgtgttagtgtgataattttcattaccgatcagtttccttttatttatagtcccaaaagggaatgtacctagctaagaggactctatgccttatagttcggatcataacaacacaaatactacaatataataaaaatggtttcacgtggttttctaagaaagtcaaaccatatatatatatcttgacctcaaataatatagattttgtttttcttgtatcatatattttagtttagagttacgttgttttagtcttaaattaattggtatcacttgggaaccaagactacacaaaatgatatcacttttagcaaatgctacgactcttctcttcattaacaaatgcatctaaattatatccaatttattgggaacataagctaacaaattaattatatatacgtacgttacttcaatgtatatatgccgattaagacaaccataatggaccttgacatggattgtgaattgtgatgatagaataatatattacattatacattctgtggtggttcttagttgaattattttctttaacattaatgcactcttatattatctagctatctcttcattatctgcgcttgaatatgttacgccaagtgttacctttacaattggtaatcattttttatggactagctagagctcatgatatgatatatggaaaatcacaaacaacttttagaaccaaaccaatgaatgataataagtattagagcatattaggcaccagtggtgcctagcaccttctcgacatgtcgcattgcgattgactagcgatactacctaaaaactattatattaaattatatgggacccgatacttagttagaccaatagcgatattaacacataggaaggtgctatgcaccactagtgccctttagcatttctctaagtattaatatagatggtaccaattatggctagatatatcctcactttccagtttccaattccgcaaattataatatatctctcaagtatattccgcaccaggtaatactcaatatcttcacacttaatgattggttagtgataatattctcttcaagttattttttttaagttatataggacccgatatttagttaaataaataattatatgatactaattaagaaagatactaaacaccaacaatatacatattagcaattctcatttatttaatatcaagatagatgttatttttgaatatgttacttatgtatgtacatataatttggttctttatatatttaaaagtaattgtgtaattattagaataataattacataatacagtaattacactttattttcaaatataaaatgtgtttggatgtgattgacaaaataatgtgttttagatatgcagatcccacatgagaaattgaagcaaacttaccattgcccatagtaatttggtcattaccatgatacggtgttgcagagtcaacgggattcaaatctagggcgaagtgatgagaagattcagagtccatataccaagcgagattagtgatggcattcgagaaagggggagtgggtaacaaaggagggttggatgaaggttgtgtgtgttggattatattttaccaggacctagatttactaacaagtatatttttaacatcctaaatatcaacttctaaaacgatgaaaattaaacatatgtaaagtatgagaaaccttaca

SEQ ID NO: 17192 - DNA, 4272 bp, Cannabis sativa
aaagcctagagaagctgtgataacctcaattcgtacaaaaccgctctttttgtcatttctgccattttccattggtctgcagagtgtagtatcttgaagactcaatgttccttgatgatgtctcagactatctacaattcttatgtgactaaggaaaccaaggcctaaagagatcccttctttttcagctagcttctggactatttccgggttgattagccctccatttctgtctttgagattgaaagccacagcagcacccctttcatatttgattttcggaccatagatgtgaacaagattggttctgctgccaccatctgaagcagttaattttagttgcagtagtgaagtgactagccaattgattaaaaaccgcagtctgagggtggttttattgagacccaacgaattaacgtgatcaagatgcctgcaggtaatctcgggttccctcctgtcccagtcttctccatcttcatactctccatcactgctgtactcatcatcatccaaactagctacagatacttctcctgtctgcacattatggctcggatgctcttgatggttttcttctgtgctaaatgacacccttcttcccctgcttgatacttcattttcctccacaccgaaaaatctacccccagcatatctggtattcccatctcttctccccaacaaccggaattcaccttctgtttctcttcttatggcactctcttttatctctgagcaaaaatgagaagttgttccattctctaagttatgatgcttataggaagaagttatatcattgagccgagaaccattcgtgatagaacttgacatacactcagtagaaagcgttccactttcttcaggttcttcttggatttctccactatgcagataaaccgaagacttcttaccatttggcaaagagggcattgcatctgcatattgttcttcttctgggacctccttgacgcgatccaattcctgtgaaacagataaaacagcagcatcgaatgataacacttgccggtcctcatgtgatccatctttatcatcatacaatgggctaccatatatcctggaagtaggtttaggggaaactcttttctgatttttcttcccagaaaaccaatatgggggcaatggagaggcaatcttatgtttgttcatctggccagcatgatcagaccccagtggactctgacccaaatcaatccaaaatgaattatcagatgactcatcttcactgaaaactgggctcttcattacctcaccaactgaaatactctcagcttcttcaaagatggtgcttgttacatctctctcagaacagttatcttccatttcagtctcaaacacatccctcacctgagcagatgtaaaagcgccagagaaggcaggcaactgcaatccagggcgagtttcggaggttttctcaccatttacagctacttcctcatcttcaattcccaccaatttgtccaaaccatctacagaatcactcagatacagtggatattcaggggtaatcttcaccattccagaccctgtacacccagattgattatgaaggcttcccataacagatttcttgatcagaaggcatccgaatccagttgggtcaaatccaaaaaccctgtaaaatgaagtgataatgaaatctggccgaaacaaggataacccaagcgaatccatgtccttaggccccaatgagccagcatcaagcaaaacatgccagttattctgttgagctaatgccatccattggtaggaatacttagcccctgttactctagattgaactgggaacacaaaaaggccagtagcagaatccttcttcctcttcttcttgtttgaaatttgctttctcaaatcagttgagcagagcttcaaggttggccatttaaaccaagcactgtacactttagcacctttctctctagcactctgagccatccaattcacagactgactctcataatcaaacatagtcaacagttttttatttgtatgaaaagggtatgattcagccaacaacttaaaagcagaccctctactcactgtaaacacaaggccatactcattctcaggaatattcaaataatccataatcctcattttaatatcatgttccacagtccctttctcagcaccaccataaagagcatgattactcaagttagcagttatctcagacaagctaaatgtagaagattcccaataatgaattgtttgaagataagagaaaagcccaaatccacaataatcaaggcatacctttggggacaagtgagagtactcgtttaacctcagctgatcaatcttttccgaagattggtacttgggatacatagtaaggaatttgttgaaagattcatgaaactcaggaataccatcttcagactcaaaggttctgtcagcagcaagtgcagtggctcgaagaaactccttctgggcgttgagtctagcaagtgaccgtgaccttccaagactctcgtcctggttagccatggattcagactcgatgtcttgggattttgacaaagacccatcttcagatgcttcctcaagagcttccctgagcttgttctcttgaagttttctgagaactgattgatttttcttcacttcactcgttgattcggacgacccatctctctttttactgctctttttgtccataagcagagcagcgcagtgagatatgggcttccatagtgaaagatgcatcgaaaacaatatatataaatatatattcaatcttactgaacaccacaaagaaaaataggctcaggcttagcccatcaaaagaaaaaacccaccagaaatttcagcttcaaactccagattcttcagtaaaaagtgtacatcgatacagatcaaagaatacccagatacagatttcttcaacacttcaaacgaaagtgaagaagaatctcaaatttcggccacaaacgcagaaaacccaagtctagaaaaccaggtcaaaacccaatttccatggaagaagatgaaaaaaaaaatcaaagaaagagagaagtgagaaactaaatggtcaaaccctagaatccagatccccaaattttcacagaaccccacttcagtgatgaacccaataatgtatttaaacaaaataaattttcccagatgcaaaaaatatgagaagataaataaaaatcccacctttatttttcctcctaagaattaaagactccaacaacctgaaaaggaacagagctcacaagacaccacctctaattctctctctcccaaaaataaaagtctcatgtatgtactactgtctctcactaaaccaaaaaaaaaaaaaaaaaagcacaaacccaactcatcaatggctcctcaacttacttttcaacaatggtaaatacaaaaaggaaaatcatacaagttttgatttttgataaaatatgatagataaagataactcctttctttctctctctctcctcctctcttttgacccctacatttatctctaattttctctttctctctctaaaatctctacccactaaccccttccttaacagtataacaaaggacattgacttttcataaccaaatgtaaataagtaaacgattcctttgtttttgttgttcccttttaatcaaagatttaatttttattattttttgggttttgttttctttcacacattttcaaattttataaattaaaaaaaaaaaatcaggttggttttttatttttggttgtggtcgtggtgggacccacaattagccattttctttccatagtcatggctgaaagtcaaaccatcagctggctttgtataaaagctgatttctgtccaactaagccaatatatacaataaacaatacaaatacataaattcttaattgtaacttgtttttgttttctaataaatttatattaattattgtcattttgatttagggtgtttattaatctactaaatgtccatgcattatatttgattaagaaactttattaacacttcatatacacataaattatattaacagaaacaagaagaagtgaagagaaagattttattagatttaataattaataaccttgtaacttgttgttaccttgttgctatgaatcatttaatacaaaaattaaaattgtttttaataagcaaccttagatatatattcattgtcttatcttttaaataaagtaaaaaaaaaaatgtttttgaattaaagtggtgtaagttcattacaatacaaataaagttggtaattaattctttgttttattatagtgt

SEQ ID NO: 17193 - DNA, 5349 bp, Cannabis sativa
tttagacacttacatgacttcaatactgctatgcttgcgaaacaaggttggcatcttttatgcaaccccgattctcttgctgccaaagtttataaagccaaatactttccgcatattgactttctttcagctgaacttggtaataatccaagctttgtttggcgtagtatttggggtgctcaagaagtggttcgtctaggagctactcgggttattggtgatggcactaacactagcattgtgggcttcccttggttgcagaatccccacaatagattcatcacatcaaaccatcctggactgcaaaataatgtagtcagctctatgatgaaaactgatgcccgtgaatgggatatgaggtggtgtcgaacttgtttccatctcatgaagctcatattattctcagaattccattgacaaacaccacatggcctgatttttggtcttggatagccgaccacagaggcattttcaccgtccaaagcgcctacaacctgctgcaatgtgaaaaaccagcaactccaacacaaaataactctggtttttggtgaaaattctggcatttaaagatcccacctaaagtgttaaattttatatggcgtactattactaattccctaccaatatgtgtaaaccttgtaacaaaacatgtgcctatctctgtcgaatgctccatatgtaatgcacaccctgagactgcaatccatgcccttttacactgcacttttgcaaattcctgctggattttgttcaacatttcgatcaacacagttgcttcatctacttttggcagctagtttgaaaatcggtagcaaactagtgatatggatcaagtttgtagggttgctatgctatgttgggctatatggaaatctcaaaatcataccgtttggaacaagcgcaaatctactgcaagtgatgttctagcctctgcttctatcactcttgatcactggcgaaaagctcaggataaatttactctatcatctctatctctcaataatagtgatgatggagccgagctttggactaaacccactgaaaaccacatcaagattaatatagatgcttcactttttcatcatgaaaatccctatggtttcagaattgtagtgagagacaatttgggcaagtttattgaagctaaaacatgttacaaatttggcacttaatctggtgaggttgtggaagctttggggatcaaggaagctcttagttggattaagagcaacaattagcaaaaagtactattagtacctaataacaatgctcttcatcaaaacataataccaaataagcatattcctctaaaactaaatcagaattaaaataagattagtcatcaaaccttagttaaacatccttactctttttacttacatagtcatgaaagttgtcgtttttgttcttttgataaaatgaaagttgtcgttacaacaaaagaaggcccaaaagtaaaaggcccagcttaagttgagggccctctctcgtggtatgatccgaaaactactccacgtcagcaaaaagtcaaacagtaaagtcaaaggaatgtaacgtggccaattctaattggctgagctggcgtggtcgaagaataacagtggagaaaacacaaattggagggagtaagatgtagaagaagaagaaggagaagacgatggtgaggtgggaatccaaatgggttgctcgtttcttcttcttattcctctcttcactgcttattctccaatacccttctcttgtttcttcgattcaggtatgttttgatttattgctttgaacaattcaatctgggtttgtttcgatttctctgttctgttctgggtttattcttttgttgagtataacaataataataattcttagtatttttaatcttataattccataaaattcggggaatggctaagatctttgtgcattagacatgggtttcttaataggtaaggtgatagttaataagctcaaattgctacttcaagttgatatttatgtttcaagatttgctcatatgaattttggtagtgaagatcatttattcatgtattagttatcactattctgtatggtttttgctcaaatgcttactaatttcacatacacattgtggtgagttggtggttattaattgataaatataccattgttgattactatttccctctatttgtttaagggttcctccttgctgggttatttagattctaattgattctatctgtgaacttgtgctttccaagttattcaattctatcagtttatggactctttttttttgtcacagggtgatgagggatctgctacttcacggtaatttggttaaaatattgttttgaataaagatgtaatctgacattggatttggtattagtagttgtaattttagttatttgaaatttaaaacttgggcaaaccaaatatacgatctttgtaattaataggattagggaaccagaatcgttggttgagtgttgaataggattgtggacttaattcatagaattatgatctttgtgaattgtctcatcaatgtttgctttggatttatgtttttaattttcagaaatttagtggaagagattgaagatgctgttgaggtacattgttcgagagaaaggagtagggcagcatcgaaaataattgaggaggtattagaatagtctgtgtaccatccatttttcgaactaggctgcttggcttgttaacttgtcgataagtttatttcatcttttgttgcagtatttgattccatttattgagaaacatcagtatcagattccaaaaagctgcaggctgcacccagacaatgatctgtttagagatcaggagcaacacaagatccgtattgatgtagatgaatggaaatgtggatactgcagaaagagtttttatgaggaaagatatattgataagcattttgaacagagacataacaatttgcttaatgtggtaagttgtaaattcccccaagtcacccttttttcttaccataaattattcaagctgtgctcagttatgttatcttgcacaatttttttgctttgtcttcaatatttcatgcatatatagccaattactttatgttttaagtataaaatcagaatggataacataaaacatcagagtttatggaataaccataaccatagcatcaacatataccgaaatttgtatgtgcacattcgatgaacaagaagcagttagattaaaccataaccatctcagatgttagaatatactagtaaaaattctggtataaacatggcattttttcgttgatcaaagtcataaaagattttcctagattttaatctatatttgctcttcttttaacgaagttttcagtccatttaagttctcagctgtgtgtgtgtattagtttcttttcccattctctgttgggaaccatgatcttgcgattcggtaacattttattcactgtgcttcatgcagagtcacggcaagtgcttggcagatgtatgtggagcattgcattgtgaccaccatattggtttgccacaaaagaccaagtgcaatcctgctgcttctgcaaggaataaacatttgtgtgaggtggtgtttggttctaacaaatttattacataaatcttttaaacactcgttattaataaagtttagcttatcaattttatgcagagcattgctgatagttgtttcccagttagcaaaggcccaacatcaagtcgtgttcatggtatgtttttcttcctcatacttgcaaatgttttaatgaaattgtagattaattttcagcttcttatgatactgctttggatcattgattgatttcacagaattcttcttacgccaattctgtgatgctcacacttgcactggaaaatcgaaacctttctctcgtggtcgcaaggtaagtttacagtctaaggaccttaatgggattcaattattacattgaagatagcagttagttctcattttttttcaatttttcttcctcctgtaacaatgtatgctgctcatctattatgtatgtacagaaaagaatgaacatactctacatcgtcatctccgttttgacaatgttgcttcttctgtttttctacaccttcatttacttgtaccagaggtatctatctatctatctatctattcaatgtcctagtttgttaaaccattttaagtacatttctaaaggtgggtttttccaatttttcggcagaggggtgaaatcgggaacacaaaatctgagacgcgtatcgcagagtggaagaaagaaaaaaccctcttagctggtactctcctgcattgcaacaaggatagaacaaaacaattatttgtattcctgcttcagttctgtttttcgtttttctttgataagattattcctgcttcaaatctatactagagaagtgagacaagagagaagattgttttgtaccaataaaagatcatattgatattggtactcgtactcttcttcttcttcttccatttttcattgtaacataaacctttgaaatgagtagtagtcaacaaagaaagagccatttttttcaaactagaattcttgcctaactctataatatttgaggatcagaaaactataacaattgttatgtaagtatttgggaaggactccaatctcaaatcttgccaaagcgaaccaacctctcatgttgattgaaacttttgatgaaaattcataaaaagcaacttagtattcattttcttctatttactatttacttgcactgtgtatctatactatactatatgtatataatttaattcttttttcatgatttctaattctaatgaaagctcataataaacagttaaacacagtacaacaaagctttgtgtagttgcattaaagagtagacaaaatgcttggtgtttttttttggttagatagtaaatagctatctataattcttttatgaaaaaatttagaatattgttattggtaatttaaagtgtataatactacaattataaatggaatcttatattactttttaaaataaaataaaaaaaaaaatatgtttatttttgttaaatgaatttcatctaatattataagacacaaaatagctgcaaatatgtctgatttgattttgaattacatttgtacgttattatattagattaataaatgactttttgattaaacaaaattggattaatttaaacaaactttaaaaatatacatatatgtatactatattttcttttaaattctattactattagaattgagaatgtactatatattttttaggtggatagtaggcttatacatcatactcctccacacttgaaacactatactctctctcaaactctattaattgaacaaacaaacaa

SEQ ID NO: 17194 - DNA, 3242 bp, Cannabis sativa
ttgccccaagcgcaaagatgcttattacatgcctcaactcacttcatttatacccttatttttccatacacctcctctttttcttccatgtgggacttttttctcctaaatcccaatactctttcttcttcctataatataccaatcctaaagtttctgtttattcaattgagttttaagttctccttgttagtttttttttaataataataaattgggttagttaatcacaataaattgaatgaaaaaaaaaatgaacagaaggatttgtttgtttagttttgatccaaaaaaattggttgtctaatcaaaagaaacataatttaatttattaatcacttcaaagaaggtgaccaaacaaagtagaagctttacattaaaaagaaaacaaacacttttacgaagaaacgtttactcaagtccaaacaaaccaaagcaaaggcatttgtgtctcttcaaatcgagaaatggggctttagattgagcattattattaagtattagtagtgcccaacacttattcttcttggtttgtaatattatgtttaaacattattcttcttctaatttatatgtaacagtataattattaagatatctatacaaaaaaagaaaagaagattagatttaattaagactatttatgtgtgtttggcaactgcacggtggccattgccaaggcggccaattgggtacgtaataacacagcaacttcctcacctcataatcctcactcaatcaatatatatttatatttttatatagtgttatagataagataagatagatttacatatacaattctacctcattacccaaagtagacaaaaatcatgaaaacaaacataatagtggttgaacaactcattacattatttaaaacttcttttcttttttagtacttatcaaacattttattttcttccaaaattcaattatgcccaattatatttgtgtatatttttaaaccattttttaagttgtaaattatatatattattaaattgtttaaagaaatgaaatattaccattcctggtaggatgtaggctaagtactgttgggcataaacaagttagatttgtgcttagagcttatcttaggggcaaaatttttttttctttttttaaaattatacatttttttttaaataagagttggattttttctatggcccactaaatttcatagccgaccctagtaaaaagtgtgtgtttttatgttaaatttagttcaaaaaatgaacaaaatttatatttaatttaatttaatttctacatatgtattctaaatcattaagtttaaattaattcaaaaacccaacaaaatgaattaattcttattgaatacatatatatatatatataaaaaaaaaactattaaataagttaagaaaaaaaaaagctttcaatattaatatgatcattaactagtggcaaaaatataatatttattgtatatcaaatttgactatgtatcaattttgacacatcttttgcaacatcattaaagctatcttttttaatatgtgcaaagattatatataaaaaatgactacaaatttgactcattctatatgtttagccaaatttattacaattttaaagttaaattcagcatacattttacaatatcattaaatgtatgcaaaggacaataaattacttttataaatcgtcaaaactattgtgttaattattattattatacattagacaaattataattaaaacatttgtaacctaatattattgtaatctgatcaaatagatttatgcatagcttacataatatcgatagaggtaataattcgtatttttaagtcatgttcgtgttgtgttaagactcatatattgtataaccttttatataatcgtatcaaaaaataaaactcaaacacaactctatttataaacagactgatacaacacgattcgtgtatatgcttatgacattttcaacgtgtttataatccatttataatctatcaaagcactaacataactttaagtaattcattaacaggagcaatttcacattaaccgtactaatctaaacatgaatcatatatcaaacaagttagacgagttaaactcgaatacgatctgagcccattcaagataaatctaaacccactaacaaatttcaaatcatgttatcgtgtctcactcgataaatcgagttacaacacaacaaaatgtggggcccaccaaacagtaaaggcccataggcaaaacatcagagtccataattatccaacaaaagtggcccacaacatggcccaatatgagaaaaatcatatccactgcccacataaaacctattttatataattattaattattacacatatttaataagctttaccatcaccctatctactaccaccgccgaacattttgccgcattcgactttatcccattcctaaatcccgtagttatcgtccttcctttattataaaacaacggccaagatcatctcaaacgacacgtgtcacaaccataaccattgaaagaactgtcctcttgttcagaaaataaaagagaagattccatagaatattccctaataaggactggtcatatttatgtcgttattataataaataaatttaattatttaaattattaattatttttcactcctttttatattaaatttcattttctcccaatccaatcatctttctcttttccttttttataatatttcaatttcattctcagaattttctctccaaaaaaaaaaaatgtgtagccaaatatccgaatctgaacaagaacaactcctggaaaagcttgaggttttcaagatcaaaggcaaggataaacaaggtcgcaagatccttcgtataatcggaaaattttttccaggtacgtattgattcattttttcaattttttttgctgttcttgttgtttgagtattgaaatgtttggatcgttcgttcgttgttttatgtagctcggattttgagtgttgatgttctgagaaagtatttggaggagaagattttcccgcgattggggaaaaggaaattctcggtgttgtacgtacatactggagttcaacgaagcgagaattttcctggaatctctgctttgcgatcgatctatgaagcgattccgatgaacgttaaggagaatcttgaagctgtgtatttcgttcatcctggtttacagtctcggctttttctcgctacgtttgggcgtttactgttcaccggaggagggtaagacaaac

SEQ ID NO: 17195 - DNA, 5862 bp, Cannabis sativa
  modified_base (5835)..(5837): a, c, t, g, unknown or other
atatttttccatattatctttaagatgtttagttgttgaacattgatttttagttcaatgatatattcattactttccaaaaaaaattatatatttaaaatttctactaaaaatgggtatagatcaaaaatcattagaagtgggtattcttatcaaacgggcctaaaaaagcccatgtagtaatacgcagagaaagaaagcttctcaaaaacgcagcgttttgttcatcgttgcagagaagccaatagtatccaaattcgaactccacacagtaaagaaaacttgtctttaccttcttcttcatcaaatccatctgaaactgaaccagaatttcttctctccattctcgattcccgattccctaccatttctctctacgccgttatctacgctgtcacctaagctttactgaactacggcaatggcagcgatcgaggtttcgttgtgatttgacggtgagaaatgaaaaggaagtgtagggtttggtggcctaaggagctttccctaaacacaacttcgtcctctactaaatccttcttgttcggctggtttgtttcttcttcttgtaattatctcgacgttgtagtggcttttgcgaccagtgatgcttcgctttctggtttggaatctggattcgaggtattaaattcgtggaaatggctaattatatgctttttcttttcaataaatttgagactcaaatgactttgttccatgtgtttgataatttattgaattcgttttgttttcttttagttttcctttttggtaaatgtaagcataatcacaatttgttacatgattcatgttgtattattattaacattcgaatcagattatatgacattaagtgaaaatgtacatgttcatttgattaatctagttttctaagaaaccccaagaatagaatttgggtcaagcttaagggtctcttgaaaaagagagtggattatagtttagctttgattgacatatttactgtgtgctgtttttgtggtactgatgactatttcctatcagggaattctacatgaaacaaacgaaaaaatgccaatgtcattacaggataaatcagagctctctttattaggtcattttgctgttggtgttagcaacaatggtgaattgtcaagagttggaatgggagaagatgatgagttgaaatctggtccaggtttcaatggaaataactctggacaatggtcttgcgagtgtcataaacttgatcggttagtagaacgagatagaccgatttctaagggaaatagttggatccaggttgttgcttattcgtgtgaaaagtttggaagagacatctttcgcattcctaaattgcatcacattcattggaatggtcagatagtatcgcattgtgatgttcacgtatgtaagtcatggattcttctgaagatctttttctttgacaatactccttcatagaaataattgtttgttgttgttgttgaccggttgctaacacagttatttttgccttgaacaaatccagtatatattttatgagacaccagcatatggatctcaccatttctcgtcacattcttggagttcatacgaacaagtgaaagctcctctcagaaagcccaaatgggttgaaaaacttcaccagaagcagccactttgtgacttggtaaacaaccttttaaattgttattttttgggcagttcaagacctacatttgtcatttaatattcctttttatttcaaattcaggacactaccattctggccattaattgtgccacttctgctaaggtcttattcaggagacatttggatgcgaagagatctgtttcctggtattattcccttctcatgtttttcttaatgaatgtcacctttctgtcttcccgttcatatcctgtcaatctacgagtgatgcctacatattgtgtcattttcaggaattttgcattcttgtggcatctatttgctatttctgtggcttcagtgtccactgtactttatatcattcttcagtccctttacaggctcttgagttacacatcaagctcatggatatacattacatcaaccaaggtattccacacagctgggttaaatattagaattcgatgctctcagatcttgtactggccaatcttccttcaagataggggcattaggtaataacttctatcatttaatgtgtactttgatatatcgagatcggatgccatgttaattgactgatttttgatgaaattagaaacttgaattccagatctttatcattttatgaagcatgtgcataagtattgttcttgacgaaaactcgtatgcttattgttttgttgatgaattttcatttcttgattttcatcaaacaaggcttgtggctatttgctatgaaagtgctggagggaaaataataaagattactaggaagtcttttgactactctatgctttcactttaattaattttatttttatcatttcaacgcattgactaactacttcttttctattaatcaaggtctttatcatgtgtggaatatgctgagaaagctgctttgcagaggcattcattgtggtcaagtttagccaccgatatttttctcggaaatttgattggttttgtgctgctgtttcatgccaaatcagcaagcttctgcatacttaattttgcagatgatattacgaacaacttattacgttcaggttgtgtgtggttgatgggggtccctgcaggtttcaagttaaacacagaacttgcagcagtacttggcatgatttcacttaatgcagtgcagatttggtcaactctttggatcttcatgggttttgatgtcactttcttaattaaagtccttggtatcttgagtatcatttttggtgtgactttacctgctgctttgatcatagatttgattactctagcaacattacatgtctcaactatccattgcgtgatctcacttttgtattcaactcagatacaagcaatagcatctttatggcgccttttcaggtactttcttgtcacaccctttcttgatataaccatatctttcttaggcacaattaactaagttgttctttctgttttccaggggtcaaaaatggaatcctctccgaatgagattagatagctataactacactgtgaagcagcacattgttggatcgcttctgtttacaccactcctgcttttactgccgacaactactgttttctatatcttctttagcattttggacacaaccattagccttgtatgtatgctcattggagtcgctatttcagttattcatgctacgccatatgtcaaagttttccttcggttggttcagccaagaaggtttccttctggcatatggtttgatatcgtatcatgtcagtgcgataccagtgatccttcagaaagggtcgacttttcctccgagaacttgcagatgaaaaaggacatcaccaaggagaaaacttcgtctatgatttcatttctccacagcaacttcatgactctaggtaagaattttcttttcacccttctgtttttttggaagagagtttattatctttcgtaatagtttgttcatagtttattatctcattctctaccacattgcagcccacctcttcaagcttttaatgggacttttattatatatttcaggacaagtaatcttgcctcactacaaaaatattttttctggcatttctcgatcgtctattgccgcttcagcgtacgggatcctcactgggaaaaggtaactcgacattttctgcttaatttttactgtcttgtgagttctgactctaaatttttccatagtcaagtagaaaattttatgattgaactttttatttttatttatagaatgggatctaccatgttggctgatcttccttcaccaatgccatggatgttcatcccctacaagcagtattggttcctttgtcgcgattcgattttggcaatgtcgtcgtagacatgatctaaccgaaatttttgcttaaatctaaccattctcatttggtaaatcttccccactttttgttttctttggctgtgattcctaccattcagttttgaagtctatttattataggtgtgaggctgtgtagataatataatttgttctttctacagagtgatataacaaagaaaacttctgaggttttattattttgcttatatttttttggatgattctaatttgtaatgttaagattttgatttcatcttgaatttgagtgtaattactctctacacaaatgaccaaaaaaaaagtgtgctattaagaatgtcacctctagggatgtgtgagagggcacagggctaaaatgaattttagttttattttatttttgtcaaagaattttaatatttcaatttatgtcaactatttttaaagtttaagcatatctaccaactttaatcaaattttattataactattatacacaatgtcaagaaaattcattaatataatatctatctattttagcatattaatttgatacatgtatagagttgaaaaatttatcatacttatgatttgatgttcaattatgttgtatttatatttcgagcaattaatataggagttcaagaaggaatatatgccccaataatacaataactaacaaaatgaatacaagaaagtatacatacaacgccaaacttaaagagttcaaaaccaaataatatgtgatcaagaatttcttaagtagatgtgttattggcgaagagaagaaagccaaacttatcgcgggattaaaacgcattcaacttagtttgcacaagagatgcaagttgaaaattttacttatgaggaggtaaatctttcactcatacttcactcttttggcgatcaacgagaaaggtttaatttattctaatgatttacgaggtagtttgcattcagtatacatcaatcattcggtgtattcttcgaggagtaaaatattaagatgaagttgctcggtgaaaatgtaataaagatccagatcataaaataaagattatttattttaaatgttggttgtaaattgtttccacccatttgtgaataaatgaaacgcgaggaatgttcacgttcataaacagttacatagataaaatcaaataactgctatccgattcttataaatagcaagttcatagaggtaaaagatacgactaaatttcagacttaaagaacttctaccaatttgtatctctattcataacaatcttagacataacacaaactcatgaaatgtgtaaccttaaactacaaaactacattaaaaattatgtcttttattcaatattagaattcattgctttattctagattatatacctttaaaggattaattatctagcattaattataggtctaagtcaaaaaaaattattgatgtcaatctaattttttttttgggcatattaatgatatgtacatagttgtaaatttgcaaaggtcgtacttattataatattcaattatgtgtccaatgtcaagaaaatatcttgatgccaatgtaattttttggcatattgctttgattcatgtacaaatggcaaaatttatgatactcattttgtaagatgatttaaataactacaacatacatagtcataaaaaaatataatttttcttctaaaccattaccactactgtattgtgtcttaaacttttcacgttgttagaatcactctctcaaactactgttgttgagttttagtccttctgttactttttcgacgaaatagttcgagagataatttgggcacaatatagtagcgataataattagttttggagaaaaaaaaggtttttattataaaataaaataatataatataaagtagatgagaagannnaagaagaagatgaagagagaaagag

SEQ ID NO: 17196 - DNA, 9691 bp, Cannabis sativa
  modified_base (296)..(296): a, c, t, g, unknown or other
  modified_base (358)..(359): a, c, t, g, unknown or other
  modified_base (4371)..(4371): a, c, t, g, unknown or other
  modified_base (4956)..(4961): a, c, t, g, unknown or other
  modified_base (5977)..(5991): a, c, t, g, unknown or other
agggtatatgcaagtatccccaagttcctcctgcgaaaacatagaaatcgattctctgctctgcgagctggtccagttgacccaacagccttgataaactgatacagactcgcatgtcttattttatcagctcattacgagatgtctgtataagcgacttcaagaggacacgaagatcctagactcgactagtctcgaatgcatttcaagcatgcgagcttatgtaagaatgtgaacatccaactcgcactatagaagtcacatacgttgctgtatttagtgaattaaactggaanctgttcttcatttattatgtttactttttttagtttagttattgtaattcaatgtacaaacnnattgataatgaattcaatctttgtgtaaatgaatggacacttgctttgcatataaaggggtgatccaccacggaatagacaaggcagaaatccttgcagcagtggactaagcagaccgtgatctgactgaaccactatattctcttgtgttttttatatttccagtttttattaagtattttgtgtccataatttgaatactctccattttgggttgagcattcgcataaattctccatattattattatcataatttatttttggtgttgtaaaaattccatcaacaataggatgttagccaccttccaacaggtgggagccatcaccgatgcctatttgttattaaacgtccccacgtaattacgggcccaatgcacagtaagcacaggagtcggttcaatgttgttatggaccattttattaaatctgaaccaaatcctctaaaaagtcaccataaccaattcaatcatctcctttgaaagggaatcaataaacccatgaatgaattcaagaaaatccacacaatgaacaagaggatcccttcacacaaactcacagagtttcctgcactgtaacaatgtagtacacccccaaagagcatgatgagtagtttcaccttccaacccacacaaaggacataacacattagataatagaccacgacgtgttaaattaattttagtgggaatccaattgtgtaacacttgtcgagtagagagtctaatgtttggaggaagattaagagaccaaatctttttccaccaaccaaatgcgctactagatagagaagcacgaggatgaaccagattacaaaggccaagtcaataaccactctcaacataataccaacctgaattctcaaagttctaaattattttatcagccacatcatgtgaggaccaatggatagaaatcatagattcagcttcatgaggtaagaaaatggatcgaattaacacattatcccaaacacccaagtctttccttaacacagacaccttactagatccatcaatttgacaaggagcagacaaaatgaaaggcaaaactgaaggaatccaattgccagaataaatagcaatgtccttcccattccccacacgccaaacagccctagagtcaaaatattctttctcccataagatgtttttcaacacaaaagagccactctttgatttcttgatctcggcaaaggaccactttcgaaaatacagaccctttaacatagaaccagccaaagaatcaggaaaattgtaaatgtgagaagcttgcttagccaagagagcctgattaaataagcgaaggtccttgaatcccatacctccatcatccttatgtaaataaagtgtgtcccaagtgcaccatgcatcttttattttttgcatcattaccaccccaccaaaagcgagcacacatatgatggaattttgtgataaatgtctttggaagcttaaaaagattcatagaataagtaggagtggacttgataactgctttgatgagaatctctcgtcccgccatagagatcaatttcaatttccacccattaagcttctcaaaatcctatcccgaatagaattaaacaaccctgtctcgttgtctcccgcaaaacaaggaagacttaaataatgacattggggctaaaacacactacaaacttgtcaaaatttactaactatcttgaggccgctccatagcaactcaaaagttgtcgaaatctcacacaacacacatcaaaagccttgaaaaagaacaaactatcatcagtaaatagcaagtgcaaaataacaaggccaccccgaccacaagaaacacatacaataatttattatcacaatcccttctaaccaatctcgaaaggtcctcagcataaagtaaaaaaagataaggagacatgggatcaccttgtctaagcccacgttgaggagtgatagtgtaacagcctaatccataggaacggcacgcgtgtgatttaaaaactagtttaatacttatagactaattaattattaaaaagctgtgataatattaaaaacttgactaaagtaaaatactaaaaacgaacatcataataacattaaaaatgtattctggggatccctattataaaagttttataaaaggactatatacgacaacaattcaaaaaacaaaattaagatacacagcagatacaacccaaaacaactcctggaaacttaacacacatgttgttgaggttaatatgtacattgttggagaagactgtcatctcatggttgctctaacatttccttgtccttacctgcactaaagagcacccgtgaatcatatagactcaacaagaaatgtaacaaagaagaatacatcgaattactaattatatatttcactattatgaaatgataaaacaaaaacattcaagattgggtaatataaccagccatatgcatggaaatagaaatgatcatatattgtattgcctaattaggcaagcccatgtcataatttaacatcatatataatatcactacgctacctaattaggtgagtctgtgccacaacctggcaccaatatatcgcattgcctaattagacgagctcgtaccatagcctggtactcacatgtcactgctgcatgtacctaatcaaatatgccaccaagaggaaacccaacaacggttttaatctatgccataacccgtcattctcatatcattatcgcccataccaaataatgtatcgccaacaagtatattgtatcacctaatcagctgagcccgtgtggaacttgacggggaggtcagaaatgtcacaacaataaaagatgaattaaattagaattataccagactaatttagaattttaagttgtcggtttgacgaattatgtataattaccaaaatatccctagggttaattttaggtttaagatttcctacaatggtaaaaaggtcattttagggttaaatattggctttgtcttatatggtttgttggctgggattaagattgatttaatgaaataaaaataagtaaataataaaaacaataaaaggtttggaattaagataggaagaagttatccaacaccttctttctttttccttcttgcccgaaccctaggagtggctgcaaccaaggaatttcttcttcaattgctctttttccagctggttcaccaaggcttagaggctgtcaaggttttgatgtaagtgttctttgtgtttgttgaatgatatcttaagttttaggttagtttgggttaaagttttcgaaatttggggctgtgatgctaaattgaaattgtagcaagtttttaggcttgtttgagagcttgtttgagttggttatggttagagataagggttgtttaacttgatttgagttagatgtggttttatgaggattatttcacttaagtatgcaagtttgagtaaatgaataaattgtgattaaatgatgtctgggataggttgtatttgtgatattatactgaactggagcagttgggcaggtatggctagttttggttcaaatttggggaagaaaactcttgaaatttggtcttccaaaactcgtctagcggttggttctggtgtgacagaatcggttgacaggttgtactgcaggggaaaatttttgacttttcttaaggtttagttttggctcagggttgtgcctagcatctattatggattacttaaatattagatggcctattttagggtattggggattgggaaattgtctggttatgggaattagggttattcccgaaattattgattaaggtatttattgaatgttattgtcgtgacataggacccgggatcgtcaagctttgtttatccacttaggccgacatgcacgcttaatctctggactgaggtaagaaaagtactatgtatcgtttgtggttaacaattataaatacgatagtctcgattctgatcgagatcccaatattgtatgttgtgactcgattatgatcgaggaaagatgctatgaaacgattattatcgttgtnactcgattatgatcgagggaaatgttaagaaacaattattatcattgtcactcaattatgatcgagggagatgttatgaaacgattattatcgttgtgactcgattatgatcgagtaaaagatacggtcgttaccattatgagtaattactcgttgaaactgcggataggtttcttacttatcgttcgcgttatcgggcaacgatagtgacatatatagctcgttgataacgagtggtaagggtgctttatgaagcactgagtttaggtaattatggtattgtgtaagtagagtgcttaatgaagcactaaaattatgtgattacaatgatgtatgactattaagctttacaaagcactgagattatatagctatggattgattgaatgtctatttagtgaaaaggtaaaattgttaattatgagttgctatgattattcatataatgtgtcatgaatgtgtttgcatagatgtactgatatgtatatacatgctaaatatgtaatgatccactgatatgtatattatgttgtaaatactagtacttactatactttttgtctagtagcttttcttgctgagtcnnnnnnactcacgggtgcttcatggtgcaggtaagaagaatagcagttctgttcgaccatgagtcagaggtctcctagcagtgtacatatcaaccgtgttgtcttggctttcgagaagcaggatcaacccttttctacgattggatgtataacctactcttgtattaacggttttgtaactagttgcaaaagaattttcttagcaggggatccccatattacgacagtatttgaaatgaaagtttttattttgaatttaattaaaggttttaattaaaccacatttttcctaaattaatagattagtaataataagtttgtaaaagcacacatgtggcgtccttgagagtcaggacgttacatactttattcttaaaacacttagctacttgtaaatgatatttcagataactaatataattactgaaatgagtgcactatcatttatcgcgttaagccaagctcgaaggaaattatcgtttcacttctaatagttataaaagctacaaattccgtatttataattagtgcttccattcaattgcactaccatgttcccaagatgtaagtatttggtcgatccatttggtcagctttaacgaacaagttaaagaacacaaataatatagttaagctagaacctaaccatcttatgattaagatctattgatctaagatcaactaagtgatattgacttagaaaagacataacggtaagtttatgatatcttttccagtatcaatataagtccaatctgatgtctaccaattacatccgatactagtataatttgcaaatgtcctggaaaggacattccacatatctttatgtaagtaaaatttattgttgattatcacgtaagtgtaaattcagtacactgataaatcatgggactaaaaactttgaagcatataatcatgattatttttcactgtgtagataacattatactcacgaataactatatgtttaagatttaatagaatttatatgttaaacatataatcatgaaattaatcannnnnnnnnnnnnnnataaaatgatttctgatcttttattaattagtaaatttgattatattgaaataagaattatttagggtataaaatcctaaccaaaaaatctatcaaaaattcttttggtgctatatttttattatatttacatcaccccttgccatatattccctgaagatgcagtattttatctttattttctatcttatattgcgtggtgtttaccaaaattttcgaaaaactaattatttaatattagagctaaagaaaatacgattaagaaataaagcactcagagtttttacatgcttggggctttaacgagtcttagtccacgaggtagtaatattgtgaaagtggatagaaaagcctaagggactgcactgtgtatgagcgctctattctcttcttgagcaagtcagttaagaatttctagcctttttcatgaaggattcaatgcgtatttataaagtaatagaggtcgtacatagttaccatttccctctaattgggagtttacagaaaatacatagatttggaattatctgacaaatcccagcccatgaggcaatatgtgtatgctgatgtggagatctgaccacaatgatagctattcatacagtgtcctttgattatgggtaattaatgtgatattagttacttgatcttaaattattcagtttctctttttagacagtattattctctgtccatgatcttagaaaaatataccttattctgtgtggagcagtaaatgggaaactgggactggcttccagataaacattgagaaccctttccaggtacacggagttgacattcttccgtatgctaactaggcttggtggaagctcatctagcaaggcatgtagttgttctcccaaaaggctagataacagttatgtttggcccagtttatattatttaggaccaatgatggactttaagcttttatttggaatccacgtgtcccttgcaaaaacacagataaattttacccccaagcttctagaaagctgtgaattgtggaggcttgctttagtctatacaagtggacaggtggaggctaaagttgaaacccttacaaattctaaatactttctgtgaatggaagacaactttccattttttgaccttcaagtttaacgtgacattattttatttgctcgcgaagcatctgttcacttgataaagcatgtgcagcgaagcaattgaattgataactatttacttcggtgagagtcttgaggggaatttcatcatttaatttacctcggttctaggtacaacattaaatggctgactgatgggcttccaagactttagatatgttttgtgttttgggaggagtaaattggaccgttgatctctacttcacatgaatcattcctcgaaggtataaataccttgtaacgccacctttcaccccttttactcaaaatttcaaattttgttgctccaaacacagatcctctgagagcaaaaattgtgaactaaaaaatttggagcacgatatcgattattgcatccaccttcttcttcgaattagggctcaagaataccctgatgctccaaccccggtaattacaactccatcatcagatgaaattgaaaaacctagatataaattttgagctcgattctcttatcgaccatgccaacgccattgcaataagacttgatcgccttgaacatcctttggttggagatttttctctaaggccatcattcgacgttaactatgctctcttaggccatactttttcccaagtccagaaccatcacccagttcattactaggtaaattatttttcttttttgatttttgaaccttgttgcgtgtttgagattagtgctcgatataaaaattaggtgtgatttactcgttgttcgagaattaggactttaggcctttgactagaatattgttgttgatagaagtattaaattctagatactatcttgaatagctttaaactagtagaagtcagattcctttgtttcattattatgagaaaagtctatttatctacacaaatgctggaaaacaattttgttcctttgtcccaagcccttatggttttagataatgtataagctttcttgtctttcacttcttgtccccgattcaactatctggaataattgttctttttgagaatattatttctggagaatgaatctagtgggaacctcttcaagcaatgatggaggaggattcccctatgcctctactatcttagttggtatgggtaactaattgcttgataatttttcagaactcaatatgcctaaaagagttcagcgagaggaagtagacatgatgatagtcttgaattcatctccgtgggagatggatcaatacactaataagtttcaaacttacgacaatctctggaaatacgagacacagacagggcttgagaatgttccaagactatcctggaatagattgttcgtcttaggagaatggcctaaccaatgtgtagaaggaggctttggtatctggagctggggtcacacaaaaatgggtgcccgtctccctttgaggttctacttcgtggagttttgtgcagtagccggagtagctccataacaattcattccacaagtgtatcgtctacttgccagatggtacatcttatgcttatagaagaagaagcctatttctactctagaagagattttgtacttctacatgtaaacaaattaaacaaaatattaatgttcaatatcacgtgcaagatacatgtaaaattaactagaatttttttttaaatatatgaaagcaaagtttcttaaaaatattgctcttcaacgcatacaaccaaaactaagcacacttctcaatcactaatccatgcacaatagcttgaaccttcttggaagattggaaaattttcttatacactttcaatgtatgcaactcacttcattctactaaatgaatagaaatagacagcaagcctattctaatcaacattgaagtagatcatcacaggaaatcaaatttcttgcattcaactgcagtagcaaaataacatcatgaaagataaaaatatttataaaataacatataaacaacactaatacaacgctatatcaacataatcattgaaagcatttacaaaataacatataaataacttataaacaacgttaacacaacactatatcaaaaaaatcattaaaaatctataaataaaattgaccaattcataaaactaaaatgaacaaaaaaaaataacaagaataacaatatgaaaagttcagcttaaagaagaagaaaaaaatataattgaatatgttctctttctttatgttagtgaaaattcaattctttcgggcatttcaccaacatatggcatgtgtatttttatatactacacacacacacacaacttcagagcattttcttgtacactctcaatgtgttcaacttacttcattctacaaaagatatagaaattatcacaaagtctattctaatcaactttgaagtacttcaacactaggaataaagatttttcctttctactgcagtagcaaaatagtatgtataaacaacttataaacaacccataaacaacactgtatcaaatttattgataaattgactaattcataaaattaaaatgaacataaataacataagaggaacaatatgaaaatcctagtttaaagaagaataaaaattacaatagcacaattgaagatg

SEQ ID NO: 17197 - DNA, 4708 bp, Cannabis sativa
ttttttcttttttaaaaaaagaatgaaaatatttattgaaaatataataatgttataaatactatattatacatgccatatacaactagccaaacaagttatttattcatcgattgatttaattatccgattaagtttaattactattctcatttttaatatgaatgatagattataaaaattaactcagatcttttaggacctgaatcatatgttatctaatcatctctttggattagatgtataattagcattaaaacaatttaattgatatataattagcattaaaacaataatcacaaagcctatgcaaatacaaaggctatgcaaatacgttttacatcaaaatctagtttatctctaattttagcattcacaaaactcacttttttcagattttgaattgtgatcataaaacatgcaaaaggtgatcaatcttaaacatgtaattaaacatcatttccccaaataggagtttagttcatattcacaaaactcattttttttagattttgaattgtgatcataaaatatgtaaaaggtgatcaatctcaagcatgtaattaaatatcatttccccaaataggagtttagttcataattttcatagtcaaatccatagttaaaattgaaatcgaaaataacatagaaaaattaagagagaagaaagaactagttgaagaaatcgatccggatcgccacaagcagctcttgaagttctctcctctgtttctagagctccaatcctgaatgaatctcaaaaatcccttgtaaatgagccaagttttcctttcaaattcgtgaaatcacaaaactacctatgaagtcgttaggaaagcttcgctgcgatcaccaaatccttagttgcagcggctggaacatcatcaaattggcttttcattctgcccatccccacgcgactaggggtattgcttgtcgcaactataggcagactggccgtcgcgactaggtagattggcctccgcgacaagctttgcctttattggacgtgaaataagagaatcaagcgtaaaacaaccttaaaactagaaagcaaagatcgaaaactaccctaaaaaatgacccgaaacttatactaaaattcgattaacaaatattaagaagattagaataaataaattacataaaattttattagaatctcattcatctaaatattagtaatttgagactatcgtgccatgtgtttaaaagtgttccattagtcggaggaaatcttcttaccttctccaactaccacattctatatactattttttaatatttttttaaaatttacggtttgggttgctttatttgtaatttaaagtataaaaataaaaaaatctctaatttatttattgcaaaacttaaataaatatttgtcatcgagtttgctacttaatcaatgaaagagtaaataattaaaataaatattttgtttctttgcagtttcagaaaaaaaaaaaatatattttgtttctttaataatttttctgtatttataaattgtaattgatgataatggtgttaatatttcattacaattatcccaactatacattatcaccaaattcttcaaagaggaaaaaaacttcatcacgttaaaaaaaaaaaaaaaaacttaacaccaaaaatctaatgctatttaagccgaaaacattcagtattactatcaacaaacccaagattattttttgacaaattcaaaacaaaaaacatgatattgttaaataaataaataataatatcattatactaaaaaaacaatgaattcaaagttcttatcttccaattaaatccacgtcagcattgataacgtgttttttttgttttgaaaaatacaccaattagaaaaccttattacaagattaactcattctttctcctccgaacgaaaattggttcggaaaggaatcgtaaagttaaaccattccgttgcttaaaccttgcttcattaatatttcattgacctgagatctaggggattaggatatcagagttatccccaattcaaaagttttgattttcaagttacaacatttctgatgcgcattggcttttaccagatctgcgtttcaccttcaccactctatttcgttttggattggattcaccttcaatggattactcagtaattcccaaaaattcatacgtcgaattacagacgaagaacgacgacgacccgagaaaccctagatctcatggaaagttgctacctttagatgaggaaagttatctaggatccaagaacagtaatgggcaggaattattcgaagatgtggatggttttgatgaagatcatagttttgagtttcatgtcgataattatcccctcattgttgatggctctaattctaataatcatgggtctggtgtgtcaggggcggtgtttaatctcacaacgtcgattattggggctgggatcatggcactgcctgcaaccatgaaggtactcggtttagttttgggttttgtgttaataattttgatggggattgtttctgaaattagcgtcgaattattggtgaggttttcagttttgtgtaaggcctcttcgtatggtgaggttgttcaatgtgcattaggaagacccgccagaatcttgtctgagatttgtataatagtgaataatggtggtgtattggttgtttatttgatcattatgggggatgtcatgtccggttctcttcatcatattggtgtgtttgatcagtggttgggacatgggttttgggaccatagaaagcttttgattttggctgttttggtgatttttctggcacccctttgtgcattagaaaagattgattctttgagcttgacttcagctgcttctgtggctcttgctgttgtttttgttgtggttgcttgtgttgttgctcttattaagctcgtcgaggggcgaactgaaacacctaggttggccccagatttcagttccaaggaagcaattctggatttgcttgtagtgattcctattatgactaatgcttatgtttgtcactttaatgttcagccaatctataatgaacttgaagatcgttctcctcagaagatgaaccgagttggtagactcacaactgctctttgtgttgtggtctatgcttccacagctatatcaggatatcttctctttggtaaagatacagagtctgatatactgaccaattttgataaagatttaggaattagattcagttctgctttgaattatattgttcgggtcggttacgttcttcatttgattcttgttttcccagttatccatttctcacttaggcaaactgtgaatgctttgctgtttgagaaatcagctccattatcagagagtaggaagaggtcattggccttgacagtggttctgttagcactcatttatattggatccactatggttccaaacatttggacagcttttaagtttacaggagcaacaacagctgtgtcattgggattcatattcccatctctcgttgctttaagattaagtcgaaaaggggagagtttgaaccttggggagaagcttctttcatggatgatgttaattatggctggaactgtcagcattgttggagtggttggaaacatatatagcctcaaaagccaatcaaaatgatttcccttgtagagttttgatggggttgagtaaaatttctctgtttgtatgttgctatgcagtcagtgtgtctgcttttcagatctgaaaatgaagttttccaaggttagatctttaccactgaagtctaattaccttaggaattgaatgaaaagggtaggttagatcttgacaacacttgtcatattcaacataaaattcttttctttctttttttattgtcattcttacaatcaatactttgaggttagccccacttttgagagcattcctcatgtcaggaaaacagtttatactatttgttacaaatgtgtaagttatattcaaactaaatccaaataattcatgccacttatctttatccatagtgatttgtctttcctttttcattcattttttgtttacaagatattgttggtcgattgtaatttccaaacaccatgtcacataaaatgcattccatgctttaatgcacagtattaggaacttgtttggcctatcttttattactgccaatagagaatatggttctttctttttttttttcactctacttctgttatatacaaaaaaattgtctggaaatctcattctcgtaccaataattaacaagtctgttgactttaattataaggtttatgttgttccagaatgatgatgaacaataataccatcttgaaaatggtaattggagaacaatttcataagagagtgaggttcttcagtatctgaattgatcaaacaactctctatctagcttgtttattttaagtgaacatttttccactcatcaaaattgtccaagtacgaaaactcttgccttagaatgaattaaagaacacctgagcttcaagcaacaaactgatcctacttagcaaacccagaaatcatggagcttcgagaaatgagtctaagacaacgcacttaagcttggatgatgaatgcaatcaaactaaccgagatcgaactgatcaatttcgacatctatctctattagattttgggttgataatcatgtgtaagataccggtatcaaattctgagttccaatatctcgccaatgaccgagatcaagtactaccactagct

SEQ ID NO: 17198 - DNA, 5068 bp, Cannabis sativa
tcttattaaaagagcataaaaaagagatgagtgtcactacctttaatgtggagttttaatattagtcacttatgcaacatggcacattcagctataactcaaactcattggcggttaagttagttaagggatatgtcaactcttgatgctagctatataagttgccattacacccttattcggatcagctaacacaactagtatagagagagttttgagagaaaagagagcagtgagagaatacaggagcaagactcctttgattttgtattcctgcacaaagtactcaatctttgtaatctccattgcttcatcaataaagaaacaagttctgttgttccccgacgagtatacacaagttaaaacttacttgtgaccgaacctcgtacatgtatgtgtcagattttaattttattgtcactgcattatttttgatttctggtttagcgttcatctcagatttgtgttgatcaagttaaaatgtattttctgatcattggcttttgttctttgtcgtgtgttcttgattgaggtgaacctttgattcaccacatttacaatcatcagttaagtgaagttttagttgtatgtactactttcatatgatttttcatggtttctagagtcgaatcttattaatatcatatgaatttgtagagcaattgaacaaagatggtggtttagcaatatgtttatttcggttttcagatacgttactattgagaggcgttgcctcatattaaataaaataaggtctgaacttccaatattttgacatttattttggatgtctcaacatctctgggtttatatcagcaaatcagttatgaagtgtcttgacgatgtgcccattttgttcagagaatcagaatagagttaaccgaatcagagagtgaagttttctggtttgtagaacctggtaattcagagaggtttttattgaaagagataaagaactattctctggttttgtaactcttcttctaattgatctcgatacacaattgaggttgtgagactgattcttcatacctctgtaattacattggtggctgtaatctcttctatatttcatggtgaattaatagaagtagaacaagctttggaggcaggtagcaaaagcacattgcttttgtctactgaaccgagtaatctttggtgttagttgtttgtgtgtgcatttgttgtgttctttgtgtgccttctttttccatctattctcttggtgtttaatcctaactgttactttgagtttgcttggtgaagtggacgatggagtgggcgcaatggagagagggtgcaaatgagtttgtttgttgaaaatttatcatttagtttgtttaccgtgattatttagcttttatgtgcccataaagtttatgataatatgtactttggcgtgtttgaatggtcttataataatcccctgcctgaaataatggcttaagctttctttaattttctcctattgttgttgtcgagaatatactcatggtggtatataggttgcataatcaatacaactaatttgatttacggtattgatgtttacagtaatatataaactttttctgtagtcattattcacaaccaagagattggagagctgtgttgtaagctgcctggatgcagcctcataggtacttatactgtgagggaattagttttgcttctgccccctagggagccagaagtttttgtttagacagggcagtgagtttgttttagtatccctaatttcggttaaagctgtggaacctactctatttttgtaaccacggtattcctccgccacaagtgaggatttttatccatatcggggatgggactagtctaagacaatggcctcgttctctttttttttttttaaaaaaaaaaaaacagaatattcaaatcccacttcttacaatacatcattacattcagaggatgtgaagatgtgaagctataattatttaaaactatcaaagatgaatagcaaaattgtgtttacatttcagaggatatggtgtttctgtgagatggtgatgcttatataggaagaatgctctgtttgactatgcttctgctttctgttttttcaagaagctctttaaagctactgatttctattaaaatagtcttttatagttaaaggcttatattcatggtatccaacaagcagcggaagtcaaaagtggttatagaacttcttaagtccaaaagtaatttttgaaagcctaaccaactaagaccaaagtttgttggtaaacacaccaatggtatagactaggggaaatgagctcttcacgatgccctatcaacttctgctcttgtgtgttgatcaaaaaaagaaaaacttctgctcttgtgtgcataagtgtatcttagtgcacaatacgggaaatttgagaagactttttatgtagaattcttcagagaaaaagaaaataaacgctacatttgtgatttaacgttgttggttttgtaatatctgtaaatgtgattacagcaagacatgtgatgagtgggtttaagattcatataaggttccaattatgaaaaccatttaagttatgctggaaagcaccaaatcaagttccataaagttcttattgatagatttagtttcttttgctatttattcctactattcacattatccttttcagtttcaaccaatttttgcattggccaggaaaaatactgagatgaaagtctatccagttacacagtaacaagcagaaacattcattattgaaccttatacatttttggaggaaaaacataaatttctcccatagcagattgccaaaataacacatcttctggcgttgtcttgtgacctaggctgttgttatcaagatcacagttaatatgaaatcaaaattattgtatgtcttcatcttaaaagagactcataccaaagttttcatatttttcttaaaatgaagttactcatgattttaccacaatccacaatctaggctaatattaattcagaaaaagacttatgaaatcaaaaatataaacaacattaaaaacctaaataaataacaaaaatacataattctaaagtagattagtagttagcactagctaaatctgattgcgaattacctgagattaatgaagaattaatcagaagtatgttttgattcttgaccttgttgttgagatccttgaccttgttgttgagatcttttttgcataatttgcatttgttcccttacaaaaaactcacgtactttcggatcggctatagaattcaaatctgccagtaaaatcttattttgctcacgatattcagccaaagccaattttcttgactcaatttgagctcttaccatttgcatttggtaaatcttttgcctaaatgagttgttctctttgagcatctcaccaagttgtcgattttcttgttccttagtttcgatggcatctgaactttcaacgctatttttccttttagatttcgctttgtccattccattgggttgttgagttgaacaatgcccaaaattctcatcgaatatttttagagaaaatgatgacaattcaagcgattccgacgttgatgattctgaagtaggtgactttggttctgatactacaaaattttcatgataattatcctgataattttgataatttcgccttcgagagactgatattcgagtgttgatgatattattttcatattgttcagaatctttaagaatggagaagacatggtcaaatttgaacccttttttgtaatttttatcttgagctaacagcactttagcttgatttaactgcaaaaatggtataatagaaaaagaatgtcagaaactaattgggatgaatttaatgttaaaatacgttagatgtaaattagactcacaatatctagttctgaagcatcctttagatttagattttcaacttgttgaatgcattctctgagtttggcaacagcagtaagaataagttgcattcgacattgcaaggatcttttaggtcgaacttgggtgatgaactctggtttggaattgttataatcaatttcaagtctggaccagatgttgtctttggaatgacttctacctatgattgggtttttcaaaatgtggagatatttcttgcagaggtgtacatcttcttcaaatgtatatgaagtacctcttgaagtcatctcttctcttccgacacaaattggatagataatatgttttgagtagagtggtatggtgtatatttagcagagaaaaatagaatagaatggattttttttttcttttataattattttagatgcaatattaaagagaatggtggggtagaagagaatgatgggatttaaatagtggaagacaatcagacatgatcagattcagaattttaaaaaagtaaatctaatggttgagatagaaatattgaaatcagataaatagttcaaagatgttggttgggaagggatccaatgctacattacatacatgttttaaattgaatttctaactacttttagtttttttattttttaacaaatttctttctaggttttatttatttattctaggttaggtgaactaatttattaggtttttcgctttctttaatagctctttagttgtttcaaccaaaacaaaataaatagaataatttgtgataaaaatttgtattttttcatttttatacacttaatatatatatatattttttttccaaaatcttcttatatttatttttttttttttttaaatttaacacgctagttaaatattactgttaaatattaattggatgaccaatgtatatacctgtgcatatataacagtaaaacctcgaaatcaatacagtaataattatgttgttatttaaaggtaatatctaactgaaactttaaatttacaaagaaaagcaaatttaaaagaatttcgccacaaaaaaataaaagaaataagtgtataaaaattaaaacataaataaatttttgtcacaaatttctcaaataaataatagctagaaaagcacattgatggcatctttgactacactatctaaattttctatttttttttttttaatttttaccacctcaaaa

SEQ ID NO: 17199 - DNA, 4478 bp, Cannabis sativa
cagcaattactatcttaacaacccagtttaatagaaacaaaagtaagttagcaaagaacacagtattgtcattgcaactagagtaagaaaaagctccaaacaatcatgtatcagcaataattaaaggccaaaaaccatacccttttaaggttgtaaacgtgcctctcactttcagtcatgagcttcttttgaatttttttggctcttctaacctccctcaaagttttaccgctctcctttttcatcctctgctccaccttgcttcgcatgcttcttcctctaggggtcgacatggaccggcaccatgtgtggaaaggatccagcattgtacaaggagaggagaataacccatcttctctagctttacttggttgaacgaaattacttgaaactaatttgggagcaacttctctacacagcaaatcacttctaacatataatatacaaatttcattagtaagaaagaaaaaccaaatttgaaatttgataagctattacagctcaaaaacaagctccccaaacctgtttggatgctgagaaaaagtaggaaacaagtgaaggaaaaaaaaaagtgatttttttttacatttgaaatgaaaaccaaatactttgtttaaaattccatttctaaatgtacaatttttcgttgggttaatccaaacaatacaaattggaaaagaaagagtcgatttccttcaagttctcagacaaagagaggaaaatggaaaaaagagagaacttactttgaagaagtggaatggagaagagggcaaaggtttttgaaggtatgcctatggagattcctggcagccaacattgatatcgttaagcgaaaagggattggcagtgaattagtggtttctccttaatcttccattaatgcctcttctgcaacagagtaagacctccctcgttgtcgttgggttttagattttcagggttttagttttaggtttttggggccaaacattttgggattgatcagggttaaaactggaaacagattttattaacagtgtgtcgtttttgagttttactgtcgttttctatatatcaataatatatattttttaatgggaatgaataaatttattaaagaaaaaagttaaaagaaatcaacttttatttagataaattagcatgtacaactaataataattaagagagcaatttaaattgcaattcaaattcacataataactcgtataacaactatcaaaacaaccaccaaaataatccaaaatatatatataaaaaaaaataatagtaaatggaattttaaaaaatcatgaattcaaatttggctccttttaagaatcttaaatatgagataatatttgaagggcatccgtatatgcttggttaaaattcacgtgacacacttcatcatagtaggtgcagacaatacactttagaaggttttgacgaatattcgtgagcgaaattaaagttgtcataattacacccaaagagaggagtcacaactggtatctcttcctctcctttttatcataaaaaaataatcatactaattttttttacagataagatgaatcaagtttcattttaaattcaattagcaataggatgagtagctcattcatcttatatatcacaatttatttcaacacattaacaatataaaactaactcttaatattaaaataaaaataaaaattgacataaattaagaatatattacgaaattcaacaccattcttacataaaaagaattttcttgtcgtttactgtgtttttctgtcgtttgcattagttatttcactttggtatgttcgtttctttggaaaagagagaaagaaacacacatatttcttaattaaaattataaaacattcttccattgtctacataataattgcagaagatacaagcaattgaagattcaaccactgctttcattggctttcattcataaaaattagatctttaagcaatcttagcacttagaagcaaagactgaatccctctcaaactacattatcatctttctttaatcacaacacaacttacataccatttaacaacacacttacttaaatacacaataatacaaattagctttaaacatagttaggtagattccctccatatcaaggctgtttcttgcattttctccatcaatttcaattgagaaaacatagtaaatttctctggtgatggtagtttagaacaccctttaggattatcatctttaagtagttgcctctatatgctgtctcttaaccaatctaaccaatcaagcacactactttcttgtgaacaaaactgcaaatcctacataaacacaaaaagataattatattagtaacactgtatgtagagtctctcagtagaacaaatagtagggaaggtaatgatgaaagcttacagaaagctggaaatctggtggagagtcaaagtcaaggttttcaaggtcagaaataccacaaggtggaatgttttttccagtcaagttagtgttagtgttaggtatgcaatcaaaagtttccttgcacaacaaagaatcatcaatgttcaataagtcataggtttcggcagcctgtgattcacccgccagccacgggaactcctccatattgttctcaccctgaccgtctgtttgagggataagaggtgacatttcgatatgatctccttcctcctgtaataaaaaaccagtcttgaggggaaaaaagacaataaaaagcttcaccaaacattcatgatatcatgtaacattacattagcctttaaagtaactaccttggcagatgactgtaatggagtagtagtgtcagccatatcatgtcgaggtgggatcggtggatttgaattcggagttttgggactggcttcatgtgctgctgctgctttcatatcagattcttcaaccagagtaatgttatcactgttttcagattgcttgtagaagatctttgagacaacatagtctccttcattttcctcttctccagttcccagatggtattggtgcatagtccaattagttctatctggcttagagcccttcttagtgcttttataaagaaccataatcttcttccaccccttttgaactccattttcgatcacaggtttagttttacctgtcttgtgccagcgcacatgctcagccgtcgaaccctgctgacattggaccttgcgacgcttcctttgaccagtggaatatgcattacatatcttatgaaagaaatgaatgcttcttccatctttcttagcacctaaaatgaaaaccagatacggtgagatctgtaatactactaatcattattggcagaattatgtctaacttgaatttagaaactgtgttggtactcgataatttgctatgttgtatcagattggaattagaacaacttaccaggaagattttcaggatggtcacagtaaattccttctccctcaagtgtggggataaattcatcaataaacacatgaggaattatgtttccaacaccacattttccagacaaatgatatatgagatcttcatcagatggctcaaactttacaccagctggcagcccaggccactctgaagaaacctgcaaaagaaatgtccacaaagacacacaaagcagttcggtaaacaccacataaacgacgattggataataactcatacgatcaggtcagttcataaacacaccaaagctacctaagacttagctcaattggttgggtgtgtaagagatttgaattacaaaccccagctgggctaatttaccaaatggatagctaactaattgtttcattaagaacaaagaatacaattgaatagacagtgaaatcttacatcactgttgtcaatatcataatggcaatttgggcattcacgatttgctccacagtcttttatttgataagcagaagaacgagaagcactctttactttttttgcaattcctctgctgttcatgagccaactcctgtatccatgatagaatataagccaaaattatgagtttatagacagaacacaacaacatgatacaatatatggcagtatgtgctcaatgcaattcgctagctaaatcctatattgcaaatgaaacttagctttgtgctagtttggagaagaaactaaagtgactaaatcacattatctgctgatactaatagtttaagcctacaaactatcttctagtttgagtccactataaaccagaacagaacaaaaagttgatacttgactgtttacctaagaagaaagttatcacaatgcttacagaaatcaatcaaaagaggtataaaactgaaaacgaaaaaaacaccttataagtcagtaaaaagtacccatttttggataataaaagcatcacctcaaaaaaccatttccctcctttttttagttcaggttccctttttgggggttgagtattaaatggtcctccatcaaatacttaataggtccccactatgaacaaactaaacccaaaaccccaaacccaaaatcc

SEQ ID NO: 17200 - DNA, 2169 bp, Cannabis sativa
atattaaaccataatcatgaaaatcacatgctaacataaatgacttctaatcttctattcataacaaataagattatattgaaataggttttatttagggcataaaatcctaatagttttgggggaaatgataagcttatgtgagcactgaccaaaagtagtgtcagtgctcgtgtgactcaattaaatgagattttcttggaaattttggaagcttaaaaccctacatgtgcaagccaactcctgagacattatgaaggcaactccaagtgtcaatacaagatgaagtacacaacaactaacattttctagtgtcagtggttgccttctatgtatttcgccaaggataagacttcattcaacgtattataaacatgtctcttaaagaagcttccaaaatattttcaaagacttatcccttgctcaaatatgcgaccaaggcctaacccttggttagtggttgtgtatgattggtaaaatggagatgacatgcaactaatgactcttcctagagtaagttgttgcacatttcaaggaaataagaacatcatgcgaccaatgactccttccaaagttagtggtcgtatggaagaaggaaatgagaatttcatgcagccaatgactccttccattgtcagtggttccataacacataagagaagtccatttggaagatgttttgggagggaatggcaagcttatgcgagcattgaacaaaagtagtgtcaatgctcatgtgactcaattaaatgaggtttccttagacattttggaagcctaaaaccctacaagtgacaaccaacttccaacacattgtgaaggcaactctaagtggcaatgccaaatgaagtacacgacgactgatattttctagtgttagtggtcgcctactatgtatttttctaaggatgagacttcgtttagtgtattatcaacatgtctcttgaagaagcttctaaaagattcttaaagtcttaaccacttctgcaagtcaaaacgatatttattttatgtcatttatttattattatttaattttaaatgaggagcatagaagaatatttataaccattctccggggattgacaaccctagccccatataaggttacgatctagacctaggaaaggggactgcttcttttgtattcaatccttttgatagccgcactattgagatacacattagtccctgtgtttccagaaactccaaccatcactcacctaaataatttaagttctatttccgaatatctttggagactatatccagagagaaatctaaaaaaatctccattaagacgtttttattattttacttagtcaagaacactactttgggaacataaccctgatgtgtgtttgatattaagttaattaaacaacaaatggactaacctattatcgccaaatcaaaggtcgtgagccactataaaaactatgtatgtgatttttttaatttaattaaacctggttgcaatctgacgaccaatatagtatgagtctaatctacttatttacgatctttttagatcaattgacgaaaaaatgtatcaaaaaattaatattcataaatttaataaaaaattaaaaaaaaaaataagagaatgaatgagagaataaatagatgaatttgaagtgattttaaagtgtcatgtgaccgccttatgtctcaacttttttttttatatatatatatatatagatttctagaattattattttttttaatgaaagttatttagtttaacattaaaaatatttggctttattttttttttttgaatgaaaatcatcaatttattaaccaataacttcaactaccaaaaagggtagcaaatcaattgggacagaccccatattgaaattgcaatcatgatagaataacgaagctctagcaaagctatgagccaccttattagctgatcgcctaataaaaaagatagaaacacttttaagttcttttaataaaaccttacaatctttaaccacttgaccaaacatgaaaatcatttcaattgaacttcgtaaggcttgtataaaaactaagcagtcggtctcaagaataactttgcaaggttgatttcttttaatccaactcaaagcttccttgacacccattgcttccactaattctggtgtggttgagccattaaaaagcttggttact

SEQ ID NO: 17201 - DNA, 5355 bp, Cannabis sativa
aaaaaaaaaaaaaaaagattttcgctccccaaactttgacatgtatcaaattatgacctcaaactttttaagctgttaaaaaatttccttgaactattgatattgttggattcaagaaattctttccaattcccttcaattttactaatgtggtaagtaatcgaccatgtattaaatcatatctcctaactttgataagtactaaattgtgttcctcgaattttacatgtactaaaccgtaccctttaagcttttatccacataagacttttgttagttaaattggacggaagtccttgagtctaataacttcaataattcggagtaaattttcaacgacctaaaaaagttcgaagtgtatgatttggtagatgtcaaaatttaggagataaaatttcttattaaaaatagtttaatttttgttattcaactaaaaattatttcaataactgcaagtgtttgttgttttttttttttttaaattatttatttttattttttaagagaaaacatatgtatattaattgtttctgaaaaaagaagtttccttttccaaaactgatgttgatagaatttgacaaaactataaccaaattagtttagaaatagtgacttgataatacatctcattataaaaaaattatatttttttttgcttaacaaaataatttatatcttagaatagaaagaaccaagtttattttttattaaaaaaaggaccagttaacatcaaaagttgtcacaactaactaagtttggtttaatccctttaatttattttgccttaattatcaagtttcattcaaacggtaggaggttgaaaaggctagctactaggcaataccaataaccataaccatggttttttttcacttttaatccatacttttctcacttaatcaatttttaaccaataaatatccttgaaaaaagtgtgttacaattggtaaagtgatcaacaaaaggaaattacaatgaaatgtttcaattgaaaattatattatctatcaaagtccttgaagctaaaaatagtagtaattatcttgctaaaagattcaagatttgtttttcccatttcttgattagttcaaagaaaagaaaagaacagaaaaagtaagtttgtcaaagcattcgaagtaaacaacctaattaatctaaatttggaatttggaattaaaaaagataataactctactaattattcttttgcaaaatttgctctatctctcgaagctctgaattcagttgtcagaattacctatttgcttatgaccttcgaactttatttttgatgtacattcataatactacataaataaacccttaattaaattattttaggctaaataagaattttattccctgaacttttttgtctattaaaaaatcttcttgaactattgaaattattgaatttaagacttttgtcgaatttcattcaattttactaattcgttgattgtccatgtatttaattatgctcccagactaaactcaaattatgtccctcgaactttgacatgtgtcaaattatgcctcttgaatttttatccacgttagatttttcttactaaaattggacaaatttttttaaatccaacaatctcaataatttaagaagaattttaaacggtcttaaaagttcaaagggcatgatttgttaaatgtcaaagttcgagggatgaaaatcttaattaactattattttatgatgaatttgtttttgtttttaaaaaagaaaaatgggttatgttaaaacaatgacttgctaccattatagaagaataacaaaaatttaaccaaaattgaagttgagtatgatggacctaaaacattgtccaaatccaccaagtgattataccgttaagaaaataatttcatacattaaaaattggcttaaacatcacatcactctatggtaaagcttgaccattgcccaagtactcattatcaggctcaatctcaataacaaaacattgtaatgtaacactcaatcacctaattaactcaccttctgcctttgatgatgattaagagtttattgaagcaatgttataagtatataaaccatctcatttggaacttgtaatgcatccaaagaagaatattacatcatctcattttcaaatcatacaaaacaattcaaaaacaaaaaaaatcccaacaatggcttctcactttttgaaggctgtctttgcattttgtacatttttgttgttgtgtgtgttgttgcctcaattggctcatgcaaagcatacaggaataaccaggcactacaagtttgatgtaagcagtataaaaaactcaactaatatatagttgtatatgatatgagtgtgttatttatttattgaaaatggtcatgttcaattgtgattttgtgcagatcaagttacaaaatgtgacaaggttgtgtaaaacaaagagtattttgactgtgaatgggaagtttccagggcctagaatcatagctagggaaggtgacagagtcttaatcaaggtggccaatcatgttcaaaataatgtcaccttgcactggtgagttgagaacttatccttcatatataaaaaagagtgctaattacaacctcccattataactttcatgtccgaaatcgcatgccggaatattttttttcatcggtattcgttatagttacaatatcatctctgttaatttttgaatagtttacagtactgaaaaacagagtttccagcatgtgttttcgggcacagaaattgactaagaagttgtaataggaggttgacagtaacactcttcaatatatatagggagtttcttaagtgggagcatcacttttcatcctaacgtaacaacatttttttattttttgtactttaaaaaactatatcctaattttataatatgacatcatatactgaagttataatagacatcttgtctgttttcgagaaataccgaatactttacaatgcttaaaataaaattcaaaataatttgttgtacttgtgcaaaataaaacaagcacgcgtacaacttaatgtttaaattttattttcagcactgtaaattatttagaattttccgaaaacagaaaggatgcctagtataactataatatactatcatataaaaaaattggtgtacaatttttctatatacccaaaacaaaaaatactcctacaatagaagcaaaagtgatgctctcatcaacaaattttcctatctatttgtctttttattagtttttgcatattgttgtttaaggtttgtgtaaataaaatgaataggcatggaataaggcaattgcgaagtggatgggctgatggacctgcttatatcacacaatgtccaattcaaacagggcagacctatctctacaacttcactatcattggtcaaagaggcacattgttttggcatgcccatatctcatggcttagagctactatctatggacctattgtcattctacccaaaagacatgtcccttatccattccctcaacccttcaaggaagtccccattatctttggtaattcaaatcatcctcctatatgtgtatatttatatgtaggaatgggtaacaatcaaatcaatccaattacaccgaaccaatccaatccaattataattggatttgattggattggatgtggatggatgtcactttcaaaatttaattaaaaactgatctaatccaattacaaataatacccattaaaaaatattatatttaaatttcattttatttgttgtttattaatttttcacccatcttattacaccttattaaagaaatccctacaaaaaaactataagaactcatgtatagtttagtttttatatacttttttagtcaaaatttaaaataaggtgtccaattgaaaaatccaatccaattattagttggattggatcggactagaggaaaaacattgcattagatcggattctcacccctataataatatatgtgtatgtgtataaatgagtttgtaatagaaatcagctgacaatggtcaaattttaatgttgaaaaaattgtaggagaatggtggaatgccaacacagagacaattatcagccaagccttgaaaacagggtcaggaccaaatgtttcagatgcctataccattaatggtcttccaggaccattgtataactgttcaactaaaggtactcttacaaatttcaacaaccaaagataacattttgttatgatttttaagactaaactaaactgactatttatttatacatgcacagatacatttaagctaaaggtgaagccaggaaaaacttacctacttcgtttaatcaacgctgcactcaacaatgaactattctttagtgtagctaaccatagcctaactgtggttgaagcagatgcagtgtatgtaaagccttttagaactcaaactatactcatcacaccaggtcagaccacaaatgttcttttaagaaccaaaccgaaagccccaaatgccatctttgccatggcagctaggccatatgtcactggcccagctgcttttgacaactccacaactatgggcctgctcgaatacgaaacaggcccaaaccacaagaagaacaagaagcttcctcttttaaagccggtactacctaagctaaacgacacgtcgttttccttcaaattcagccaaaaaatccgtagcctcgccaatgcaaagttccctgctaaggttccaaaaaatattaaccggaagtttttcttcacggttggattaggactatcctcttgctcaaaaagccaaaggtgtacaaacaatactcaagtattggcggggattaacaatgtgagttttattcagccgaaaacggcccttttacaagctcattttttcaacaagacaaaaggggtgtttactactgatttcccaactaatccaccttttaaattcaattacactggtaaaccaccaagtaacttgatgttgagtactgggactaaggttgttgtgttgccttataagactagtgtagagttggttttgcaagatactagcattattggggcagagagtcatccccttcatctacatggatttaatttttttgtagtgggaatgggttttggtaattttgattctaaaaaggatcctcccaagttcaatcttgttgatcctgctgagaggaacaccattggtgtcccttctggaggttgggttgctattcgattcctcaccgacaatccaggttagtcagtacagaatcaatctattttcttgttgtataaaaagaaaacgaatatcttttggtatttatgaaagagatatttgcggtgaaacctttttaacatttgtaattattatacatatgatcataattaaaaaaatgatggcaaa

SEQ ID NO: 17202 - DNA, 5109 bp, Cannabis sativa
  modified_base (29)..(34): a, c, t, g, unknown or other
aaaaagtattaagagtaatttttaaaaannnnnnaagtttatattttttttaataatggggtgtatttataattttatagggtgcaaatataaaaaatacaaaaacaacacaaattacaaaaatactgtacaaaaattttaatatttttacgaatttttagattttatttacatagagtacagtcttttggagtatttttatgttgtactcttgttattttgtttttaatttttttgttatttgtatattattttttatgttgttttgccgtaattttgataattttttcttgttattttcatattgttttcttgtatttttatagaatacggtaaaaatataaaaaaagaaaaaaaaaattgaacgtaaaaatttaaaaaatttacaaagattaatgttttatgttattatccctagaaaaaagctatttacaaaaatatagaaataaataaaagttttgatatatatatggcatgcaaatttaattgtactaaatatgatattttaacaattagttctcgaaatcaggggtgagcataaaatccagaaaataaaaaaaaaataaataaataaataaaaactgttcaaactgacctatcgaacaccgttggaaccgaacctaacgaaaccgaaaatcgatgctaacggttaaaaccgcaattgaacagtcagttttttttttttttttttgtaataaatcgaccaaaaaaaccgaaaccgactgttatacacatatatattaatttattaagtttttttttttttgcatgtattatagttactaataatatataaaaataatatattattttttatttatattaaagttaagagaatatgataattagtttttgaacaattaatttgtatgtttgtaattgtaaaatatagaataatgtatttatagaataaagtggatcatttttttttaaaaaaaaaaaagttcggtttgagcggtttaaactgaccaaactgagattcaaaatagtcggttttaacataggttctggattggtcggtcaattttcgaattgcaccaatccagaccgaaaactgaattttagatttttatatagaaaaattagactaaaccgactgatgctcagccctactcggaatacttttccttaggttacttttcgggcgtccttgctcagccacgatgttggatattacttatcagaagatgcagagctacggtgcctgtgagtgtgttaggggaatggttgttgaaactgttctatctttattgttgttcgaatattttgagtttttcagtttatttgagttatttcgaagttgagcaccttttgtctatagtgagtttttttggggtgtttgtccttttttatactcctgtgtgagccatgaacttaatgctcttttttgaatcgatttagttaactgatcccctgaacttatactcttgatcaaccttaaataaaactttcattaaaaaaattggaaagccacatattttactacaagtgtaggagatatttcttctcaaaagtctaaaaccttataatgatatggggaacaatgaatatgacacgttcaggcccatcaaattcaaagtccaagaataatatttagtaaagttgttgaacaatgaacatgcatccccaaatgagcaaaggtgttgtgtagtgtgtaggtccccctaccctaataaacatcctaaaacccatctatatctatctatctatcccaaaaggcttcaaagcaaaatgatgccaccggtaagtgaccatatttattctaaagatttttagtgctcaacatgtgagtgatccctctttactttcattcttctctcttcttaaaaatatcttccactcactcactcacttttctctatgtacatttatattattactcaatcagatcagatctgaactttagagaaaccccactaaagaacaaagtaaaactcataaaagccataatcttttttcattgataataataataatagatgaaagagccactctcatttagataaaactccaagctaaaggagtgactttttttagtacacaaaaaacacttgttctttcagtcctctctaaatagagtccaaaacaacaaaataaaatgaaaaatccccagacaatacaaaaggacattactaaaaagttatatagtaaagggcattattggaaattctccaagtttcctaagggcatttagggcctccttccttggtcttccagttgttgtagcaagggcacacagctttattaccataataccccggtggcacacacaggcaggtcttacaacatttctggcagaagaacatgcacggcttgtggtactgggttcttccacacctcctcacgcattcagatgggcattctggtcatttcacacacaaaaattttaattagtaaaaaagatctcaaaatatggtcaaaggccatagaaggcatttttgagctcttcaataaactttgaccaaagtcaaacaccattcctgcgcgtggatcaaacgctcttctgattctctcttaaaacaagatcatgagaatatgtgttgttgaatataattttaaacaagattatactgagagaattaggataataatttaataataacaaaaataataattaaaaacaaaatacttacggtaactcttgagactccctggtccatatcctttctaaaataaaaataaaaaaaattaattaattacaatgcaaaataactattagctttgattctttgaccgaaagagaaagaggtcttaccttgttgttgtgatgacctccattgccattagaagccataacctgttagagaaaagaaaaaaaaagtcagagagaaaacaatgcagtaagaaatatctagtaaaagaagaagaatgggtctgttacgtacagttgtttggatcatggaaatggcgatgaaagccaagatcatgaaggccagaaacttagtcatggccattttctcctagaaaaaagagaaaagctttgaaaggcagaggagaagagcagaatgaaagtaaggagaggagaagggtttgatctagatttgggagagtgatgatgggtataaatagtaaaagctctccactgtgctgtgttgttgtggcctggcctatgggtttggggtttgagatttgggatttggtacttttactcccactgaattcattctatgctggcccaatacaaacttgacacgtgtagaaactagtatagtattatgtgaacaaaaatcacactcaaatttcattgtcaaaaaaagaaaaaaaaatcacactcaaatttaacacacctatttgacaccctaatttcaaacaattatgtttgttgaaagataaacggtaaaggagagcgttgtgatattcttattggttaaatgaagtattttgttgcaccattagtgtaattttaaaaaatattatttacaatttaaaaaaaattacttaataaaaagataattcattaaaaaagaataagaaaataattaataataacaataaatcatccttacaataattataaataaactataaaacgatattttttaagtagtattataaaatattgctaactatttataaaacgataccttttaaatagtatctaatagcgatgttgtgtattttttttctacgaagttggtgtgtaatttttcttttaagaagttggtttgtaatatagttgtgcattttacttttattttgctaaagaaaatgtcactcataatataccaaagaaattgttataaatttttaattttaattttttcctttcaaaataatgataatagcctattcttttagaaaaataaaaatactttattagacttgtaaataaggatggcaaaacgtcttattattttgtgttgatgttatattttatttgactcgcttttatagtttgtgtcagcgtattgaccagtgtctaattttctcaattctaactcgacctgtaaaaaattatgttatattcgtgttgatctacttttacttattttactattactaaagttaaagttgtagtgcaaataataaatttaaagtttcattagaaaacttatatacatctatatatataataaaaaattagatatttaaaaaaatttattttttaaaaaaaactgaatttaaaagtttttaactcaacattgaattgttaaatatatatatttttacccagtaacattattagtaataattttgtaatttattttatttagaaaaaaaacgtgtcaaatttgtgtaagtaggtcgtgtcgtgttttacctatttttatttcttatcaagtcttgtcaacacatttttcacccgctgctaattttccaactataactcataaaattcgtgtcgtattaatatgtcaaaatccattatgtcactcctaattgtaaaaaaaaaaaaaaaacaattttttaatccgaaaacaaaacttctattaacataattcagaagctcttgattcttgtagtatttctaagtctaatgcttcggctgaactccaatttctattgcactcagaatattaatcaatacattgttgatttttgaaccaaatgaaataaattaataaacaaaactattttttccttgtgacatattaaataatgaggaaatcagacatttttgacacaaaatcttaagatcagatccaacaatgaacaatccatatcataaatacacattgtttttattttttcatcattgcacctcccttctgaaaaataaataaaaaaaaaatacttccctattaaatagagtcatattaaattcttatttatatttttagttattattaaataattaaaataaataaataaataaaatatgagttattcacatgcatatattaattttgagtcacacttcactttcaagcatttgcgttcaaattactcaatctattacaagtaacaaattaagtcacattacatgaaataccatatttgtttttgtttatttttgtactctattctaacaccaatttgtgcatttctgatggaactaattgtgcatttacgatgaaacaacccatcccaccatattcattttttgattttttggtcaaaaatcaaaagttgtgcatcacgatgatagcaaactcccaagccacgtgg

SEQ ID NO: 17203 - DNA, 8398 bp, Cannabis sativa
  modified_base (4972)..(4972): a, c, t, g, unknown or other
tcttacatatctgacaagtatctctttctttgcaatcagagcatacgaatagatgagagacacataccaggttatataatgaaggtattgattcttcattactttaataacctttgagtagaaattcatgttaggattatcccaataaatcaagacttttctttaatacttgcaatgattgattttatcagggtaacctactgttaacaatgaagcgagcagaaacagctgtaattgctttcagagtagctcaagaattgagaccagatattcgttcgtatcaaggtttgtcacactcatctacatatcttgaacctgggttgtgtatatacaagctcgacatattctcttacaagtaatacatacccagaattttataatacttacaacaattgtaatttgtaaattcatttgtgttaggtttggtgcattcttatttggctctctcgaaaatcaaagaggctttgtatgctgcgagggaggccatgaaggccatgcctcaatctgcaaaggctctaaaattagttggtgatgtacatgctagtaactcgggtggcagggagaaggtaatcatctcagcgtcagttcataagtagagcttatctcctattattgtttcgagacatcatattgaggctgaatttgtaacaggcaaaaaagttctatgagtcagcccttaggctcgaacctggttaccttggagctgcattagctctggctgagcttcatgttattgaaggccgaaatggagatgctgtatctctcctcgagcgatatctcaaagactgggctgatgactcccttcatgtaaaactagcacaagtatttgctgcaaccaatatgctgcaggaggcactgtcacattatcaagcagcattaaggttagagaactctataaaattacatccgaagttactttttgtcaagtattaatctgctattccacttgcacccttcaaaatctaaatcatgcgaaacaaaggcttggtcttatagttattacttattactctctctcttgataattatgtgcatatttataatatattgttccatatatctgttttcacatcaaatgctatgtatatatatgtatatatatatattttttttttttgcaggcatcctggatgctaacagttagtgaaaagattttccatcatggatgctaacaaatatattttcacacattgcaggataaactctcagaatgaagctgcgaagaagggtttagatagattagagaaacaaatgaaggtttttctccaaagttttatttttctttcacatttccttgtatgatagggagtaattagtgcagttttatatcaataacttgataaaacatttgaattttgatatttgtgacacttcatagggggtggatccagatgcacccgaagaagatgaggaaaacgatgtagaggatgttgatggggaccaagaagagacagatcttatatgaggactttcctcttacatttcaagatttgctgaaatgagaagatgacactttgcagatcaagctgagcacaagcatgggaactgccgtggatgtcccaagctctcgagctgttatttcagagttttctttagagaacagaatttgtcttttcatatctatctactgagtcaaggatgcgcactcacaaatgtctaacttgaaaccatgaactgcctgagttgaggtgccagatgaacagaaagcaggaaagaatattggtcaatgcctggctattgcagagttgttcatcttcacaacaatggtgatacatctcatgctcttggtaactcattcttttggtgctcttattttattttatttttcactttgtatgtctcaatgtgcccttgtattattatataaagtgaggtgagtggtcgttctcattacgagaaagaaaaaaaaaaagagattattgtattcttgattacccagttatttctacgtggttattatttataaaatagcccatctgttttctgattctactcatttgtgaaattactccgaaataaaaaaaaaaagtcaaactgtttaaccataaatattttagtgtaacaattactttacaaatgataattaatggaacggcatctaaacaataacaaagtagaaaatggcaaaaaaaaaatgttacatctgacatctaatggttacattatgtacagtacttgctacggaaatacaacgtacttgattccgagctcaggtgggaatctaaaggatcttcgtatcagcttcggctcgtggtcattaaaaaaaatgttctagttggtctcctctatactaaacatggaatggtttccgaggtgttggtgttcgattctccattgattgcaatctttgtttgagatgaaatacttcaacctgcatggtaacacacaagacaattatagtaaaaatgagcatcagattttagttacaatacttgattataactagacgtgatacctgtaattgaaaagccctagctcgttcaccagcaagaactcctcttgttgattgcagttcctaaagagtattcaccagcattttgttcatcagagacaagtatataagataatcaatgtagagtagttagtcaatgctaagaatgacttaccttctgggtatcatccaacactgccttgaggaaagctacgtcgtgctctagccttacattgtccgagtggactatattggagaggctgttagcttcttcttgtgcaagttccacaccagctagcttctccttcagtaactccatccttttcatcatgtcagccaactttttctccatatcttgtttgctcttaagagccgatgatgaattcttttccgcagcttctcggcctgccaatgcagcagccaactgtccttctaaaattgcattctttctaatcagtgcagacacttttgtttcataaaattgggatatacttgaaggagtcgataatgctcccagtttactatcattttcagggagaactgaatcacaattatcaacctgcagactcccacttccttggttatgggggtttgaactttcagtgtcatatgcagcaagcatatcttccacatggaacttacctccagtcaaactagatcgaattcctgtatcagtttgacttattttatgttctactgcctgcaataaacatgtttacaatgtcaaaaaaaaatatgcatgaatctttctgatcataatgacaagccatgctcacttacaatcttgcatgacatcccaaaaagtgaaatcaagagcaactaacggaaagcagacatcgagacttactatgtgtaaattattgggcaaagcagggtaagatacagattaaagaaatagtatcttagaatgtatggaggaaaaagttgagaaattgaacagaaaatttcatctctataataataataatgagtcctactttaaatagatatgattggttaacaaatttgttgtgtccctgggtagaaaatttggttgtatattttaggttcacatatcactcaataacaatattgataggaatattctctattaattgataaaagaagtgaacaagaacattgttgggtatttgagagacccaatactctcccaagagctacagatcaatactcaccccaaatgaatcctctcccttctatttattccattacctaaggtgtaacttaaacccataaacccagccacactctaatattcaatatggtaaagggatgaagttacctgtgaaaaagaactttcgtcttctggtttcgtcatcttaacaaccgagctgtactcttcctcattatgaaactgcttgcgaagtgacacattgccaggaacaggatttggatccattagagattctgacaatgataatcgtccagagccatgctgttcaatagctgatgctaaattttgtctggcaactgagtcaactgtgcgctgggaagatccattactgagttgactagccaaatctgtggatgatgagtatttttccatgagcgaactccctgggacgttattggggatatgtcgccgacttatagatgattcattcttctccaaggccagtatttcaacctgaaacataacgaattaagcagacagcaagaaaaaacaaagtaaacacaactgacaaatgagaataacctagtagtgattattaattaaaggcatatatgacaaaaaacatgggaaatcaggatgtttgaagcaataaggggaaatcacctgttgccaattaaatttaaaattgaaaggatttaggcaaacagaataagaaatgaaatgtatgttcctttatcaacctgatctgatgcctctttcttggatcccccaaatgcgacaagaaaatctttgtccttgtgctgcacgaaaactaaactgaaaccctgagaaaaaaaaacagcagggaacatgttaacaagtccatttgccaaaagaaaatgccattaaatacttgcttaatctcttaaatcttaggaaaaaataaaataaaatgtggtacaagcaaaacggccaactctacatatcagaacatttttgctcaacaaaatttaacagcaggtaccttattggtggtgatggaagatgagaatgaagtacttgctactgaccattcaacttttgtaatgtcaaagacaagagtctcgcctcgtcctgtaaaaattcatgtatcagttaacaaacactaatgaaaaacacagcaaattctacaataaatttataacaagttaacaaatttcacaacaggaaacttttataaaatatctgaatctgaaaatagatttctttcaatagcacaaatgatgcaagtaaaaaatagacacccaaccaggacttgcgagtagaaccaaataatttattgtgtggactgtggaagaaaatagtaaagtgcaagatatgtcagattacatgttaataataataataataaagcagagacctatacgaatcaagaagcttgaagattttcctttttttttaaaaaaaanaaaaaagaaaagaaagaaaaaggttccacaagaaataacatatcaaaacagaatgttttccattttatggcatggcatcaattattatctgtcaacccaacacatgtaaacatacagtgagaaaacacaattttagccaaatcaaatgttacaagaatcacaagattgggtcaatagagcaaatcttgttgagaacaatttaataacatagcatgaaacatttatcatctcaggttatggagcatacgtttttttctgcttccacccccaacaatataccattttgttccacatagaactccacagcaaccggctctaggtgatggatggtatccccgcaccttaattctagaccatatcatctgcgggaaatagctatctattagatgtcaaagtataatacattactcatgggtgtctatgaaaagataaaatagttgatcacctaaaagtaataaaaggaaattacatactgtttcaaaattaagtgaatacaaatcattcaaggtcctcgactttgatgcccctccaaaaatataaagcattttgtcatcataaagagctgctgtgtggttggatctaggaggaggtccaggtcctctgcaggtaaattatgaaaggtatatgatcaagagatagcttacaacaaaaggacattggataccaatccaaatcatcccatgactaaacaaattggacgccaccaaacaaagtttccaaagagaacattatcaagaaattcagagcaccagagtccactcacttgaaatgaagaggaagccacgtcaatgacttgagatcaaacctatgcagatcatttagttttttcctcttggcatcttcaccaccaaataggaacagaatagagttcgcccttactacagtatgaccactgcgagcaacctgcagttaataaaatccgtgaaagggacttattatatagtataatgactgttcaaacttgatacagattttaaaagtgtctgacatgcccaacattatccacaaaacaagctcctcataagcatataatttatagtatctatacaccatacgatacatttgtttgtgtactgttaacccagatgtagttgcactatcatcaatgcaataaccttaccggtatgtctccttttgcttccataagagaccagcactctgtttctgtgtcaaacacccacactgcagaaaccaaagaaaagacagccatattttagatcacgtttaacaaaatattggtgattaattgaacaaatgagacacaagggatatttaaccttttactttctcactccatggttcagtttttccgccaacaagaagtactttttttccccatgaaatctagaagcatagaatgtttttcagccacaacaatgagagattcgattactaataactaagatgtaatttctagctcacatagttagtgataagaaataggaaaaataaaagatagatgtgatgtgcatcaactacttaacatcattggcatcctcgaacaatcaatatcataatgcctgccacttaattttctacttctgtaagaagcctttattaggttaaatcttatactggtgtgcttctttaaatataattattctttcagtttcttatgatacttcatatattgacggatcaatttatggcttcttgattcacggcttcttccatgcttagacattgaactttcatctgcgtgaactgtttaactctcttctgaaagtgaacttttagatcaacaccagtgatcataatatttatatcatgcctaaccatatcaaccaaaagtcctaagctcattattgcacagctggtaacatcaatcattttaacaagcaagcaaatatgaattctaaaattattcccaaaaagaaaattaaatgatttcaatcacacaagaaatctattaaaagtatttgtgttattaccagacaatggcccttgcatgaggggatctttaatggcagattgctggatgacaaataaagttttgaagaagctttggtccaggtaaacctatcaaaattaagcacctgacaatggagttgaacactataaccgtttaaatgacaattctattgaacatgagtatagctcttataatgctagataggattactttgccctgaatctaagacctaaagaacataattcaacaaagaaacttatctacctgcacatcatctagcaatccatttccagattcaccacccactactatcatcttgttcccaatcacagctgctgcatgctattgaaaatagaagtaaaactttagtttctcttttaataaactcaaatggaaaatcttaagaaaaaaaaactaccaacaatatccttacattaaagcggggagtgggtttatccccagaaactgacaacaccatccaactctcagagttcgccattgtagagctaccagtgtccgaagcagcagacaaatactgatcatcacgttcctcagagtgaccactaactttggcagcactttcactctgcaaaaactcaaatgaactttagctcaagaaacaaccaccattgaaaatacaaaacccacaagcagaatcaattaagctgagaaaacttacattattagagctgtcatttcgttttgattgaggccttattggacttctagttccatgagtagagtcagattgttgaaccttcaatctgagagcccaaccaacccatttgactgagattattagttctaagaaaaaaaagtcaagttctttaattttatttttccaaatctagagttctgcactacttgaaaaaaaaaatctcaccgtccaaacttcatccgtcgtcgagaaaaaccgagcatctttttcttcttctgaaagaaaagcattctatatcacacaaacaaccatgaacagaaaaagcttcagaagaaaaccctgtagattttgggaaaaggaagctgcattatcatcaaaaagccctaaaagaaagctctggaagacatgaacaggaccgcatacggttgacgttaaaaaaactgattagcagtaatgtcagaagcaaaatcacctttttagttttgtttggttcctgagaaagtcaagtgaccaaacgagaaagagaccagtcgagagagttgtgactcggtgagctaactcgctctctctctctctcttctgagaaaaaactgagctggaacgaggtagcgcgagagagacagggagatagaggaaggtgcgtacgttagtataacgttgtcgttttgtccgtatttaggtatacgatagttgctcttcttgatattcctttcagatttgggggatttttcctttttttcttcttttatagcttaattattgtttggctaattagtaatttttccttccgaactttgacatgtactaaatcgtgcctccttaacttttttggccgttaaaaattcccctgaactat

SEQ ID NO: 17204 - DNA, 12394 bp, Cannabis sativa
  modified_base (8531)..(8531): a, c, t, g, unknown or other
  modified_base (9651)..(9652): a, c, t, g, unknown or other
  modified_base (9833)..(9850): a, c, t, g, unknown or other
tgtcgcctccgaaacctggtgatggctcagaggtctggaccaaaccgactgtaggcatcaagttgaacgtcgatgcagctctttttgaacaagatctcaagcatggatttggctgtgtgattcgaaatactgatggtgatttgatctccgtttttgctggtgcaaagcaaggcaaagttacacctgaaattgcagaagctatgggcattagagaagctttaagttggttgaaaaatcacaactattcccacgctactgttgaatccgatagcctgatttgtgtggctgctatccgaagcaatgagaagcttaattctgggttcggttttattgtggaagaatgcaagttaatccttagaagtttattaaatgttactttatgttttgtcaaacgttctgcgaatcgtgccgcgcattttattgcccgacactctttgtctctagctgaacgtatgttccctattaatagtgttcctttggagttgttgtctattcttttgggcgatagctctttttaataaagaacactttttcttcaaaaaaaaaaaaagtaacataatttatgtagtttttggtaattttaattaccaaaattttatttacacccaaaatttttttaaagacatctcattttaataatttttattttatataaatttatacatttaattgtactaagttttttaaatttttttcttcaaattcatattcttaaaaaaatatacctatcaaataaaaagaaattacattttaagtattatgaccaaaaaataaaataaaaaattatatgaaattttcttaaaaaaattaaaaaaaatatacacataatttaaaaataaaaaatatgaaaataaatcaaaataaatattgaaattagcataaaataatatgaggaaaaaaaaaatttaaaaaaaatattaaaagtaatttttaaaaattatttaaaaaaaattatatttttaataataggttatacttatcaatttatagtgcaactagaattcctattttcattaacatgatttatgtagttttatatgataacataacctagtccaaattcatcctctttagaatttttgtgtgctaggtgaaatttaattatttgtggtgaaatgcgattcttaataattagaagtaaagaaacttaattatgtggtggaatgggtgtattaatcgatacaatttaatgataattgatcgatctaattataatcgaccactaaatattagatttctaattgtgatcggatcagattaaatattatttttgaatatctaattagaatggatgtaatgttagatgggctgatggggtgtctaaaaatttaatacatccaatcaaaacatttaatattttcatttagtttgaatgagtaattaaattttatgttgttatacgtaaaaaaaaaaatatatgtatatataaaaattaatattaaaatttactttttttattggatggatctaatttaatctaatagatattgaatctaaaatattgaatagatttgatccaataatacaaattaaactaatagatatacgtgaaatacatccaatagatatagaatcgatccaatctaacatctattggattggatcgattggatgactgaaattaattgaatcagaataaatggtaaaatttagaattttttataccacatactgaaatttcttacttttttcttttttactgtggggtggaatttttttcaaaaatattgtgtactgtgttaagttttttttgttgttccaatgttatttttagttgttctgttttatgttccactgctgttttataaaaagacaatatttttgaaaaaaatttcatgtagcagtatttttgtaaaagttaacccaaacaatatttttgtaaattttcataaaatttaacatttaatatataacgtgatatgatctaaatagacctaaaattattaaatatgatctaataaacactcctaaaactctatttttatctagtttaaattactccaatataatattgttatgatctttttcgtcatttgcttgatggatatttagctgaagaaaattatacataatatgaaattttaatcaattctaataaatatttatttttttgagaaaaaatcttcaacatttattcattgaaccaaatcaactaacgaatacgaaaaacgagaacaagtatctatctaaatattctcaccaacaccactcgcaatagaagtagttaatgcatgggcaaagccattcagagatcgcaaaataacattacaaggaccgctaccagcaataactaacaaattacaaatctcataaatgattgactgatagacaacattaccacttgggttattaatctagctgacaaccactgttgaatcacaatcaacccacaacagttgaaacctaaatctaatggccatggcaagctggatgtttcgacccaaaatagtcgtaattttttgtgtgggtttttctttttcagttcataattcgtcacccctatttcacgtagttccttttttatttatattgtacgtccttttgttgcatggatgatctgtccttaactcaacacattcttgacgcgtgtctttttccttagctcatccatgcctgtcacgtgtcttgttgtttggtagtggctgctatcatctgtgtccgttggatctagtggcttcgtatcttacttctgcttattattttacttctttgggaaatagttttctttcgtcggaacacctttctgtttaattgtggcgaaatgggaagatcatggtaatgacttttatttgaatgtcttttttcgacgggagtattgtttattttattttgaaacgtccttgctccatgtaacccgactttttctggaggggtggtttatccgtcgcccgtcggtgggctggatggaaggttctcttgaaccctgcttgagcctgttcattttatagcttttcctccgtcggccccaggttatatattttaaaccttgacttattgacttacctcaaattttaccgtcgtcattcgttcgtctttctaattttgttctttttccgtcgctatttcctcgaggtgcggtgcggtccctgttttgaccttttcattttttttttgtttgtgctttttactttgtcttttttcgatctcttgggcttcttactatactatccagtagtgggctgttataattttacatgattattgggcttcaacattgagaatttatctaatttaggcctttgtaccttttacgcctaattgggcatttatttcatttttgccatttttccctccaaataacaccgaacagtaaggagcacagccacagaaaccgcaaattcaccaacagctccaactgcccaagcaacccacacagtacccgacccatcccgaacaacactgcctagcccgacaaaaccttgtctaggaactatcgcaacatctgtggctagagcaaaacccgataccggcgtcaaccacctaacaaaactctataatattggcgcagctgccacttgaaagaagcctttaaatcgatgatcttgaaactctgaaactgcagcaagtgcaagctctggcaacacctcaacacgtgaaagtgacctggcaaaaagtactgagttcctatcatgccagatccactaaaatatcatcaatgcacgctcaaaatcatcacgagacagcatctttgataacctcctcaagatcaaataattattatatggaccttttgttttttttaaattacaatttagaccatgtatatttcaaaagagtacaaaatagaccctaaatttaattttttgtctttttaactaacctataacaaatttctaccaggaacagatgcaaaaaaaaatataatcattcttgtcataatatttattaaagtaaaataagcgagactcgatattgaattacaccaataacgatattacactttacaaggatactaggtaccatgagtactttttagcatttttctttaataaaatagagaatctatttagtaattttacaaaaacaaaagatattaatttaactataaataaaataaaaaataaaagtaagtataaataaataaataaatgagaaaaagaataaagattagcgagtgaaggagtgagtcaacgagcttctttttaggagaaactataagtgagcagtgggcaccaccacaaaatccaatgggcggactaaatgccggactagccgttatgattatcagctgaaattccaattttgtccttgtagccgttttgtacaactactaggttgaagccacgtggcgaatcttctggacaacacgtgttggatggttgaggccccgtgagttgtggattaattttggcagcctatcattgggctacctttatccaaaaagtgcataacgcccctttcggcagctatgttaaaataaagattaatttacgacaaaatttactcatgtttaaatttttatacacttaactcttttattttatttttttatggcaaacttttttttattttagttttaatacacttaacccttttatcttttttttggtagcaaaatccccttatgttttagttttaattcacttaaccctcttatcttttattttggtggcaaaaaccccttaaatttactttttttttgcaaatttaaagttttagttagatactaccgttaaatactaattgaattgttactgtatcaacttcgaggttttaccgttacatatacacatgtgtatacagtggtcatctagttgatatttaactggtgtgttaaatttgcaaagaaaaataaacaaaagggggttttaccacaaaaaaaataattaaggggttaagtgtataaacattaaaacataagggagttttgccacaaaaaaaaaaataagggggttaaatgtataaaagttaaaacataagggggttttgccacaaaaaaaaaagataaggagattaaatgtataaaaattaaaatataaaggggtttcactgcaaattgctctaaaagtaaaaataaatattaaagggcactaatggtgcctggtaccaccttatgtgtcaatatagctattgacttaactaagtatcaagtatataataacttttagagagtattgttaaccaatcgcaacacactcgtctaaaaggcactactggtgcctaatagcaatgctttaaagaaaaatgctaaaaaaaatctatctaatatttttttacttgtcaatatagctattgatataattaagtatcgattcttatatgatttaatgtaataatttttagagagtatagctaattaattataaggtgacacatctaaaaggtactagacagtacccaatagtaatactctatgctaaatatggtcttattcattttattatttattatttatttttttgaggaaacttatttatcatttatttttataattcacaattggtgaaaattaatttcatattatatggtaaaatttctttcaattatataattttatttatttttattggtcatagatatagtttagtgattgcatacttttctttacaaagagaaggtattgagttcgaattctccctcttccgatataaaaaaaaatattttcttttatgtagagtgtaactacgagaagtgcatatttaattatgaacaagactggccggcccaagtgatttgagagtttgagtaaaaaattaaaattggacattttattttaaaaaatatatattaatcaatacttcataaattttgttttcaaaaattaaaacaaaaaatacttcataaattttaaaaaatacgaaaaatttagaatcatatgtatcgatcagattgaaggtttttacgtataaattatattaaaaaatatttattatattatatataaaaggacggcaaaaaaaggatattttaatttaggggccttgtacaatgtcataagcttcctaatgcttgggtgagtagtttcattaatcttttgaggacaaaattttttttaacccccaactattatatttgtagattcttgttctttgaattatttgcttggcaaaaatgatctccaaattatagcacttgcaacagtttgctaatgtgatggttaaacaagtactattatattgaaataaaaactcaaaactcaaatcaatcttaacaagaagttacccccaaaaaaaaatggaagagtactacacttgaagaagaaaaaaaatttagttgatttgtttttgttaaattaagttttttattttttttattttaaattatttttttttagtaaaattggtaatataaacaatttttagttacactttattattattttttttaaaatttaaaaatattgaattaataaaaatcccataaaatattgttcttcaactgccacatttgcaaatcgttagatttttggatggaaggggtaaaagtctaaaagtgatatagttcatgttgactcataaatttgaactagacttttaagccacactcactcgctagattgacgagaatatgatgaaaggttgtagagtaattaatgagagacaaaataatttataatagttcatccactacgtcgcgataataatggggctacgtctactccgagtttttattctcacaatatggtacttacagaaactgtttaagtatcaaaaacttcaaactctagagagaaaaagtctaaagggagaagctctgatcttgcgggtagttttctaattgtgaaaaatgaactaagggagctaatcattttatagttgaagaaggccccaaaaaataggagataaattacaaataaagtatattttctaccgttgatgatgatctaaaggtaaaaattagtttatgataatggtggctgattttttacgtctagtaggtcccgctgttacctagagcttattttcgcaactcccttgggtaaattttagcaacgatagattaagaatttcaaatggtgtgtgagacatagctttgtagagggattaaatatagctttaaaatacaagttaaattgcatcatcaataggataaaaattgagtgagttaatttctttccctatattatttaatatattttatttattttagacatataatattactatatatatatgcagatatacatacagatataaaataattaaaaaactaataaaataaatttaaaatagtactcatgatatagttactcctcaagtaattactatttattgctgtaaaattagtgtaaaataaagcatataaattgtatgacatttataatatattaatgaaaaaattcctaaatttaaagtttgagtgctctaatgactagacatatcttttatatcatatataatatatatattgtatagctaccaactacaaaataatatgtatgcttacttactcaaccaattgcttatttaccacttttaattataacaactacattattcaaataataataataaatatactagtctcagtattatggttgtagctgcatgtatctaaatactatatatcacgtattttaaaatcacctcataattaagtaattaataaatatttgcagatctttaaatttttagtgacagtactgcatgcatttatcctaattattttttagtatattagtattatatactagtttggttttattatatttattatttaatagcaggaaaaaagtttatctttcagctttcaattttatatataattatccatattacttaatgaacatgttcatgttcttgtagggtgttcatgaaaataataaaatattagtgatataaaatttgatgtataacaatattaatattaattttgattaatttatcaaagatacgcaatgtttgtatttacatgatttgaaaggaaagcttattaagaacactaagattaattaagaccatttcagattactgttaatatagtacaaaaacagattattgtaaagaatacaaagcttaattaattaattagggacacatatagaacaattatataataagattggttaaacaaaattgtgatacttgtaaatagttcaaaatttttaggttgtaatgtttgtttgattgaatatatatatgcttatccaaaaaaaaaaaaaaaaaaacttctaggacaatcaataatggtatcagtatttttagaattgcaagaaatatgtaaatgtatttgctctgaatatagataataaatttgttcaaaaaaagttaagtatatattatataagctatatatacgcttacactaataactttttgttgttaatatatataagctacacgcttatacagataattttttattgttgtcgataaatagtgatttctcaatagaaatagaaattgtatagagacgactttttatttatcatcaaatagacttgtttcaacttgtttgtaagaataaagtgtggttaatgttataatacactataaaaaacttacttatattgacaactttttagtcataacataattttttttgtgactaaatgtgatttttagtaacaacaaaatgttacttgtgactanaacatagtatttagttacaaattatcattaatttagttttagtcacaactaaaatacatttagtcataataaattgtaatttttgtgactaatacttttattcacggactttttagtcacaacatagaaattatgatttttagtcacaatttttttcacttttagtcacaaattttattataactaaaaataagattttttttgtagtgataccaccaaattatgaccccaaactactttaatcataacaattttgatttttgggaaaatattatagacaaatatatgcatatacaatatatatttatacatctattctcaatatatttttgtttcttatttgatttggctctttgagacattgtatgagagttttctttgcatgtgtcctacttcaaattcattcccctttttaccaaattgtgtcatttttctcaatttgtttatagatattcactagggttaagctaagaattgagttcaattgaggcatacaaggatgtgaaatttggtgttgtaaaaccaaagtacatgataaaaaatgatgagaataaaataaaagctagctataagtaaagacaacaaaacaaaagcatattccttattaaatagtatgaacccatatgagaataatatttttctgttcatcaaacaaaaagagaataatattattctaaaaaagccaaaaatattacatttttttacttcttctattattgtggattcttttgttggcgattcccacactttttcattttttttttaccttatatttattaaataagtggtcacataattcgttgtgggtagggtataaggttcttctctaatcattattaatattcgattttatatattaattaaattatatctctctttttttttttataaaaaaaagatattaattcaacactcaaccactttattattattattattatttagtggctactaaccttaactaataagattttagtcattatttgagtaaatattatatttggtgtaatttaatttatatatatataaataaatccggtgagggtataagtagattaagtttgtacttagagtccacttagtttaggactatttttttttttttaaattatatatatanntatatattttttttattaattttagaaaattattatatttttttttttctatgtcgtactaaattttaggtcggcctataaatgaatttagttgttttaacctcttctttgtatcttgagattttttttagactttgtgtcttttagtggaatatatcaattttattttttattttttttnnnnnnnnnnnnnnnnnnttattttttaaaaaaataaatttatcactggaaaattaagaaaagttatgggtcctcatggacaatcataatttctgaactaattaattatgtaggaaatcacaaataacatccctaaatcattattatttattttttcacattgaaactaaagtcatatgtatgtagtttccttaaaaaaaaaaaaaaattacatagtaattctcttttaactttagtatattaaaaaaattacaatcgattattaattaggataaacatgacagactgtcataatcataaatagtggatttcattgtaataattaagatgaattgtttttagtatatttagtagtacaaattaacaagtgtcattaatttgccttctaataaggtttaagttctaataaagcatataattacagcaaatatgtttgatatattttagctataatttatacattaggtcaaccacattatatactttatacttaattatattattattactcatattaaatttagtagatatatatataaatttatattctccattatcatattattgcattatctcttttatttgcttagatcacataccacatcacatagcccaaagccaaaattatataattaggagggaccagtagagaaataataataataaaaaaggtttctttgaaagcaaagttgatgaaatatgacacttttcctttttgatcaaaatataaatacatatagtccaaaatatatacataaatgtcataatcagacacacaaaacggtaatatctatacatattgaaaagtgactatacattttaaagagatattttgtcatttaataaaattaaattgtgtaatatatatataacaacattacattccaattggataaggtctctatctatgtatgaatagaaatatatgcataaagagagagagatgagttggagagtttggctgtgcaaatggtgatatgtctcttcacaccacaaacttaataatatagggattattttaaaaatacacaaaaataataaaaaattacaaatagttattctgaattttatgatttttaagattttatttatagaaaatatgatttttttttttatattttttttttatgttgtattcttattatgttattgtttgtttttttgttatttttatattatttagatattattttcttgttattttcatgtagttttttttttttgttgttttcgtatttttgttatagaacacagtaaaaatgtaaaaaaaaggaaaaatatctttgaacgtaaaattgtaaaaattttaccaaaaatagtatttatgtaaattttctaataatatatataatctctaaattactttattgcgaaagctgttttttttttctttttttttttgtaaaataatttataatttaatttatttttagtatgattatgtacattatatttgtaacatacattttactatatgttttttttccatgtgtataaaaaagaaaaatatagtcattgtttgaactatgtttttagcaccataaattatgagaaattttctaaaaattggtaaaaattatgttataatgataatgtacaatagctatatgaaacctgaaaattattgtggaaaccgagtttggaatgtgttgggcattgagagagtttaagatggttgttatgggctgaaccttataaaccacttaagacatttccaatggtgaaagcccatgaactttttgggcttgacccacaccataaagcccatattagttttgatcccttatgggcctacatcatatattgggctcacccctaatttgggactagaaaataaatttaatcttttcatatatttgtttgaaattatttaatattataatgtaataagattaataatacatggtagtgttgaagaaataatccaaatttatgttgggtttgactataagattatgatcgtagacattttatacaatgttggtggactatctagtcaatgaaatgttagtgatagtgctctatcacataattggttgaatttcttttccaatcacaaatttatagtgatgatagctagttgacttagttttgataaattacactaagagctcaatttatatttttctacaagaaaaatcaaattataattttagcttacaatatatgtacaaacaaacacaagtggaataaaaataaaagaaaaaaaatctattagagcctactttagatattatatctaagacaaaatgttttagttttcccttatttttctttcttttttttttttttaaaaaaaaaaaatatggaagtctatagtttcatttcaagagaaaaataaaaaggtttccataaaaaacataaaaataataatgaaataaaatgttctttagcttccacccgaatgcagcatagtaataattatagtttataagtgtgattaatgccattgctaaaaaaaataaaacaaaagcaaagataacactaataccccattaattgagtactcaagtatgttacttttaacttgctatgacaacgtcttagttaatatttatgttt

SEQ ID NO: 17205 - DNA, 8010 bp, Cannabis sativa
  modified_base (88)..(96): a, c, t, g, unknown or other
  modified_base (6704)..(6707): a, c, t, g, unknown or other
  modified_base (7414)..(7418): a, c, t, g, unknown or other
gcaagctactgaatacataaataacagtataaattatttaaatagctataaataatttcataaaaatcataaacaactgataatttcnnnnnnnnntaagcgggctttacagttaaactaataaatttcatctttagtaactttcccaacaagagtttttttagaagataacagtagaaggaaaattcagctaagatgatacatgaacaaacggtgtttaatttacaagaaaaaaataaatacttgtgatcttcaataaagtccctaactccccacaaatcaaacaagttgtatcattacaaacatcaaaggaagccaaatgttccagtattttaagccttcctaaaattgttacgcttgggtacattatctctgtcccaaatttcatatgatgagaagaatacataatatgggaattaaacttttttttttttatgaaccagttataattttcatcactccaaatgatttcgtacaatctaatagtctcaccgaacttggtaagctaattttatctctatacatgtttttatttactttataatgagcaaaactattcatctctatgacactatcttttttaggccacatacaaaaaaactctttgtttcacaacctccttaactcttgttactaatctgtccacatcttcatttgtagttttccaaagtttgtcatttctagccttccacaaatggtatacgaagctagtcgttgttgtgcaaacaccttctttttgtacttgctacatttagctctctcaatccacctcaccaactttgtgactgatgtagtttgcactttccagctaagccactccttcacttttgctaagcattcctaagaaaatgagcaatcaaagaacaaatgctctaatatttcattctactgaatgcaaaatagatagcttgcatcccttgtaattccatattgaagcatcctctacattaagagctatgatttggagtattcagtctatcccaaacctcattacaccgcaccttactctgtccaggttggaaaatacagacccatttctagattttttaaaaaaaaaaaataaaaaaagatgagtaaattattgattttgaaaaaggaaaaaagaaatgtatttatataagaggctgagagatgatattttttaaattataaaataatattaaataaaaaaaaataaagaaatgaggttatattatattttagaaagatatgttaaatgtattggtgaaattatatttataattttttatgttttttagaaatggggttgattttaaattgagatgggacacaaaatgagacaagaattggggaaggtgatttggatccaataactacaatataaatatttgtggatgaatttttaattaatacatcttcaaaatattatatcattttattgtttaacattatatttggtagaggagagagaagaaccgagggaaagggtggaggaaagaaagaagggggtgataattttttttatttttttgctggagagatggacgggaccctctccctccaaacataaaaatttgattccattagaaagaattaaataaaaagacaaaaaaaataatgtataataatattatagaggataatattgtcataattttaatatttaatttactatttatctttggaacttcacacttaataccaaacaatataaagaacaacaattatattcttcatctttcctattctcatcatttctaaactcctcatctatcatactctactttctttttacttatattgcattaaggtagaaattcaatttttttttcaaaagaatactaagttcatcactaaagaaagaaagatggaaatcacaggaggaatttcgtccctttaataaaaaccagcaacttggctattgactctagcctgatttgctaaaccatccgcaaaagcattaaagctacggttcacaaagaaaaaattataaaaatgaaaaatcttaattaattctaaaaccaaaagggaaactttaaaaaaaaaaatctaatttgggataacactatgcttctgaaaagcttgaaccaccacttgcgaatcaggataaatcgacacctccatccaattactctgcagagcccactcaaaggcgaacaaaacactacctttaactccacttccaaagcacacgaagttgttgaatgatgaagaaaataagcccacaaatcattttagatgtattcttgtatccatggatattgatatatggttaaaccaataaatttcatctttagtaaatttcccaacaagaatcttttttagaagaaaacagtagaaggaaaatccagctaagatgatacatgaacaaaaagtgtttaatttacaagaaaaaaaataaatacttgtgatcttcaataaagtccctaactccccacaaatcgaacaagttgtatcattataaacatcaaaggaagcaaaattaaatgttccattattttaagccttcttaaaattgtaggtcagctaaaaaactacgcttgggtacattatctctgtctcaaatttcatatgatgagaagaatacataatatgggaattaaactttattttttttatgtacattatctgagggtcctactagctctcacaatccttgttgtagtacctagtcgaggttccatatgaatgcaggtacttattttcctttgcacatgtggttcatatgaatcgcgaatttcttttggagtttgtccctaccaaataaatctaaatgactatagaatccttgccactttctttatcttttaccacttgagaaattggcctatcacatcccctcatgagttaaacttcctttgcaacctaaaaggaagtccaactcaaaaagaagaaggcttctatcactttcgccagttcagctcatacataaaaaatattatcaaaagtaattgttgtcattagggtttttcaacaaaatttacaaaccgtccaaccagaataaattgccaaaaccaaactgaataaactgacaaaaaaaacaacttgaaataatacaatgaaaatccaaaccgcccaaaatatattgtgtggtttacatagatgctagaaaaaatgctttggtcacattaattcttggcaaattagtgggagggacttgtgccatcttttgggccctcaaataggatatcttaatttatttggcctttgtaagccttggtcaaagtttcaaggttgactttttttatttcttaaaaatcaggtataacacttctaaagtggctaggcttgccacaatgataacaaccattaaggttttttggtcctcttaattgggatctgcctttcccatttcctgttcccctatgtagtcatctgctcttactctttcctctattattatagggcttcttgtggtgtgatctgccatgactcaagtttagttcaccattagagtccccccttctctgttttcatctctaagtccatggatttcaatgctggcatgactttttctagggtaaaagacgtccttacatactttatagaaatcttcatttttcataataaatcttgtagagattttggaattataatttcttacttttcatcacttatcacttagagtctcattctctccagagttaacaagcgcaatatgcatccttagtaactcatcaagattttcatctagagtcttggagtaactcatcttgtagccaaagatctttcctttaaaaagatcttattggtgagagacttctattggaaatttctcttccaacttcttctgtacccttgctaaagtctcttccttatccaaagcctgattatagcatctgataggttaaagattaagatccatgttgcagtttcaaggtactcttcttgttgtatcttagatgtacccttcgtccattcaattcattcttcaagaacccttaagcttctactatgccaacaatgatctaatcttgtttctccaaatcctataaccacttgacccatcaaattcatctatatcaattttaaagttactcattttattatagccagtacataaatctaaaatagaagagctagatttagagaattctagtgaattgtttagtggaacatccactagtccttcaagaatgaagacttgttcttgtgtattgaattgcccctaatcttggggatcttcttcctccagaattattgatttcttgttctttgttatgttgaatttgttgttgttgtgctctgataccactattagaaaacacaaaaattgatattaggcaattttattaattggaaactaatattattgcaaatttacactcatccatccatgagccccaaaacaatagcctaacccgatcaagcccaataactcttgattcaaaagcaactttaacaaaaccacgagtcttcagaaattagggttagaacaaatcttcgagaaccctaggaactctttaaacgatttagggttagagatccacacacaaacacagcaaaacacaaatcaaaatcaaaatacacagagagataaagtgatgaaatcaaatagtaaaagaaaagcatgatgaatattgtgtcaaggttcacctacaaaaagatgggatacgtcctttgttcgagctccccactgagatacttgagtttccatcatcttcacgtatgaatttacaacttctctattgatttcaagtcacattcattaactgataatattttaccatctttattctccctttacactacttctatttaacacgattatgctctaactttctttctttgttttctcgcaaacaacttaaatggagctctctctcactcgtctctccatggatcttctctctagcccaggtattgaatcatgtgcactaaattaggttataaatatgttgtaagtcaatgagagcttgactgtaaaatagttgaactggatttcagttgtaactattttttaagttgagtcgattaaatcttgagagcctgttgaggttcttaataaggctccaaacaagtgatttaattaattttgtaactgaaattgtattggtcttaaaatcaaaaagaattttactcttacaatactataatgagacttagtaatttttttctcttaattcactatttttcttttctaataataaaataaatattttttcatcttctctcttcattaaattttctccatcccctacttaagtaataattcattatattttaaagtgtattgttatggaacactaaaatactacaacctcataaagatatcttgtaatttatatagcagctttaaataatttttataaaattaaaataaatgaaaattatatcaatagcaatattacaacctcataaagatattagtcacgtgttttaacatttctttaatttaagtcttccactcttcttttctttcccaccaaataaatacatttcttccccactctccacttttccgatcaatcatttattattcttatctacttgtaataatttcatccatcccccttgtagtgctgcgtacaattcacgtgtatcgacactctatatcccacgtcccttaatttccaaaaagtagaaataaaatattttaaatactaaatgtacgatgtcacaaaatcaaatttacatctatatatatttgaataaattattataaagtaacgcatagtcagtagtactccgattatatatactaagatttgacaccactacacctaataatgtatatatacgcgacaaaatataatttatttgtatatttttcatccatcactattgacaaaatgcattaattatatgatctgatcactttcatcaaagaaaatgtatttctatagggagtatatataatcctattaatatggaaatattaatagaaacaaatgtaaactactttattgaattatatatttataaacttagagataagttgtgtctctaaacaaacttgcagcagcgctatattattgggaatcttattttagcatatattcctcatgaatcatttcaaagagaaaaattaaaacattgagtaggttcgttaagtgtaaaattgggcatgattatgcataaaagtttgcagttacatattgtaatcttaccctatagagacagagcatgaaactttttacatttatatataatcggcattgacgtcagatgcatggtaggccacgtacataatcagactaattaattggttattctttttcataccaaatatataattaattagtttattaggatattgtatttaatagctagggtgagtggacgacttggatcacatgcacgtactattatttaaaaaaaaaaattaatttaagtagcgttttgtaacacttttattttaaattttttatttttaaaattttatttttaaaaaataaaaatgtgtttcataactacttttattttttaattttaaaaataaaaataaaagtatgttctgtaaatttcatttttttttaattttatttgttgattttatttaattcgggtacgaggctgggtccgaggtcgggaccgggggcgggtccaagtctgaggcaaggttcgagttcggtttccaaggattaagttagggtcggattccaaggtctaagtattgattaaaaaaactatttactaagtctggttaccgagtccaacttgattatgccttgaacgcataacctttaatctcaatatgtataacacataattaattgtgccactgcactatttgtctattnnnnatagacctgcatgttgcgctcacatgcctatttatgtctatgtggcgcagacctacgtgttgctctcacacgtctatatacaataaggccttagtagggtttacctcggttctggttaccgagcctaatctggatatgccttactcgcataaccctacccatatatatttgtaatctatacattacgttcattccgtggtttatcctggtgatatatagcaggtctaacctagttatgtcttacacacataattcttaacatacccgcatgtattcaatatttaccacatcatataaaatcttagggtaataatcctaactcagattttcactggattaataacattaccatgtattaacgctttcttaccttcttaatgttctaaggtaaaaacccaagattgcattaaaattaaactcaaggtactagtttaccgagtttagcttaattatgccttatacgcataactctttattccaacatattcaacatggcataacattaaacatttgttaactactagggtaataaccctggactaaataacctctcattttagggtaataaccctaatcccgattctgaattaatcacaatcacaacatacaatatgatcgccactgtgcttaactctacgtgcatactactgtcttacctgatgtctcgtgatagaagagatttcaaatccccgggtgctcctgaccannnnncggtaatcctagtcacaaattccaagattttcacaaatagggttaacccctgattttgaatttataaaatattctcatggcatttaaaattcagatattcacatagatcagctcgaaaagatctttccaaagatataaagaactcccaaatcggagtccggatcacaaagttatggctatttgaagtttgcataaggatctgcccagaaagaaaagggcgcgccgcggcatgctaaataccatgtcgcaacacctgggttaaaaacccagaaaactagcagcaaaacacgaaaaatcagcccccaaaactcaactaaaccttcccaaatcactgctaaacttccaaaccatcaaataggtctttaataatcatacagagagtttaaaatacatgctcaaacatcaacatccatactaaactctgaaaaattcagattgcataatagcacaaaatcatttcttaacctagggtattacaattatcccctccttatagaaatttcgttccagaatttacttgaataactccggatatttctgctgcatatccgtcttgagttcccaggtgttggaaatcattttaccaggatct

SEQ ID NO: 17206 - DNA, 5498 bp, Cannabis sativa
agtagtctcaaagtgaccatccttaaatagataagccatgtgatagaagctggtcatggataagattcagcccaaaaggcattccagttcctggtaaagatgtataggcagtattcaagaatgtcaagtaacagaaaagcatcaggttcatatattctagaatcaaagagaatattccagttatgcactataggatacctctacaaaatccatcaagtagtcaaaaacaagatattagaatgtcatacaaaacaagaaacatacccaatcaccgcccagctcagaattgatctcacttgacttggcatctcacttgacttggcagttgttattgataaccccaagagaatctttgcttagattaattggcagccttctgtattgtgaactgaaattgttggagctgatccgtacagagcataaatacatataaataagaaaatgcatttattaacattttaggaatatacttgcaactgattctcaacataatataaggcctctggaccaaaccttgtgaatcataacgtttaaaagcacaaaaggtccaaattcaaccattaaatcattaagttagttgagggaaagataaatagataactgacattgcacctccaccccattgcagtttacaatctcaaaagcattataggaaaaaaagcattgatgagcatgaattccacatcacaacagattgtttctgccacaaaagatattctacttaccctaaatacaactcccatcttagtacatttgtcaacagtgatgttatttactttacctgaaaatgagaaattatgataaactaaatgcgacttctcatgtaagacagaaactataaaccgtgtaaatacacataaattaccttgaaaccttcaaaatagagtcttttcatccgaaaatatgcacagattgttttgaatcacaattatcaatcactaagcttttctttccaatttgattctcaacaacccacctacaaaataaacatccatttgaaaacatcataaactggcacaatccctatacaaaataaatcaccatgtagatgtaataatactcacttatgacccatttcaagttctagttttgaggccctgccttaaaaaatgaaggtgcactggtgcgagtctctttttcaccagaaccaacaacaccagttcttcctgcacagttcttcatcttcatatcatcagtaacctttctcaaacctacaaacaaatagcaatcaggccaatacattcctaaagcaaacttaatagataaaaccaaaggaaagaggcaaaaaaaacataacaaaaaagaaaattaccaaacgtcacaggcttcccagaattaatttcttggaagacagcagacatcccttgcttacaacctgttgatgatgatgaatgagaagattcagatgtaaaaaaagatgctggcagagaggaggaggcgcaggagcactgggtctaggagcttttgacgaagcagcagtgactgctttcccagtagaactccaaacttgacccaaagaataattacttttaacatagtccctcaaacaaggtaaataaagctccagggctttggcgcattctacatggtttgggtatttgcttttgtactctacaagaatctgaattagaaatgccatgttcatgtatagtcacaaaactctattgtcattgatgaagcactacacattttttttctttttcttttgaagtatttagtacacagattactacccaaataatgaagaggtcctaggtgcaaacatgagacctctaccttacccctaccctccctcactacccagctagcctcagtggtataatgaagactatacatgaaaaatgtcatgtgtcacaaatgctcaaagtggttctgcatttaatttgagataggatttttttttttcaattcatctctaaaacattaccaaagatcaaagtagatgtgcagtttcagactgatcaaacaacttaggaaatagctgtgataacccacaatatgcttcacatatgtgctctctacaatggataaaattaattaaatcaattcagcaatcgagttaatgtgtgaagcctaggcgctccatctccaattgaagctattgctaaatggagccagagtaatattagggaagctacccccaatgtggcagcttgcttttgatttcaacaaagaggtttttccacgaaaaattaaaaaaaaaaaaaaaatcaacattgttagggcacattttggttttgcaaaggatggtggatctgtattctgtaagtaaaatataatacaataaaaaaacatcaattcttgttttttttttttcaatcataattatcattataaatatatctatttgtacaatcaaatcaactattaagtattttttatcctaattatcgttgaaaaagaagaagataaaagcaatgttcgtacttgatacaacaacaacaacagaattaacaatcattcaatcaaccaatatatatggaaaagaaaaactatgacttttctccatctccaagcagattatatatatttgtggaaatggcaattatgcttgttactactgccaagactatcattattgttgccatgattttgtcctttcttgtggacacaccattaacattcctgtaaaatgattcgaaatcaaaacaacaccaacaaaataacttgaacataaaaatgagcataatgtcattccaaacaaagagtgggtgaaaagaaacgataacaaaccttacagcaatagcaccaggaaagataaagccaaggcaaactgcagatgttgaccccacaaactgaaagagataccaaatgtttgggaaggctatggctgctaagtatgaaaagaccaaaagagatattgtgagaaccaaaaatcttttggtgtctgaggccaaaagggattccttggggaagagaaattcatctatatttgctcttaatgggaagttcaagagagggaaaaccagcatcagatggagtgcatagctcaatcgaaccgcatcattaagcactgcaccagttggtgtagcagagcttctatcgaaattgactagtaagtctggcatgattgaatctccgaagagtaagtagccaaataggccgatggcgaagtaaactgttgcacaaagaactaatgcaattcggacagctaagagcatgtctgatggtttgcttagctcaacaccaattggatgaactgttcgaattggtcagaaagaattagcacaataattgcaacctatatatgaacaaacatttggggtgcttcttgaatgttatttaccattaaaatgaaaagtgaaagctgctacaatgatggggacagcagtgaaaaggtcaaagaaggatgtgtgttcgtctagatgaggtattagttttggatccttggttttgccttggacaagtgcaattattgccatcacagtacatatgccaacaaaaaccaaggcaagaagcactgatacgaatgaactgaacttcaacaattctgacaaaaatagccataacccagatgaaaaagtcagcaaattcaggcaaaaacttctgaagcataacccaattcaactttattcaatatgaagtaacagagcaaaattgcagtaggtttgactgacctacacgccttagcaaaaccaatggaagcataacgaaaacgacaatgactaagatggaaaattcgcgagagttccaccaatggatgccaaaccattctcgcaaaactcccaagtgtacagttcctccagattgacttcccgaaagtacatcccctgcaattaaaaatgcaaaagcattcatgaacaacacgattaccacaaaatctttccacatatattaaatctgtgatcgtcatgtgattttgctcatagaaatcaaattaagggttgggctacttgaatttctgataaatgggtatcgcagtaagcatagagacttgaaacgaaactaaacaaatcctaaatcagaacagcccaagtttctattactcataagcttgtcaattgaagcataccgataatgatgaggtaaattatcaaacacccgagattagtcaccatgacacaaacttgggtagccaccgaaccgagtcggccaaatgactcgttcatgactccagcataggtaatggattcgccggactgcgtaaacctcaccaagaactccactgatacttcagctaatagaccgacaatgacaataagtgtaaaagcgggtattactccgataacattaagagttgccggaatcgacatgatcccagcaccgattatggttgtggcgatattgaacacagcaccagatatagacgcatgattcgccccctgcgtttgctgtttcggaagtagcggagcttgtggttcaatcgccggcgacatcctcccgagtccaattactttcccttattataaactttaatgctttttagtccatattctccctctatatataatggatggcccagctttggggcagtttagtttaccaagatgtccattgacgtgcataagtattaagcttgttcctgtgagggtaaaatggggagagtagggttaaggtcaaaagaaagtgccttatcggtttaaaaatctttgtcatctacagccctgatacgctatacatacaaacagttagcaattacacttgaaactatttataatgtttgaccatatattcagattgccagtcataaatataaaatattattatttaaaataagaacaaaaagatgaattaaagggaacgtgtacatccatatcgtgcacgcaaactaaaactaatatcatttttggcactaaacaaaccatttctatcaaccaaaaatggcaaatgagagtggcccttaagactatttatatatttaattttcgagtcggaactttgtatttttatggtataaaacctgtttttagtgtaacatttcacataaatcaaacttagagatgggactttaacccaccgtccctcttcatgagttcatggtacattctttttttgcttttatgagaagaaactcaatggggaaaagaataataattaacagtcaagcgcaagcatcagtgtcttgtataatatgggcaggtaagcttgccaatggggcagagggcagggggcagggagatatggtggttggatggagatgtgtgcttatccaaaattttagatattttcttattttttacaagaaaaaaacatacatgtttattattttaaataagatattttttcattattattaatttattgttgagagaagcagttaaaatctgaattattgtgtctcaatctctatatcactgttctgtaactttttttttttctttgattaaaacttgccttcattgaaaacgaaaaagaaaactaacgagtcagatgtctcccacaacagggggtgactccctaaaaccagagatgtttggcacaaccgattctctctggcttgtgaggccaggaaatcccccaaactattcaaattacgggaaataaaaaaaaaaaaaaaa

SEQ ID NO: 17207 - DNA, 4352 bp, Cannabis sativa
tggtatttttcattatctattctcatctgcagaactataacaatatacttcactattctttgataggatacttgtacatttatatctgaattgtgtgtatgactttgaactttccaggagtttggcacttcgatcagatgttactccatggagagggagctgctgcttgattatcttccattttcctttccattcctacattgtgttttactagctctttgttctaatattgtgtctgaagacttttagtaccttgtgttagatttacaagtgcatatggaataaatgatagtctgaatctgaattaaatcaacttcataccttagtagttacagattaattgagttttgcttggtagtagtgccattttttcagccacattacatataatatgctttgtattgattgataaataatttgttggtagtagacatttggctgtagattggcctcaagggtggtccccaagaacacaacattattgggaatttataattgagctcagtaacaccatcactctcaagtctcaaccctatgattgtcaagagtaattttggaaagaagggtaaagtgacaaaaaaaaaatggcataattacaaaaatatgattattgtaaagtataaatgatagtaattttgttttatgtaaagatcctcatcaatcattctcttaaagaaagctctcccccaactcaaggtcccataaattccataatggttattagtcatgttcacacttcccgttgtccttttatgactttaaccgtcttttacgtttgttgcagctttggttaaataaatggctaagtagtgtaactgatatcaattaataaattctctacattttaggaatggattattaataatttaagaacatttttcaaaaatttaataagataagagaccgataacgacctgtgtgatctaaattatgctactaggaggatctcatcaaaattaaaaataattaaccaaggctaatggggattagtgtcttttttctttaagccagatgccacttcttaggttgacctatttcttgcaggtttttatttatttttatatgagaggcttgctaatcattctacttctaaataaaattaaattatttcgttctttccaaaaaaataaataaaaataaataaataaataaaaaaaaaaaactcccggatcttttggatttaggattatgtgatagaaaaaaatctcaaaattaaatttcaagaaatataaagaaattctcattttttttaatgcaaaacataatttaaaaataatcaaaatatataatgtatatcaaatttgttgtattattttcataaattcaaacaagacctaaaattatggatcagagcttgaccggcattatattcttatgcaattttttcattgaagactgaatttaattttacggtgtctagaaaccagatggtaattaattgatgttaaaattaattcttcgggatgattaagaaaacttcggaactggcctcgcaaggttaaattacaagaccattccatcaggcagaggcaattagtaataacagaaacacaccctccggacaattattaaaaaacagcaacagacagctttctgaatacaaagtactaaactcataattcagcaattaatttaccagtaccaaccataagaaagagcaaaatttggcacataaaaatccataatatggtccagctacgagaaaaagaaaacacctgccaaagtcctcacatatttatggctacaaataacttgttaagctgtggctgctgcttgggatgcaagtctcttcttggcctcttcaaggatggtcagcttgatacctttacccttgggaagagatatccatggcttggagcccttgccaatggtgaacacattccccaatcgggtagcgaattcatggccagtggcatcctgaacgtgaatcgtctcaaaagttcctttgtgcttctccctgttctttataactccaacacgacctctattccttccaccagtaaccattactacattaccaacatcaaatttgatgaaatcagcaattttgttgctctccagatccagcttgatagtatcattggccttgatgagaggatcagggtaacggatggttcgaccatcataggtgttcaagtatgggatacccttttggccaaattgcacagacctgactttgcaaagcttaaactgcaaaacacataaatcaataggacaaagtgacccatgagattaacaatatgccatgaatataaatacttgcgataatcacatgtgatacaaagcatggccagtgatatggtttgctggccaattcttataggtgtttgatgtcaacgggaacaagtataccctttctgttaattatatgcattatttacaaaaagaagcagaaaactaaagacttatttacaggaatgtaagataaatgaccttagcttcctcatccctgaccgagtgaagacggaaccgtcccttagtatcgtaaaggagacggaaattctcatttgttttggggattgatacaacatctgtaagagtaaggagcacaataagaatgataattcaagacaagacaaaagaattcactcctaataccaaaataaatttgatgccattcctaaaatttgatgccaaattaaaaaatcgagaagacaacccagacataaagttacgttgaatcgttagagataaaggcactcagcataaattgataaagaagagagtggaaaatagactttcaatttccaaacgaagttagtcatacatctacttacacaagtacaacgaagtctttcaagtaaaacagaaacaaaatctcatatcggaatttatgacacattgacactgtttccatctatctaatgtaacattttaaactgtgatacatacataaagttcaaattacatacccatgaaacctgaaggatattttttatcagtcctgactttcccatcaaccatgatatgtcgttgcatcaaaatggaaacaacctcacggtaattaagggcatacttcaaacggtttcgcaagattaggattaatggcaaacattccctggacttgtgaggccctgatgaaggcttgggtgcctggagaagaataataaaatgaacttaagatataattaattaaagtgacataaaaatcatttaacaaatatataaacttctaaaaaaaattaacttacaaatgctcccccaagtttgtcaagcatccaatgctttggggcattaagcctcttcaagtgcttcttcaaccctctcgcctgaaatagtcacaaaaacaattttcaatgcccacaagaaagcaataagcaaaaatatatctaatatccacaaagaataattcagcaaccctttcaaaataaataatgcagcatcagcatacaaccataaatatacatatatatatacaattattataagcagcgtggaactaattttgttttttttttctttcagaaaccaactaacaatatatgtttcacaccatagccgctcagtatcttaagtatagaatgcctaagcctttataaccccataacacttacggcatcacattacagcactggtgaacaaatacaaaagctaattttgtttagaacaaagaacaaaacaaaagctttgtagtttgtgcaactctttaacgaatgaattaattgaggagtcaaataacccaaattccattatgttatttatacacgatccatacacttcatattattaaattctagtgccgtttttatatttctggtaactggacaagaaaatcaaacgaaattgttgggagaaaaaaatatatgtttcattagacagatcgatacagcttttacaatgcatcaaactatacaaaaataaagatcaaagtttcacaaaacattcaaaatccgatcagtgacacggggaaaaaatagtagcagtagttgtagccacatcatctgttctagttcttcaaaactaaatgtagtagtacaaaaatagtcgaaaagaccggtaaaattaaagagagacaaatatatgctaaccattttgggattctgagctacaagatctcagaggagcagtagctgaggcaatggctctctgtatcgactgtatgcgagagagctcaacaacacattcgaaaaccctagcgtggtttttagaggttgttatctgcgtttgttgtgttacaaatgggccaatcttaatcaatgggccagtcaacaaaacaaaatctaaatgggcttaaaatactggatttatttcataaataccaaaaaaggataaaaataaagggaattttacaaaaatactgtttttggactaaaactttacaattatactgggacacggcaaaaacaacattt

SEQ ID NO: 17208 - DNA, 5697 bp, Cannabis sativa
aaggtcggatcagagtcggatcagatttgacccgccccattcacaatcctaatgtaaacttcaaatcctcgtctgaaacaatgtatttaggagctccatggaggcaaattgtctcctccacatacagctctacatactgatccattgtataaatagtctttaccggtagaaaatgagctaactttgtgaaatggtccactatgaaccatactgatttctgagtaagtcactttctagaaaagtgaaaatatgaagttatgaatttgagtcttctgatttcatagctctcaataagtatgaaaaactagacaaacagtcgagacaaaatcagaatcggataagttgaacctgaaacactttttcagaaataagattggaaacaacccaggttgacaatatgtcaacatggctgttgggtgcagttttaggcccttggacagtttctattgttccccaaaaatactagaatcttaatctttgacaaaaacatagaatgtgcttggaatacttttcaaaaaatctccttagaattggcccaagttgacaaaacgtcaccttgggtgttgggctagcaccacgtgtcaacctgggcgctattccattgttttggcctctaggtttgtctgtttcttacctgaaagtacttgtttccacatttttgatgaagatgaagaaaaagcccgagatggattttcaagttgatgcttggaagtggctcaggttgacatatgtcaccttgggccttgggtgcctggggcacctcgtgttctgggtgctcaaaaatgaaagttctcctaatcttattttgatgcctcaaatttttttgtgacatgtccagtaaaatgtttcacccatttgcactaagatggtcccagaaactaaaaccctagttaggctgtcaacttgggtgctgggtgaaactatttcatgtattttcagctctcgaaccttggacttgaatgctctatgtctttatggttcaaaatattgaaagatagtgcgttggaaacaacttggtggtatccaaacacccatttcggagttcctgaagtaaaggtgggtgcaaggctagggacccctctcaggtcgactactatgactcaggactactcaactctgagatgatttctttcttaccatgtgtcaaacattgatgtgcacatcaacagggtaagttttgggttaacatttgcccccatgtcaacttcatacttgtgtgaagttgacttgatgacgtaaattgatctcgattctttcgaaactaccagagggaatccattttgagaaacttaagcaattgtctctattgttcaagaattcttaagatgattagaatttcaaattccattgcccttgtgtttggaaattttttaagattttttagtaagggaaaagaggaaaaaacttataattttttactcatcttttatcttctcctttaaaaactcaaaatttgcatggaatcctcatggaattatgactaattgagtttaaatcatactccctttagtatataccattcgaaattaaagagaaaaagaagaagagataagagaattatgttttacctgtcatttatcttatccttttaaactttcaattggcttaaatcttaattgaattaggagttgttgtgattaggaaaccaagactaaagatccaagtcaagttccagtcggtcaagtgatgagagcacaagccaagatattcaaagaggaactcggaaacctagtccacaatgttctaaaacaaaaggagaatatggtcaacaatgaaggagaacaaagatttgtactgctcattagagtagactcaaattaggagctttgtcacgttttttatcacatttattggattttggaatctttcctttttaatcatgtttttctttactagtctctatttttttatttggaaagtctttctatttgggagtgttagggttttcattaggaggacaaaaaggtcttttttctttgatgtaattttgaatatataaggccttgaaaacactttggaaagaaagattttgatgaataaaaatttgagaggttttcttcttgagttcttgaagagtctattcaaacttatcaagggtattccttgtggtgttcaatctgacttatcaaacggaattcgattaccatttatggtgtctttctcataccaaggttcttgcctaactaagcattgggtcgcgattcaacatcccaaagttttgagttcttagtggctatcatatttaatgtcaagtttcaccacagtcgttggtgaggtttgtatcatttggtatcaaagcttaggataatccggtttggcctatctttttttctattaaattcctattaaactcatgttctatattcatgttcaatccttgttctatattcaaattctctatttccttgtgaaatctaaaaattaattctagagccacaatttgatattgctgatttctttgtgctaaattctttctttattttaatagtttccttatgtgtttcacaaatcttttttgtatggtttccttatttgtttcacaaatcttgttcaattgaattctgaaatcagttctagagtcacaattcttgtttaatttgtttccttaatttgctgtgtaatccaagactgttatagtgccacaaaatagttgtcttgtcttctattaaaaagaaagataaaaaaaagagtcttgaaacctctcttaaatttttcttttgttctattcttggtccccattgtctagaggcctatttgccataaccccacacaattgttccaaaaatcataattttcctccgtgttagtttggtttgtttgattggatttgttgcttgaatttcctacacattgatgtttgagtatcttttacaaagattaaggaagaatatgaaggaaagagggagcattgtgagcttatttgagggtaaaagccatcaaagctaagtgaaacacaagtggacttgagtgacatttttgagtgaaatcacgtcagtgagtgtggtgaggactttcttctataactgctctaacaatcttttgttgcagattttcaactgtcatagaatatagacagaaatacaagcaatgaaactccaccacctacggatccaaatctacagattgaagccttaatgggggagatgaggaggttattgagagatgagtgtgaacaaatacatgcgagattgaataggatagaggagagcacataacggaggcctaagaggaataggggcaccaaagggaggaagagaatgagaggaatttggaaggggtgggttctaatgaatagtttgataggatgttgtttggtaaccctaggaggtatggtcgcgataaagaagctaggaactaggtacataattctttaggaaatatcaagatgaaaattccaacattttaggggaagagtaatcttgaagcataccttgagttggagaaaaatatggaattgtcttttaattgtcacaattatttcgaaatgaagaaggtaaactttctaccattgaatttactgagtatgttattgtttagtgggatcagttgtgcatcaactgaggcaaaatggagattgtgatattcacacttggaaaaatatgaagagggtgatgaggcatcattttggaccacctcactattatcaagacctataccttaagctgtaaggtcttcgtcaaggttacaagagtgttgatgagtattacaaggagatggagatggctatgattaaagccaatgtggaagaggatacagaaggcaacaatggcaaagtttttgaatggattgaattgagagattgctaatacaattgaactacgtaattttgtggaatcgatttggtgcatatggaaatcaatgttgaaaggaagctcaagaagggtgctttgacttcaaagtcaagactgagtccacacaatccaactacaacaccttggagttcgaactatccaaagaaagaagaccaagctgcttgatcctatacatccaaaccacccaccacaaccacaccccctcaaggaaaaataacccctacttcatcatgttctagtgagatacagtgttttaaatggtaggggcgaggacacataggtagctaatgtccaaacaaggaagttatggtgatttgagaaaatggcggtgtagattttgaagatgaagatgaccttgctgacatgccaccattggaagatgcttctatagaagatgaaaggtatgggccaaaatacactgacatgcttgcactagtcaccaaacgagccttaaactcgcaagtaaaagaagaggaagaagaggtgcagcatgagaacatttttcacactcgttgtcatctaaacgacaaggtatgtagcgtgattattaatgggggtagttgtactaatgttgctagctcttccatggctaaaaagctagggcttcaaacacttaaacatccacgtccatccaagttgcaatggttgaatgatattagtgaagtgagggttacaaaacaagttttggtatcttcccaaattggaaaatatgaggatgatgtattgtacgatgtggttccaatgcaagctgggcacctccttttagaaggccttggcagttccataggcgagtccagcatgacggatttgcctacaatgtactttctacaccgataagcttgttttcctaggatttgttgcaggtattgaggttgatgaagagaagatcaaagccattcaagagtggccaactccttcaactataggacatgttcaaagttttaatggccttgctagtttttacaggaggtttgtgaatgttttaacactgtttacagagtttttttaaaatcaaatatatttagagcttaagaaagaaataacatagtaaataacaaatgtgatatttttatgtggttcaagcattaactatccttagtctacgagtccattttattacgctcattggccggtaaatgttcatatagattcatatacaatggactgaaactctactttcctagtgttccttttgaagaagaagaaacttagtgggagtttttgggcagagttattaaatggtatattatttgtgttttcaaagtgtttggaaaaaatatcttacccctatcttgtggagtacaggggtatttataggccagttgccctccatgcgctaacttgaattgatcacccttgggcaaaatccagctgttggtttggtaggtagccattctaccatatggcatttaagggtgtcagattgtacagattgggcatcatacacgcatcgtctcagggtctccttttttggatttcccttattgatggtcgttagatcatttggtgagatacaatgggacgcgcatgctttgtactattgtgtatcgtgggggaaaacctctgatgccatacctaaaaaagcctggctactaggtgcgtagtctaacatgtacgagtagagcctccgtggaacgagattgtagcttgcctaaacacgttttaaaatacctttggccctctagagaaaaatccataccctttgcgggagcactcgacttcggtcttgtgggattatatggcttcagctcctgggaatagggaagattttagatggcagatgttgctccagaattcgcccaaaatacgtggaccagtcatgaggggacacgtgggtcagataacttggaaagatttgctaagtctttgtgcgccaccaggaagc

SEQ ID NO: 17209 - DNA, 3630 bp, Cannabis sativa
acattcccaccttaaaatttacaccaaaatgcacaacacattcccatctatcccatccctacatctttttttgccccctcaaaatcccaaaatgtaaatcctagctcaatatgctaactaataaccaagcatagttagttacattaaccatctcatagttatgtgaatccatatgacaaatgagacatgaataataaattgctttatatgtattttaaattaattaattaatatatatagtgtatatatgattgtaaaagaaatcaaacagtgtgaacatgtcaaagatataatagcttaaatcaaaaaaaaaaaaaaatcattacataatatgaatcaaaattgaactccctcctctttctaaagtactaaggtttttaaacaaaaagtagagcaacaaatgcagcagggaaaaaagacaatgtctcacaagaaatttacagactcatgaatgtagaacaaaaaagactacctatgtattttcactcacaataaagactatacgggagttaaaattggatatctgttaatttaactaagcttcttagtttgcattttactaggtagactaggcctccatattcggattgtttgatcgtcacttgcagacgccagcatttgaggcctcctaggattccagctaacacagttcacagtcattaagtgacctaccaaaacctcaattgggctggaatttttccggttccagatgtagacctgctaatatagtttatattgatgaagtgttcgaagtttcaatttagttcaatgaactagtaatactaaactcgtgagaaataagaattattacctgtgcatcttcactaccactggcaataaagtagctattcaacccaccgaaacacgatcttatcacatacttgctttgcttgtggcccatatattttttgggtttctcccatttccctgcaatatcccacatatgaatttcttggctattaagatttacgatgaagaattcaccgtctcctgaaagtgaaagtgatgtgattgagtgctcctctgagatgactctctcagcatttgttataacatttactattgtaatttctttatctgagaatatacagatcagattttctccatcagatgtcacggcaagatctataactttaggcatcctcgttcccctccatgcctttatttcattcccattacagtcccacatgtagatgcccttttcaggttctgaactaccacatacaagtctttcagagtcgggaaaccaagcacacgagcccacaatgaagttaagatccccgaacgtgtgcattaatgtacctgtttccacatcccaaagtttgaggacttccaaatttccacaagtgagcaacttcttatcatcagggctccatgccacaaaggaaacttgtttttggtgaccacataatgtgtgttttggtgttatcttaccatcatcatcatccggtacctagccaagaaaggagaaggtaaaatagtgagacttcatcacaaaagatttcctcttttctcaatcaaaactaaaacagataatttagttctgaccaagaataaatgccaaaatcaactcagactatgcggtgatgcttttcaatgggatgtaaaaagataagagtgcatagtctcaacctgtttaatccaaagcaacatcattaacttgggactaaaacttctaatgctatttttcttgtccttttatctataaaaggaatcaataagatacctcccatatgatggctgtacaatcacttgatgaagaggctaagtacttcccgctgttagaaaattgaacaaaccatacttcattcttatgatcagtcaaaatctgcaagagtgagaaacaaacatgaaattaaacgatgaggctaaacatgttgaggctgtgtttaacgtggttgatcaaattttcacaataatgcttagtaacaatatagaggcattatcagcatttaaattttagcttatcctaccaaactagtaaaacttttaacaaatcttaatcaaccaaaaactaacgcacacctgatgggtctctgtcgggatctgatctcttccacataaatgatccacatacagtgacactgcacctggtgaattgtggtacatacatgaattaatctgggctgaaacagtggtttctaccaaactttccaaccttctttcgggcataataattggtggaggaagcaatttttccaactctctcaacaaatttcttcgcgacccacctacaatgttatcatcattctttcccagctcttcgttcaaggaaagaatattatgagcgagattgtgaataagatctctgcccacatctaatgcagaaacatctttccgcaaaacagccaatgccttcaagtaatctccatgactcaaatactcagaaatacactgttcgaaaattaaaaacaatgctgcagctttagtatcctccttcaaatcactaaatgccttaagagtctgaatgcaaccatcccaattcccatttagtacttgagatttgaacaattcaaaatcgtgggacttgtccgaaattccagactctaattccaaacaagaagctgactctccaaagcctaatgagtatagacactgaattattacttttacaaactcatgctttcttattaggcgctttgtaccaagcaccgtcggcgaagcctctgacattgatatacagcaaacctatgttttggtgactttctaatcttatacacactcaaagtcaaaggctaccatttcttctgctggccatgattcctcttaaagtaacctaaacaatagcaagttcttagtacaaagtagtaaaatccaattcaaaggtaaacattctcagaaattccaatttccctaaatattcccaaaagtcctaaatctcagaatgtttacaattacactttacagacactaaaatctaataagcaataagaacagttccccaatttccacaccctcaaaaaacatctaaaacccacagcaaaaacttgcccaaattaacataaaaacctatcaattaactaaattacttcaaactaccattgcccaaaatacaagctaagcttaaatatacaaaaactcaataacccatcaacagtataaaaacacatataagatatagaataaaacaacaaaaccctgagctaatgtatcgaagaaaataaatacccaattcaaaaaacaactaaccctagattactgacagctcaatagaaaacacaaaccaaacttttacagaaaaaaaaataaaaattaattaaaatactcagaagataaaacatagatgttaaggttcgttaaaagagtaacttgtaattaaagagagattaattcactcactaactcaccagcaaatcgttcgtttgttgggtaagttaaataaaaatggcgtcttgaagaagagaaagaaagggttgttctggaattgaaaatgggttcgaatttgacttacagtaaagattacattacatacaccaaatttacagagcagatctaactttcgctatcgttcttctccgttaccgattacgactccgatttctctttttcttttttcactgttttttcctttgtttaaatcttttaattttttttaaaggaaaattaataataatatataaataatttatt

SEQ ID NO: 17210 - DNA, 3677 bp, Cannabis sativa
  modified_base (2209)..(2219): a, c, t, g, unknown or other
tggaccactgtgcttggcattgaaggcggtgccaccactgccagctggacggagggagagggtccgttgcccttcactgcgtgtctctagctacagctagtatatgtggatatatacgtacgtacgtatatcttaattaaatgtataattaagtatatattattaattagtttcatattataacatctcctcacaaaaaagtccaaaagtttcaatcatcctccccaatttcaaaaacaaataataaaaataattagtattttgctgttttctcgtgtttttttctttctttttttacttattaatctcataataataataataataatacgaaaatgtcacatatatgattttgatccattataattttttttttttttgaaaaaattttgatccattataattaaattaattaattaattaattaattgttgattatgtgtgatttgtgattcgtttactctcacttggctccaaatcttttaatgtataaaaaattttgtattagttacacttcgtcttctcttttcttctaagcgatgagattaaatatatatatgataataaaatttttgttttagtcggaaaattaatttcattttgttttcttttttactatacggataagaaaattactgcactatacataattggtagggaacgtgtattgttatatatatagtacatttttaacaattaaaaatcatatacaaaacaaaaataaataaattaagctcagtccagtctgcctaaattactggaatgtactagtttattgctcaaagtctattatataatataatcaccaatgagaaagtacgaaaaataacgtcattagtgggtaggtgtagctgattagtcctaagagtagtataatttcgataatatatattccgtagaacacaactatatattttggagctcctgctgttttaatttcttcttcttcttattattattattattattttcctttgttaagtcaaacttttagactgtaaaatcgtcaaagttgtgttaattatggtggaagtttttaaggtttgatgaaagatagagcaaaaaataaaaagtgtagctcaaatgatgagaagaccatgataagtagaaaatgatatattcctacttcgtgtgaatgattagttaatatttgtagttatggctactcaaatcaaagggttaggcccataattatcgcacaaccgtagaggatatttaatacttaattgttcaaaaacagcgcatgtgtcataatataattttttttttaaatgatgtgtcgtaattaaatcttggtggcactcgtgctagctagtagttttctctctatcaaattataacttatatatgttatttgttttttttttctctcaccttactttttcttatactataaataaaaaattacgaaacatatttttgttttatttaacttagaaataaaaacaaaatcaactatcaaacagaaaacaaaaagtatattgttttttttagtataaaaaattcacaaacaaaattttcaccaaacacacccttaatttgcattagtaagcttttttttattttttcctagaaaatattctaataggatcgatgactagtaaagttgactgaaagtagacttggtgaaagtatatattggtacgtacttttacaagtttattaagttacacgttgtaatataatagtacacgaaaagatcctcgcatagctgagattgagatccagaagtactgtttgatgtagtaaaattgatatttaggtttcagaactaaagaaaagacatgtatatataatatcatttttttttgaacatatgcatatataatatcattaatcagttatatatcaactaatttattaatttctttgtctaccttgtgtaatatatataaaaacaaaataaggcaatagttttttttttttaataaaaataaggcaatagtttattgacgtgactcgttgttaacataaatgttttttttctttttctagtgattttttttacttatatgactattacttttaatcataataaaatttatgataaaaataaaaaagtcatgactaattataaataataattcttatgtaaccaaaaaatatcagcacagttcgctattgtgctggtaaaagttacttttaccagcgcattttacaaactgcgctgacaaaaatatcaaagttttaccagcgcacatttgcagtnnnnnnnnnnnaacttttaccagcacatttacgcgatcgaaaaagtcatttttaccagcgtttttcattttgtgttggcaaaagttctaataccaacgttgatttgccaacaaatcaaaaataaattcaattttaccagcacaataccaaacttttaccaacacaaaaatatgctggcaaaatagacattgtaattaaaaaatctctggttaaagttattagtcacataaattataatttattgtgactaaatgtatttttaattacaatacttattatgactaaaactaaattataataataatttatatctatatattatgttttaatcataaatatttttttattgtgattaataaagtcatttaattaaaaaaaaatatatattatgacttattttttatagtgtatacatatatacatacatatatacataacatttataacaggaggaagattagttatatagaatttattaaaagtttgaattttgaatgcagtttatttaatttaataatttgaaaatatactgccaaaaaatgctgatagtatttattgatatgaaaaggaaatttatttacggttttacagcatgtggcaaattaatcagtggtctttttggaaagtaatgaaattggaattgattctaatttaaagttggattggtatgttatctacatttgatttcatgtacagtacacgctcatcattctaatttaaagtttgctaatttttttttttttttttgaatggtaaaagtttgctaaaattttaaagattattaatgttaatatatttacacatacttattgcatgtgtattaaatattagttatttgtcttttcagaaaaaaaaatattaattatttgtatttttaagtaggatcatttatcacttttaattatgtagttaaattaattatatattattgtgtataagaaatatgtacaatttgagtgtgtctttatttaatttaaaaatagtgaatccttttaaattctcatcatcactttagtatttttaaaaattcaatatataattctaaaattttgtcactaaaatagatataaaagaattatctatgtgaattatattttaaagagaattgttaaaaaatactattgatatacctaatatctttcttgatgtaattaaatatcgagttccatataattttaaaaaataacttttaatacttaactaattgtgaagcgccacttttttattggacaccactaatgctcaataacaatgttctttcaaacaatatttttaaaagatagaggagtcggagccaactgaagtattgtacaaattaggccattatacaagactgctcttatttttctaaggtctaatttcatttttttttagaaaaagaccttttatttttattttttttctattatacataaataaaaaatttataattgaaagtttataatcaatttttttataaaaaaaaaaaa

SEQ ID NO: 17211 - DNA, 6189 bp, Cannabis sativa
agagagagagagagagagactgtgctagaataatatgtatataacagtaaggtttaatgtgggcttttttcattggtttttgaatgagctcaatagtctcagtttaaaaccaagaccaaaagatcttctagtgtcgattatgaaccgacacttatatttgatctgtatgtatattttttttaactttcttttttcgtctcagttattattttagtgtctgtctattaatcgatacttaaagtcataatatagtgtcagttataaatcgacaccttagagctggggttgtatttaaaataaaattaattgacaccaaaaatctattttataagtagtagtgaaattgataggaatgtgtaccgaccctaaaacactgacgctaattacataccaataatagcatcaagggaatcaatcactcattttaattaacgtcggtggtcgaaaaatgtgatttttgtagtaatgcaacaagcttaataggaagtacatttattgacctgatggggtctcaagtgcgaaacaccattcgggtttccagttttggtaggtaaggacatttgatgtttgtattaattggaatgatatatctgcatcacgtgacaatagttgtaccaatattaattagatcacagcgaagttattacaagctgtatatgttacatcaaaacattagatcccaattattacaaattggatataaaaagcttgtagtgttaacgtttctccctcttttaatatatatattttttgggataagtctctctttaatattttagtagacagaaaacgtacgcctgtcccatgaaatagcagaataaaataagttattaataaatttttcaatgtacaattaatatataaaaatgataagattaagagatatatgctgttcttgatcacgtggattaaacataaacctggtattacattaataaattacaaaaaaaccaaaaaacacacacagatactgcagcaagatacattcacgacttgaacaaattacagttacacatttgatatactcaacattacaaacaatattacatgttattacagccccagccccgtatatttgggtgtcacatgtatcctaggatccgccgatctcactcatcattattttttctaacatgtgctgagtgggttaccacagagacaatcgttgctagcaaacgacgacgcttccaagtgatcgaatggtgacccaagtgggatagccccacatagatggttatgactaatatccaagtgcccgataaacttcgccgccgacaatgagccaggtaccggacctttcaagttgttatacgacaaatcaagtgccataaagtaggaatcgccaccgaaaacatctggtatgttaccctctaaagcgtttcggctcaggtttagtatccccattcctgagctcaaaagggccggaggtatttcaccggagatcaagttactgtcgaggtttagcgtcgacagaactcgcattttcccgatactgcttgggatcgggcctgaaatccggttcatggacaagtccaaatccgccagacgcttcatcccgcagatggactccgggatagtcccggtgagttggttccggcccaacaacgcccggctaagcatgccgagtttaccaaaatttgaagggatttccccgctcagctggttgttggtgaggtctaggtgtttaagtcctccgatatcgacgattcctgcggggatctcacccttgatggtgttgtcagcaagatttagtacggttaacttttgcagcgaaccgattttgtctggaattttgccggaaatttggttaccggttaaatcgaggatacgtagtgaagagagagaagtgagacaagaagggagctcgccagaaactcccttccagtcagcaaggatgagcgttgtgagactttcgaggttacagatctcgggtgagatccaacccttcatgtaaccgcaccggcctgccttggctattatcgggtcctcggactctccccggaggtttatgtcaacgacccggccagtggtcggatcgcagctgacgccgtaccatttgttgcagcagtcggttccagaccacgactggaagatgcccaagtaaggttcagagagggccgccttgaatgccatcagggctgcctggtccgacggcgggcaggaattagcggccgagataatggtcatcaatgttaaactgaacatcaacaaagtcattgctctcctctcctattttttatttcttttttatctttctcaattatttgagatatatactagacagagcactagagagtatgtgagagtttggaataattgtagaggtgaggaattgagtttttcttgtttatagcaaaaagaactcgtcaggagtaaatgaaattaattgagcttctgatttattggatggcggatcatgtgaatctgaatttattaaatatttaagcatactgtattcagtacataaatattttataataaaagttcaattatattttgctcgagtggacatttgtccttttcacatgcatgcacatgcacatgtagctttgtctatccattggcagtttgtgttttctatctaatgcaatcacttattttactcatccaatctaatctacaaaatgaatgagtaaattcattgttgaaaaaaaaagtgtccattaattacttagatccatcattcttttatcaaaatattaaactaatacccttttttttattgtgataatggatatagttagtaatttcaaacatttccttccaaaaaagatttcaagttttaatatcaaaagatacttttttttttactcaaataaaatttatagttttaatttttgtaaaacaaaattaataattaatatttcattgtaactattatccaaattttcgtgaatgagacaagtggcatgatcggagagaagaatataccagcgacaagaattagtcaaggttgtcgagaaagggaacgtctcccggatccgaaaaataataggagagtacaattcctgaaagtaacctcctttaatgaaggacccggagagcaataaaggtcttgtagacattggccacgttagcatcttgcaaaagtcgctccatagacggttacacctttttttgacacaggatcagattttatctcctgtgccagatcatggtagtgcgcgtaagcaccctcaaatatgctttttgcccaacgacctggttagagagtactttgcaaaggagagaccttggcatgacgcgtgtcctagatcgtacaaaaatcctcacaacaactgtatgacatagatgaagaaggttcttataagccaatggtcaaatcgtccttcacagtactggtcttagtagcatatggagtacgaaaccctaagtaggtaaggggtgcattttaccacatgtgctcctataaaaagtcctatcctttcttgaggcaaagggaaacaatttcacttacagacactctccaaaaattccaagaaagctctctctcaagtggagcaaaagaagctaagtaatctttactgtaaccaccttgtaatctcaaaaacatttgcctaaagaagccaatacaatagactcgtggactaaggatcattaatgcctgaaccacataaaaatctgtctatttattatttattatttcttatttctttaagctctaaaaatatttggtttccaaaaaactcagtaaatattttggtgctttcattaagagctgaaagaagtctagtaatgttcgtcgtccttcgaccagggttaaaacacaaaacactaccggtaaaggaactccgttggatacagttatggaggaagtcacctttcttccagtcgatgcataggtggaaaatgatggagaaggcccatgtgctatagggaaccaagagaggaacaccgagaaggtcgtagaggaccacggtgatggtcaaaatgtagaggattatgaagaggacgatgatgattactactatagagatggatattataaagatggttgctattatgagcatgaccctagtctagtgtgagtaaccgaagagttgaagctacataggcagccctagaagagcaacaaaggcttactgctcagatgaaagaaacaatgcagcaactttagagcaagtttgataagggtaagggcaaggtgattgaacctccacgaaaatctgcgcctaagcctccacgtagagatacacccctggttgaacaaccctcgaggacgcagaaggccaccgatgattttgagcatggacgcccctttgaccctcgaggcaaaaccctgctgaagggaccagtcgcaaaggttcctagacctaagagacgggaagatcctcccagtgattccgtcaatcatgatgtgaggattcctatcagccattctagagacagttggtccatgtcagatctgtggcggcagttgaatgcgaaatacgagaggtataaaagcgagaagacaaggccacgtggtgtgacctaagaaatcatctgagtgacaagatgaggggacgtgatctcccggaaagtgataccaagagattggaggaacaaattgctactttgactaagttggtcagaaaataaaatggagcgttgttagactccgaggatgaagataaaaaaccttgtgtaagtagaatcacagaaactccattgatagaaaactttaagattccccacattgaattgtatgaagggagaactgatccacgagcacatttagccaaatataataagatgatgcaggtggcccgcgttagcgatgatgctaagtggggtcaatcgtcagttggaaagacctacaatcggcttttcgtaaacaatttatcgccgcatgcaaaaaggacatggaagtgagctccctaaccaatgtcaagcaagaacctttcgaaagtgtgaaggctttcattcaaagaatgatggaggcagctaccaaaaccaaggtcagtgacgatctgaagttgatggccctccagtctcgactagttgtaggttccttgttgtggggggagatgcagagaaaaagagccgagaccttaagtgaattcatggctaaggcatagggcataattagccttgaggatgcctatattcaggcctttagagtccctcctgcacgaactctaactacagctgctcccagttttgcatcccgaaatcctgcccatctttgtcccttttaggaccccaattctctttaattatgtacagacccactgcgttcggtctcgtacctatgtagacccgtttcctcaggtactgggtagcacagaccgagtgcaccgtagctcccaaacaatccaaagctgaggtctcgaattctagtgtggggcatttacggggtaagatgggaggtaagaatcacaaccataatgattcggtaaagaaaccaagaaaggattacgatacgaagtacaccaagtacataagtttgatagatactattgagaatgtttataaggcaacgtgtaacatggttcattatcagaatcccccgtgcatgttaaatggtgggaggaacaggcgagatcagaacaagcaatgcgagtaccatggaaaaaagggccacaccacaaatgaatgtgaatatttgaaagatgagattgaaatgttggtctgagtggggcatctgggcactaggtctacatcccaattatttatcccggacagggggtagtctaggagcacgtgatgcttcccagacagtagggtgccgtaaatcccctacagggggttgggcgccctcaagctcccagatcgtcattacctgttcttcttcctccaccaactctgacttgggtggctctgcttgctcaaagactaggaactcctcttagaatcgcttttccacctgtagatggacatgttgcgtgggcagaccccatctttccggaagtacccataatgcttagaagagatatctaaaggacgtggaggagggaaaaatgtgggcactagtatagtctcttgcacatagtccaagaatgatgaatctcccaattacctccactgaggaatatgctaagaatgtgcggtcccctcataacaatcctgtaatgccctaatgattaggcacgctaccctaacatattatgaaaccataatcccttaaactggaattactagaaaggtaagcgcgggaaatttaaaatttatttacaatagcaagaaaattaaacttgtaataatttt

SEQ ID NO: 17212 - DNA, 4705 bp, Cannabis sativa
  modified_base (2847)..(2848): a, c, t, g, unknown or other
  modified_base (3212)..(3212): a, c, t, g, unknown or other
  modified_base (4550)..(4564): a, c, t, g, unknown or other
ttgttcttgttcttagaaaaatttctatattaaataatgggcccagattcaaatgcagctgcagcatcgtcctcatcaacgacattgtctccaggagccaagcgaagcagagatcccgaagatgaagtttacgtcgacaatttgcactctcacaaacgttaccttagcgaggtatgttgttgcccttgtcttttttgagtttttatttgggaattgacaaaaagtacaaaacaattttagtacccaattgggaaaatggtaagcaagtttgttattataatttaattataaaagctgtaaaaagttcacatttttcgtttccttgttgggtagttttagcttaattgaagctcagtttcttaaagcttgttttcttgtgtagataatggcttctagtttgaatggtttgacagttggagacccactccctgaaaatctcatggaatctcctgccagatcagaaggcaatgtatatgtaaggtaattggagtgttttgtaaaaataaaataaagtttattagcaaaataaccatggataacgaccataagttacactgtgcgaccacaaaacgaccatgatcttgacatggtcgcatagagtaaattaagtgtgattattttgtaaattttactatttcacatggttagtttggcaaattttccggtgattcaattcattacttctagtttggattctctatttactgctttctatacttttgtatcatatacaatgttatctgtattttggtaaagtagcaaaatgatagctattcctaatgaacatgtgtttgtaagatgtgaaccgttctgttctgtgatttctatccttgcttgtgtttgagtcatagaaatttgtctattatgtataaagttactgaatgaactctgctattagggatgaattctcattgcaatactcaccaatgtcagaagactcggatgattctcggttttgtgatgctccattaagcactacttcttcccaaccagagagtgccccctctagtccagtctcaccatataggtataacaaaccacttagtggttttcattctgttccttcaacgagtccacattcacaacattcatatggatgtgctcttgctaccataacttgctcacaacctcgacaacgaagctcagattctgatgggcggttcccatcatctcctagtgatatttgtcactcggctgatttgaggagggctgcactcttacggtctgtacaaatgagaacacaacctcctggcccgtcgtcccactttgaattgtcatttagttcggagcctgaacataatatagaacaggaagaagaacgaccgtgctcctatatgaaatcttcagacgatgagagggagtttcatattgagtcaatgactatttctgatcccgagtgcagtcgtgagaagccatgcagggtgttgaatatggatgtgaaagaagaccattctgtggattagctaaaagcatagagctttgtcattcttattgagaaattaggtcaagttcaagaccttgctacttcacaagtgttggtttcatgtgataaaatgctggaatgccaattttatatactctgcacataagggtggggctatggctgaaatgctttgcggacgactatttctagctagacgaggggtttcttttcgctgtttaggatgccgggttggttggcttgctcgatcttttttctcaagttgccagcaaccaagggtatcgttggcttgttcgaccttttttcttaagccaacagtaacttgttctcgatttctgttgtaaatgaatgctgtaaatttgtgtttctcattcgaggtcaattgttgcttcattttctcctgatttatgattgttttcacacgagtgtgaagtttgatttagaacatcctttgttttttgcaagctgaccgtaacttgtttgtaatttctcttgtaaatgaatgctttagatttatgtttctgcattaaatgtcaattgttgctttatttattcctgattcataaaagttttgagtgtgaagttcgatttagaacaatagttattagatacactaacaaactagttatacttatgtttggctattgtttaccgaaattttcggaaatcggtaaaatattattatactcgaaattcggttacactttagaagttgacacgtgtccaatagaaggaatacatatcaattctaaacgatataacgatatcattagatggatattaaataattcgttcttatttaaaggttaaataaataataatcaaaactcatcgactttatagttaaaagcgagacaagaataacaactattgatctgagattaacgagacatatgcatgtctcgaaatatacatgcaagaagggtacattcatccacccgaacagaatgagtgtatcaacataaactgtctcgcattacatatagcgagaagatcacctcgcattacaaaagtcatagagaacataacgagattgataccttctcaatacttagcattttttcttatcaagatggacaaggaaaataactcgaatcagagaggatataaccttctacgttaacaataatcatctaaaggataaaactaaagagcagttgagtatttatttagtattatcccacatgtaatttaaataaaacgtggggattgttcacgtttcatgaacagatatatttgaattaatcccaaaaagctaattgtcaccctatattcctctaaataggggcagattctatgaaaaaagagacgacaaatttgagagaaatattattattcaaaatcatatattgtattctgtactctaaaaatatccctaataagaaggactcgtggagtatgtagannttaactacaaaaccacgtaaaattacactctttgacaatataaaattatatttacagaattttttctagtatttcttgatataatcaatataagcagttcgccctcaaattattagttcataattagagtcggtcaaaatatcattttacccttctaattatttcttgatttcttatgtaccattaattcaatgtgaacagttaatctataacttattatagatttggatccaattgttagcactcccagaattaacactatacgagaactaatattcgatccgttaagaaaacttggactctactattgtataatatgtttccagccactcatgttattaagctcccaaaacagaagttgtangaatcatcttctctgagaaattttaactagtagatcaaagaactcaatgaacacaaacatgagttcatgtatactcaagattcaggttgatctactaatgatcatcagtgtgatatgataaactctttttatggtaaacaacatgttaatgaaagatgtttataacatattggcccaataatgcataatcgaattatacacacctttactacatgtctatccacatatgtgagccgaattaaaatcatacacgctagaagtatagtgtatagtaaaccgtatttagcagttccatattaaagattcttattactttaatacagaaagttggcttaccaaactggatatagggcttctcgaaggaactctacagaggtaaatttttcaacttccaccttcactgtttcagcccaaaccagatctattggtctttgcttttgacggattggatatgcatttttgtcaatgttcaaagcatcgcagatcacgtggggactaatcccgatcatgttagaatggcaccacgccaagacgtcatgattttccttttctgtggatacaattttttctttgatggtcggaggcagattttgtcctaccttgatgactttggtaggatcttctttatcagtacatacttcttctatctcctccattgactcaattattctttctacccccacccggggttctaattcatcttcctccttgattatccccagtgttggatggacaagtgctccaggagcttcttcttgattcttttcacggaccataaatattgttctggtcgagacactataacactttcttgcactttttcgatcgccctttacaacttcgatacttccattatcacttgagaatttcatgcatagatgccgaatggaagttacagctctaaaatcaactggaactgcaaaaaaagaagaataaagtgacttagtctctttgagaaaatagaattaaatgatagagggtgaaatgaagtacagatgtgttgagtgcagcaaaaaaattatctttaattttataattgttataagattttattattattattttttttttttgaaaaaaaaaactaaatcacttgaactaatcattaactgacacactaatttggcccttaaagtattgataataagattgagtgtataattacatttaattagagatcattcttattattttttattaattaaggttatgggtgtaataattttaaattattaatgacttttattacaaatatttcaataatttaagtgcaaaaaaattaatttctaaaagattcttatttagtaacaaattgtaaaaaaattaattaataattannnnnnnnnnnnnnntaaatataattaattttaattaagattttataagtaaataaagtactaggttactatcagattacaagttatttattcatttatttattttgatttctaaagggaaatttcaatttttggccttaataatacaagccatat

SEQ ID NO: 17213 - DNA, 9933 bp, Cannabis sativa
  modified_base (8361)..(8362): a, c, t, g, unknown or other
caaaaagagaaactatgaaaaaacttgatcctaccatgatagtttattggaggagatgattgggttgtcaaacttctaaatggttcaatctctaattcgttgtagtgatagagatggactaaaacaacaatcacgtgaaaaattataaaaatattgtacagaaatgtaaaacaacatttaaattaattccaagcctaccaagtagttctttatacagctagggtaaattctagggttgttagtctattcctatatttgtgtagttaattattagtctttgtagctacttgaaagagcttttcaactacaattatgattcaattattcaaacccgcatggtatcaaggtcgaaccctaaatcataatattttaaccttaaagccctaacgtcataatactaatggaaagccctaaatcctaagtatcataacgaaaatagaacgtagtctttgaccaaaaaaaatctttctcttattgctaccaagactgttagttagggagctgcagttagttcagttagtggttgacacttgactgttttaatagttaactaatcgagttagctaatagttaatgattaattagtagttgtttattagttaacaactccacttagctttcttattgacttcttaggccattgtaatagatacaaagcgttaagcttgtacaaattcattcaaaggcgataaaagaaccaattcatttattttttcttgtttttcacttgaatggtgatgtgaattggaatcaaagacttgcattcattccaaacaaactggtatcagagcttggattcgattgaaagacttgaatcgattggaggattaggagaagaacgaagatctctatttgttcgaataattgattcaagggagagatggggagtgcgaagtttgatttggagaaattcatagggaagaacgactttggcttatggaaaataaaaatgagagctcttctggtacaacatggacttcaaggagccaaagaaggagaagacaagattgaggggaaggcagaaaatgagacattcgaactgctcgagaaaactcctagtgcaattattctatgtcttggagataatgtcttgctgaaggtatcgaaagagaagagtgcaacaagtatggaagaagcttgatcaacttacatgaataaatccttagccaattgattgttcttgaaacaaaagctatacgcctttaagttatctcctgaaagatacattaaagattatcttgatgacttttataaggttatccttgatcttgaaaacatagatgttaaagtagaagatgaggatcaagagatcatacttatgaattcacttccaacagatacatatgagcatttcgtggatactatgatgtatagaaggaactcattgatattgtacgaggttcacattgctataatatcgaaagagttaaagaagaaattagaatagagagatcaaaaggcagaggaagttctatttgttcaagggaaatagataagagagataaaagggttcaagaaaatggcaagaatggaaaatctcatccaaagcacaagaagaagtgttacatctgtcatataacgactcacttaaaaagagattgtcctgaattggaaaatgttggaaacaacagaaaatctggcaatgttgatattgcaaatggggatgaaaatgatggatatgacaatgttggagttatggtggtgtcaaatcaatactttggactcgattgggtaattgacttaggttgttccttccatatctgtccaaatagatctcaattttgcagctgcaaggaaattgagggtgggacagtggagcttggtgatattagagcttgtcgagtggttgaaatgggatttaagaaaattgagttgttagtaggaggtttgattgaactccaacatgtaagacatgcactacaaatttagagaaatctcatcttaatggctatgttggataaagatggctatctgatgaaaattgagaacagtaccatgaagattcttaaaggatcaatggttatgatgaaaggatcaatgctaaatggagtgtacatcctgcaagagaatacaacaaaggaacaagtagcagtggcatcaaaggctatggtaaactccactatgctttggcatataaggcttggacatgttagcaagaaaggccttgagattctgtcaaagcaaggactacttggtgaaaatattgtggaacacatggagttctgtgaacaatgtgtgttagggaaggcaacaagattgagatttttggttggaaagcacaacataaaaggaactcttaactacatacatttagatttgtgggggccatctagagtaatgtccaaaggtgatgccatgtattttctaacctttgttgatgattattcaagatatttgggtgcacatactcaagaacaagaatgatgcctttaagacctttatagagtggaaaactttgatgaaaaatcaaaaagataaaatgattgagaattaataatggattggagttttgtttgatgtgtttaggaacaattgtaaacaagttggaatagccaagcatttgattgtaagagacacaccatagcaaaatggtttggctgaaaggatgaataggacaatccttgaaagagtaaggtgcatgttgatttatgctagtttgccaagagacttttgggaaaaagctatgttagttgcatactgcccttcctcagcagtcaacttcaaaactctaattgagatgttgtcagggaagctagcaagatatgatcacttgaggacttttaggtgtattgcatatgctcatctaagacaaatctctatatggtctaaagcaatcttgtagacaatggtacaagagatttgatgactttgtcaccagatctggattcaagaggaatgcttatgacagctgcttctacatcaagataacaagggtgagattaattgtttacttgctattatatgtggatgatatgctcatagaaagtaaagaaaagtcaaaagtaagtaaagtaaaggtaatgctgaacaaggagtttgagatgaagaatcttaggccagtaaagaagattcttggaatggagattttgagagatagaaagagtagaaggttgttgatctcttaaagtggatatatctccaaggttctcaaaaggtttgggtttgagtatgttaaaagagattaagagaaaatcatagttgactgaagaaagaataggagatggcttgcttgtttgacgaaaattattcaagaaagggaacaagaattagaaccctgccggaaaggagaaaacaagttcaaaatttgaaagaaggtattttatttgtaatcaaacaacacaccttaagagggacagtccaatcatgaagtagtacaatatgaaaagatatggaaatgttgattttggtcttgaatgggaatgacatcgatggctatgatagtgtaagtgtatggtggtaacaaaggaaattccaaaccaaagatgtgttcttgattcagggagctttcttcataactttcctgataataaccaattcaataattaccaagaaattaagggctgcattgtcatgcttggagataacagatcatgtcaaattgaggtaatggtatagttgagttaaaactcagtgatggaaccgttaaaacttagagcaagtttgacatattctagagattaaaagaaacttaatctcaatgctaggttagacaaaaggggtcaagaataatcatgcaaggctcaactatgaatgggatctatgttctacaaggaagtctagtttagagtcaagtcaatgtgatgacaacaaatgtaagaaacaaaacaatagtttttcataggaggtttggtcacataagtcatggagtgcttaaagtttcaacaagagttatgctcatgtgatcaagataactagagttaagtttggaattggaattcataaatttaagcgcttcctagactacttgcattcagatttgtgggaccctcaagaacaagttcgagaggaggttctaagtagtttatatcctttgttgatgatttttctaggcatgtttgggtattccatttgaaggagttttgtgctaacaatgttttaacctaatttgcatgaaatttggtattggaaggcactttatagtactaaaaaccccacaacaaaatggaatgacaaaaaagatgaacaaaacaatcctagaaagggtgagatgtatgttgattctcttggattttcttaaaattttctgggctaaaattgttgttacaacatgttaactaatcaataagtgtccctcttctactaatgaattcaaaacactaattgaactataaacatggcactatgctaagtatgagcaagtaaaggaagcttatgctcacattaagcaaggaagtgcatatttttggtatatccaaaagaagtgaagggatacaaggtatggagtatagatctcgaaaacaactagaaatactttatcagtatgggagagccactttcttaattttgttgcccaatttgttactctctttggatgcaatagtctcacgttagttgaatctagcttccttgctttatccacgagtcaattggccaccatagtttgctttcctctttttatcccacaagcacataacagggtggaatacacagataaaaccataaatttgaggagagaccttgacaactccatctcggatctcttgcaaatattctaactttcataatgatcaactaatgttcgacacccaactttaatagatgaagcctgtgaaattatgagaagaaaaaaaagacaggttgcccgactcccatgagattgacaaagccacctcaccttcctgagggttaaatggtgaaggtaaaacaagccttgtgaccaccaatcccacgactctgtggttttctagagttggaggacattcgtctctccattgttcgtgctgaaggactcacatgatggttgtgtggtattctcgaagaggaagaagaagaagataaagttgatttggcttcaccatggtcccaaaaggtcagcccattaacttaaatatgtaggttgagataataaaaagtgatttcatttctaggaatatgaagtttatggtttaatcaatttgtcatgtttactcatttgggtcatatctgaattaacattcaatgggttagttgtggaccaaataagaaagagtttaattgcatgaccttttctaagttgggctgactttatatggatcatgttggaaacaatagtgaatgggtgggctgtagcatgggtttgatcaccaattggtagtgttttagtgttgaattagaggggagcctcttactgaagttattctcataagaaacggtttgtttgctcactagtaatgttgacttcttgcccacctctggtagcaccaccagtagctcttcctcctccagcattgactctttctttggtgtcaactccttctctggcgtcgaattctacttttgattcttttccaaactttcgacggctaatacaagtaccctggttggacttctcttaaggtcaaactcgaatagagccacgaaaagagtccaaccgcgatgctcaatcttctccaatgacttctcccgcttccgctgtttctccagcatacataaccagtgagccccacatgttggttcatcgtataacctttgaaccccaaaataaggatgaagtagaagaagaagaagatcgatcatgaaattcagagcctttctcccttcctgattacgaccattaaaactgcttctcccaatcgtgataaaaccctgcacatgaagacgatggttggaaccacgatttccggtcgttccttctctgagggtgatgactttggtgagtttatctttgactatgtcttgtgtagcttccaatcagtcttgggcaataaccaagtgatccacacctttttggacttaaatttcactccatgatcctttaattcaactttatagtcattgagctgaccttgtacaccagaaactactgattccaacctatccactatggtttccatcctcatcgtcactctcttacaccaatacgatagctatgatatcaaatgatagaccttgttgccacattcttaagcgagtagcaaaatagcacacacaatagcaaagtagcattatggagtagaatgtggaagttaatattgaatatatgagaaaccaattataattgattagagcccttaggcctctttaatgcaaagattttacttagtacattgcaaagataaaaaaatgctatgctactttttatccatcacattgtcattttcaagactagagttggagaggacaattgacaatgttagggaaagtgatggactctatataagaggtgaagagagagcgcttgcctacatatttctaccaaccaaagtataatgagattcatttgttgcatttttcgtctaagaatgagattatttgtaggttcaaactctaagtctaaaatagaatgattcatcaaagctcttgcactgaaatttttgacaaaaataggtttattttgaagttacccgagcataatggggtgatagttcacttgatgctatttatttgataaatcaaatgccttcaaatgttttgatttttttcttaatgtactatgtataaaatatttggatagccccaatttaaagtatacaaaaattttgatccacggatatttaattcttaaagtaaacattaatagtgagacttcaaagtgacaagcaaaactctaacctttatcctccgaatgcctttagaaaagaaaaatgagcatgagcaaaatgtcttgatcctacttatgtctcacattcaaaaatctcttgtaaatacactattttgtcaatttgcaaaacgtgtcagtgcttcttttctcaagaaaatgttatacatagcaaccctttctcccttgttcttattaacatatgggaaccctccaaagtcactacttctcatggtaactgttggtttattatgttcattgattatggcacacatatcacttgggtctatcttcttaggtgcaaagacattaccatgtatccattcaactagctagaattgacaaatactttaattcagcctttgatccattttcacataagggattgttaatcaaacctaatgtgtggatactcctaaacataatagtgttttcgagtgaaaaatgttatctctagaagtagcttgtgcttgtaattgaaaaaccatattacattcttcaaaatctctaccatcgcgtttctcctaatacaaagtttttggttctacaacttttgaaagtgttcatcaacgcattggagtaaagtggatccttgagctcttaacataatttctcatggctagtctcttcccaaaaagactatcgttgctactcttgcagaaaaaatcgcagttccaaatgatgtcacattgtttttgataatgcttcgcatttctttccctcctcgatttaggggagcacattcatcacaaggaagatgcttagtgatcatgggattagaaatatcactcaattatcaatcttcaatacatccctctccttccaagccaaatcgatccactatcatcatcacccaagtcataaattcttgtgttctattcttttaagtcaaaaattttctaattttcacaacatccatcaaaactaaaacatgaaaaaagagatatatgtgtactctaaaagagaaagaaataatcaagttacaaatcctcaacacatgcaaaacaccaatttgatggattcttctccacaaaatcagtatgatttagagaatcattcctatagcattgaaagtaagtcttgcactcaatatcacatccccaagtttattattgtgatacttaaaaatattaagtatgatttagacactcctataattgatgtatttttaagtatgatttagacatacctatagcattgacctagagtaatttttggatgggtgatttcgtgggaagttttcccaaagagcgcggagcggggacaaagcatgctggaaacacttgttttggttagtagggctagtcgtcaattcaagaagcagccagagtgacgtactcgtgtataagagtcattatttcgtgggtgtacgaatttagtggaggcttaaagtgggaacgttacaaatggtatcagagtcttgacttagccggaagtatagtcaacgaggatgtctgaccccgtaaggggggtgattgtgataataagtagtcccgtgatccataacagaaaacggcaggtaagttgtgtcacgtgtcatgattctgacactgtgtaggtatgagattacacaattgaggaggacttaaatggattgatggaaactacctatatcaacaaggtgnntcttgttttctggtagcccatcatgaaaataactccaaagttaagcgtgcttgacctagataatttcaggatgggtgacctcttgaaaagttttctgaaggagcgtgtgagtgaagacaaagcacgttgaaaacactcgcattggtctgcaagaccagtcgtcaatccaagaagcaaccggagtggcgtacttgtgtataagagccatcatttcgtcggtgaaaggacatattggaggcttaaagtggggatattacagttgcaaagactcaaaaactcaaaaaaaaagtattgtcaatgcttatttatttcttatttcaaaatgaatttccaagccttttcttacacattgattttatatgtcatgcctttgaataatacatgtgtgtatatctaccccgcttgttagggctaggtaagttcacaaacttgacttgatattataactcaaagtcttttgactttagtaaagtcctaagaacataaatggctttaattccactaaaccttgcagtgcaatttctttctttaaacacactaaattttaaaattagtttacaattccaatttactttcctctaagaaatatatcttgggttaacaaaggtgacatgactatttagaatgtatatgttgatgatattatagtcattgacaagaatacaaaagagatgaattcaattaaagaattattagtaaaatagcttgaattcgaagattttggaacacttggaaattttttgggtaaggattttgttaggagtaaaaagagtatttctgtatcataataatatactcttgatctcctaaaagaaataagaatgctagattgtaaggcttgcaaaactggaatcaaactttggaacaaagttcgaatgctcaaaagaaaagcagatgataaaggaagataccaaaaatttggcaaagcttatttgtctctcacatattaggacaaagtgcatcgagttttgaggtatttaaagagaaaaccgggcaaaaagttatttttcaagaaaacattcaaatgtaaatgtatttatcgatgcaaaataggttggatcgattgacgataaacaatcaacatctagctattgtactttagtgtggggcgaaaaagtaagaaacaaattagtgtcgcaaggagtaatgtagaatctcaatatagaatcaagactcatggagtgtgcgaggcaatttagcttaggagactgaatataggagaagtgttcaaccctactatgacaaatagtatacaaaataacaggaaacaaaacacttgaaagtgattcatcaccaaagaattatgtgagagtatttaatttccttgcagacaagcttaggctcatcaacatctataatccagcttgagtgggagtattgaaaaaataggaaatcaaatcttaaacaatttgtttgtatgaagcatttgaaaaattataccaaaattatatatatattattctcctaattttacaaattttacagcatatcttagatttgtaatgcaagaagtttcatcctctagccaatgaatggctaattcagtgtgaatagttgcataataaatttct

SEQ ID NO: 17214 - DNA, 2294 bp, Cannabis sativa
aaaaaattatgttgtgactaaaaatttgtcactaaaagtaatagttttttgtagtgtctataaatgtagaatataatctggtgatggcttgatgctaccattttttaatgtacaaaaatataaaaagaaaaagtgcattaggtcaccatcgaacttcataggtatgtatcgggagtatggaagataaagttagaaaaaaaagagaagagagaaaaatataatatgcatattaatataaaatgtgcttctaattttttaattttaataaacttgtatttaaaaaatttaatatacaccataaaaatatatttatgtatataaattcaaatttccttaaaacaatccatataaattaacatttaattattcataaatattataaaccataatatgatttggataattataatgaaaattaattagcatcgatgttcgaataaaattattgttgagatgtctattctatctggcttataacatgacaccatagtttaatttgtgtatactatactacaaattaattagataatgataatccttcttttcttttttcaaaatacattgatcactaaatcttatttaggtagccctaatccgtcagcctaattttatttactcaccaaattcttatatgttaattatgactctaagattataacacgtcatcattttataatatattaataattataataaataaataaattattataaatttataatagatagtagatggtacgccaataattgacgttatttgaagtttgcttatatatataatgataaacaatacatatacaaattaacatatatataacatcgattaattaacttacagtaaaaaatataagcagttttttttttcgtaaataaaaaatatataagcagttaaatggtttaaatgcacctttcagaaaaaaaaaatggtttaaatgcattatatatgtaaaaatggcacactgatgttttatataaagtatatgatcattaatctggtaataacaatattctctttctctaaatgtatgtccaaattaaatcgtgtgaaattaaaaatacactattaattttgtttttctttctttctcaaatatataaaaattaattattgttgatcctaagattaacattatgttagattggtgagataattaataaatttaaataaataatttagagacgcacaaaatttaaatttataatagtttactcccatgtcgtgatagtaatgaagctatatatacatctacttcgagttttttttttcacaagaattacagagaaaagtactaagtgtttaattaagctctagttttctaaatataaaaaatgagctaatgaaactctcaatgaggcctacaaaaatagggaaagatacaaattagaaaattttgaccgtagatgataatctaacggtgaaaattaaatagcaattttttgctgcctaagggtcccgctgcgagtaacttggagcttattttcgtaactcccttggtgtgaaatttgacgatgacagcttcagaattgcgattgaagtgtggcacatgacttgatagagcattgaattagcttcgaaatgcaagttgaatcgcatcaatcgaatcaatattcactgagttatgactgtttactgaagacagttcatgacattaacgctgaggtttacatatcttgtgcccatgcatcccatcgcccagatcgacatattacgtcaacttggatgttgggtaattgtaaaaacgtcaaaggaatgtactttaagatgcttaagtgatattttgacatcacttagtcagtttctgtgttctggcgaagctggtcaccagttcacgaaaatgttgttgttctgtaaaaatgagagacttgaaactcttcattttcgagtgagccgaaaatgagaaatgcaaagttgtgaatttgacttctttgactttatggatctttgttattgtgaaaaactagatagcagtcgaaacgacatcaaaatcggataagcagacaacacacgagtccatctatcaacctgagtgctgggtacttattctcgagctcttgggatctcgtttttgatactttcaaggcttttgaacttgatgacgaggtcattctatcccatttttgaccattccgaattcagtggtcgtattagttttaatcacaacaagtatagtgactaaaaacacatttagtcacaacgaattatgatttttgtgaccaatacctttagccatgaccgtcttaaatattgtggagaccttgttctaattttcaaaattaggctccttataaaaaaa

SEQ ID NO: 17215 - DNA, 2401 bp, Cannabis sativa
gagaacatgattgtatttgtaacaaccacaaaatatctcctttgtaataaatgagtagtttccaatgttggtgtagtcagatagagaataaactactactactacttaagtgttcaattcttggataaggtatacaaataaaattacataaggtttaattataggtagagaaagataatttatttattccaccttctttaggcaaaatttataaaaagtagttgaggtaaaatctagatccaacccataaaaaaaaaaaaacaaagtgaagaagattcttagaaccaagagtatgtgggacagatcggacttccatattacacgatttttgtctctcattgaggaattttcaaaagcatatttgcttcactaatactattctacattatcagtgttttaaagtggggttgttgtcttcgtgctcttcaagcaaaaaaacattgaagtaggaaccattattatttatgagcattgctattaggcactagtagtaattggtgtctagtactttctcggtatgtcgcgttgtgattggctagtaatactctctaaaatttattacattaaattatatgggactcgatacttagttggaccaatagcgataatgacacataaaaagatgctaggcaccagtattgccctttaacatttctataattgatcaagataaataaatgctgaattagattaataaatactgttgactactcccaattagatttgattctcgtttgaaatcactatattagaccaataaaacaaatttgaccagaaaaacatggcttattatattgtcttcttcccaataccctgcttttctagatctttagtagtgtgcttctctccaacttgttattaaaattaatataaaggacataatgagaatcaaaggacattacatgtatagatttgtctccatttcatataattgtttttggtgtatttaataagagaaaagggaaaaagtgtataatagtaaaataaaatgaacaatagaaacaaaaatcagtaagtgatgaatgatgactagtacaccacaaaccaaactcaatcaaaactacttcacctctttgtgattttaatagtttcatacatatcatattatagatataaatataatatgtatagttgtccagatatcaaggatatcaacctaattaaattttattttattgcaacacatttaattaatttttttaattattttttttaagaataatactcataagttctgtcactacctagtccgttaactgtcgttaattcgttattaatgattgaaccgatatgtatgtgtatgataattattattttttaaataaaatcattttaattgttgttacaaatgaaaatattgtgcatttattttttatacccttatctatctactgaatttaatttgtgttcttttatttcatatatgaaatagactgaacagaagaactccaccatgaacttcaggtcggaccagtttaaattatgaacaatattaattaatatacaaaatgtcttggacccatatatcttcatcatcacaataataatagtatcagtattgattacatgggtcatatgataataacaaaaaccagttcacttgtgagtgtttgcactgttcttctcagcttgctttttttttaaaaataaataaataaataaataaaaaatattagttattttaattacctttatttttttggtggcatcatctattttgacaactttgtcccatcgtttttaagataattattgtttcccgcggccccctaccttttgggaaactctcttagtaaagtaataattgtctgcattattataatttaaaatattttcacatcactaaataaaaaactaaatataatatttgcaagatcaaatggattactagatattaaaatacagttcaaattatatgggatcaactaaattttagttttttttttttttaaaaaaaaatcttttactttttactttgccaattttagagatgtgaccctagccaatatcatttcattcaatcaatgaactggtcgaaacgataaatagatatttttcttgttcttggagctcaatcactaaggcaaattgtttttcaagtctctccatttttgtattttagaaaatggggatcccctctctatttcttgttagagcacttacatttgatgagttataatgctcttttattcgaaatagagaagagaatgttgctaatgcccgccgttattaataattattaacgacagattttagcgccagggtattccgctgctaataacaataaatgttatggtgatatttaataaattaaaaaaaaattgatctaggcgcattaatcacattgttgccatgttaaacttatcagtcacgaacttaaggcgcaatgataagtagtttt

SEQ ID NO: 17216 - DNA, 3765 bp, Cannabis sativa
tttttatttttaaaaattaaaataataatttagaccaataatattttgacacgtggcaattttttaaaaagataacagttaagttaaattaaggactaacggacaaacaaaagatatgattttgaggattattgccgctatttttggaagttggggactaatctgcatcaacgtgaactttttggggatttttaccgcaaatttccttgttttttttttttgatatattactttcatgcataaattagagttgtccataaatttttgttacctgcttaaactaaactgaaaaaacttgataaaaaatataaatcgaaaaactcgacgaaaatataacccgttcaatttttatattgggcaggttgaaaataatattaacccgcccaattaatctgaactaactcaaccaacccgattaaaaggatttttccatgtatatttaatattttattatatatatttatatatattatatgactatttaaaaaataaaaagttgaatctaatatgtttttttttatggtggttgatttgaattttgaattcaatttatctatatttgtctcattattacaagtaactaaaatataactattgaatgtaaaaatataaaaaaaatattagtagtcggtttggacgggttaatccgatcaaaccgatcaatttcattggacgagttattttttttttcttaattggatgggttgcacttaaatttttgtaactcgatatttacattggattgaataaaatgtagcataaatcgaccaaaacgatcgacatacacccttaatataaatagccgtatttttttaaaataaaaatataaagttaaatccgtaaaagtgtagattatttttgtaattttttttttatcatttttggtatcaaaaaaagaaaaactcttacaatcctacatcagtttattagaatcattagtttatcaccgctattggtataatttaatatcagatcttatattttttttttttttatataaagctcaaattttatatattttttatttaataaataatatagaaaactgctaaccactcacaacgtgccacattaatatagtaaattgcctaatataaatgctcaaacttacccacctaaattcagaatcaaactgattttgtgatagcaaaatcaaaattaatctttcattcaaagattctcataaaagaattaactatggatctacatttcatgatcctaaccaataaaccctccctctttcttcagaaagataactgaacccaagtattataataacaataataatttcctttttattcccaccaatgtcagttctgaaaaaaaaagttttaaaaaaaaatccttatatgcataatttgataatatatatttttttttcttgaaaaagaaaaaagagtgaaatgtttcatctcaatcaatgaggagcaaacctcttcttcaacttggaaagctccttagaattcaacccaaaagctttctccaaaagctgatctttaatcccagatccaaatatagctgttggaatcctcatcaacccaggattttgactatcaaaactcccaagtatagtggcaggagtatctcccacattcatctgaaagtgcaccatgcccttaggaaacaccatcacctctcctttctcaatcactttagcaaaaatcttattgtttgtgtcaataaatccagaataaaccttcccttcaagcacaaatgctatctcagtagcccttggatggaaatgaggcacattaacacctccaacctcaaagtcagctcttacaaatgacattccaagtgtgttaagccctgcaaagatgttagagttaactgaagtagcagcaagccctgttgggccaaattttccagaagacttaatgcccgagaagacgaaatcttcaaccgttgcggtggacgagttcttgcattggttggcaatggttgtagcctgcatgttaggtatgcagaagtcttggacagggtcaggatctgaagccaaaatgacatagttgttgagaaagaaaagtactaatattattagaaacattgtttcaaactaagtataaaatcaagtaaaaaggaatgaagtaatagctcagtttttttcttattcaaccagaaccactctgatttgggatataaatttagtcattgatatgtttatagaagtcgtttctatcacatttttttttgcttgagaagtaagtttggacttttggtccccaaatgacagattccactaactccagcaaggtttgtcacttgtttatttctattgtggtttctttcttatagtggtgggaaagtgggcataggcatattaaaaaaagaatataatgcatgttcattgttgcaaacttgcaattattgctgtacgcgtatttctgaagactgaaatgagtacctattttctcaacttagcataccaactgcgtaacatacaaagcttttatttacaggggtatatagggatggatcatttggtggattaagaagaaagttacaaaacagagaagctgtaatcttgtagtcataatcttcctcaattttgctacataataataaatgaaacaattacaatgattgacttagagaaaatttattaatcaagagtgctacacaaattagcatccaaacaaccgcaaacagactcatttacatattacaaacaaaattaaaaaattattggtcccataaaaaattataaatatttttttactcaaaaatacaagtattctaattctaccaaattaaagtatattgttgccgcataaagcagccacaacaatactatcaagcaaattgcgatctcatttagcattcaaccacagaagccaatcagaatatgacgtcggtcaaatggtattaccaagccaagattgaataacctgaaagaattgcttggagaaagaacattcaaagaaaatacaacaatccacttttcatatgctaatttttgggtttttaattaaaataagttttataacttaataaataataatggtatttctctattttttttcgttggaacaaaagaaagaaaaatcttaattgaatcctattttatcattaaagtaagcaatagaatagaaattattcaattaagtttgctagtagagattttggcacaattatgggatggttggagctgttatgcggcgtgttgacagtcataggttggggcgtgtggtgatgatatgttgggcggtgtggactgtccggaatgagctcatttggaagcaacggcttagaagtgtggaggatgtggttgtgtttgcatatttgaccaatggataaaagcttaaggaagtggaatgaaacattcctctctgttgaagtcgttatgtgaaggtgtgacggtatcaagattaatgtagaagcaacttcatttgagcaacaaggcaaatatggttatgagatgagcaaaggtgggtcactgcattttcacggtgtaaaatggggaagcttaatcctaaagtggctgaagctattggcatcatggaaattttgagttggctgaagactcaaaacttttctcaggcagccattgaatcggacaatttagtggctaaagattctatttatttagacattcaaattaattttttagttcaatttctttttttttttttttatgattgcgtatgttatagttatttaagatcatttgtatattttttaaaaaattctaaataatttacattaaaataatgtttaaatattttgttgtaatcgcaataggtttttcttatacacatggtaagt

SEQ ID NO: 17217 - DNA, 5333 bp, Cannabis sativa
  modified_base (2830)..(2830): a, c, t, g, unknown or other
  modified_base (2869)..(2869): a, c, t, g, unknown or other
  modified_base (3064)..(3069): a, c, t, g, unknown or other
ttatcagaaaatcaattatttattttatttccttaaatagaaatttatttctttaaatagaaatatatttccttaaataaaaatattcttataaattcatctttcttgtctgctgaagcttctaaaaagtcctcctttatttggcgatcaatcttttggggaaagagattttttaggctagtagtcactggcttattagtgatggctctcaagtgtctatttataatgatcggtagattcctagtctagatggtaatatgtaatcttcgattaggtgtttgcctaatgatgccacaattgattcattaatccttcccaatggttattggaatagttgtttgattaccaacattttgttttaaatgaggcatgtgttattcttactatcccctcagctcatattccaatcatcagttggtttggaattttgagagctcaggcctgtactcagttaagagtggctattggcatatatgacccgtgttcgtgtattaaacaagcttctagtctagaggtattcgtagtttgtgggataaagtctggcaccttaatctcccacctaaagtgaagcacttcttatagaaagttgcccacaactagcttcccacttagacaatctaaaacactatggtattccgacaaccattaattgtcctttttgatctttggggcctgaaatatacttcatgctatttggggatgtatcaatcttactttagttcgtggcactattaccaatcagttacaggttcctatttttccttgtggggatatttatgaattcttctatttttgtttggataatatgtcatttgttttatttgaaaagtttattatttatctttggagaatatggtatagacaaaacaaatgggtgaatgaaaaagtttacttaaatgataaccatatgtttgattggagcatggattatttggagcgcttcaagttggctaattgtcattctaatctcatgagataaatatttttgacaagacatctattaaatgattcaaactatcttttggggtggttaatatcaattgtgacgcgagtttatgtagtgacttggaatcggataaaactattgctggggtgattattctgataactcgggttctgttcttgctttcggtacttggaattggaatggttgtttctctcctattattgctgaagctttgagtatttatcatggcctcctacttgctattcgtctttattatccaaagttggagttggaatctaattgccttattgttattcatgctcttaagaataataagattgatcagtcctacttagattgtattattagggataaccttgctcattataataattttaatggtatttcttttcaatattgtcttacgattgctaatagtatggcacactctttagaaaaattatctctcacattgtcttatcattatgtttggtggcatggacaccctgattgtataattattgctcttcaaacatacactcatgatcaatgatattgtctggaactcatgatcaatgcataaaacaactaagtattacaaattcaataaaaaaaactctaaaaatatatttaaatattttttattatatagaaataaatataaataattttagttttgtaaatatattaaatgtaatttgattggatcggttttaattagattttgagattgacatccaataactgatccaatccaattagaatccatcttttaacatctaattatctaattgtaattagatatcaaatcttttgtaattggatcaatttgattcaaatggattggattggatcatgtccacacctaaattttggggaatagattcccatgtacgagttatgcccaatggatgctctgtcaacatttatagagaaatagaggggtgatagactttccttatctggtgcctggatctagaccttgacccaagtccagacccgaaccctcgacctcgaccaagatctctgttggggtttatgccctgaaaagcctgcaaagacatttactgattattaaataaagagttaaacatttgatatatgtgtgaatttaagttattaatatttattattgaatcatttatattaaatattagaaaattccttattcatatatgagaatgtggcttgtagttgtatagagaactaagaccactttgctatgaataaaacagtcagcaatatattaaatatatggaatctttaatcaatcgtcactagtacagttcactgatgcctgttctacggtgcaattaatcttggttcgaattactgatagtgagacatctaagtgaaggtgttgtatataatagagattgtatatcacaaggactgatatgaataaagttatctttattaacatgtcatttattaaaaagacctaattcatatcataacgatgatcaatagtagatcggcctaaatcttaagttatcatgaactcttgttcatgttattaatttcttagattcactcgttaaagtttcttagaaaagatgattcttacagctattgttttaagaatctaataatatggatagctgcaaacatgatgtacaattatgaaatctaaactttcctaatggatcgaatgttggttccctttaagtgttaattctagaactagaatgttgttcacaaattcagatgggatcttgaattatacttccactagtaaattaatgttactaaaggataaagaagtaattagaaggataaaattgtattttgatcaaaactaattacgaaccaacacatggagggctaattactagaattaattttatcaatagacactgcagttaaactcagtaaatataattntataattactaagagttcaatttcatatttatagtggantaatcatggaattaataaataagagattatttgattgatgagactcaataaataatctagtttattcgatcttagaattataagtccatggtccctgaatcgccaccttcaaaacactattaaggatagggataaagagttgtataaagttatttagaaaaatctattatgaattggaaaaatagtaattatttnnnnnngtaataaataaataatttttttcaaaataattaaatagggaacagacaaaaattgttcagaaaaaatttatcaagataaaagttgttaggacaaaagacacctacattgtcctaaaacaatggtaggcgcgtatacattatgctctccctatggattttttcttttctagctaattaattattaaattaattcaattaggtaaatatctaatttgaaaagtggttatagatatttcaacgttgttgagatattctctcaagcaattgagagattccctcataaatatcagtaattaaatttggttatagatatttatttatttaaataattaaatataatttaattaaagggatttaactactataaataagagtctgatttgagtaatcaaaatgacacttctcccttcttgaacactagaatttttgaaattcaagagagaaaaaggaaattgatttttctgtcagttgtttgttgagaactcaacaagaacaatgttatacactttattcgaataagccacactattctttatgtgtggtggatcaatttggaagatatttgtgtgagtctaattgcaatttcttcatcatttggattaaggaatataacttacgagaagttttgaggataccctgatagccttcaagaggtaaactttaaacttattatataattttttttaatgtacatacatctagagatctattagaacatggtacgatgataataagataatatgaaactcttctgttgcgtacttgatttagtaccataaaaccaacaaccctcgaccccagccctagactcgacctcggaccttggcccagacccaaacccataatcggaccctgactcgcagcctcgaacccggttcaaaccttggccccagacccgaatcccagtctcgaacctagaactgggtttgtgagagaatataaaaaaaaaaaaaagaaagaaaatagaaaacaacattttgatttttacttttttttaaaaaaaaacttaattttcaaaaaaaaaaaaattgaaaagtatggccaaacctattagtttttaaaaattgatttcgatttttaagatctgaaaaaaaaaaattaagttatgaagtcaaataccttattaatttttcatatgatgtaatctgaaaaacagtttttaagttatgaattcaaacacctcaattagtttttcatataatgtaattggtgtgtagagataactttattaagtttgaggtgtaacttagagtactcccaacaacttctccactttatcatttaaaatatgtcattaaaactcttcctttttctattttacaacacaattttatattatatcacttcatacattaatttctttaaactacatcacggaaaatctactttttaaaatttttattatattttattcatataaaatatataatattaatataaacatatcctcatacattaataattattaaaactcaaaacaattaataaatatgtttagaacaatgaatagtattctataaatgtagtgtgtgaatagtaaattttaaagaaattttaaaataaaaaaagaatttaaaacatctactgtaacatattatgagtacatttttttaaatttttaaaagcttctctattttaaagaaattgttgtgaatgctcttagtaagttgataggcatgcaatataaatagtacatattcttcataaccattcaaagtaattaagcacattatctcttctccttttgcttcataatgtatagcttctctgcatagtttttcttctctttgtgccacaaggaaggtagattctcatctttttcaggaaggcattaaaagaaaaaaaaaattaacaatctatcaaatttttctacaatcgattaaataagtttgacataaagttaaatgatagaatttaattttattatatttgtataatctaaagagaaaatattaactttaattataaaagatattaaaaaattaggtatgaatttcaagttatcgatgtgggaataattgctaaatcaaactaactgaaccaattattgccatcttccaccaaatgttttgttgaaaattctgtgggatggactcatattttatacacatcaatgaaaatttaaataaagagcggtaacataaaatatatctatatatgaaacattttttaataggtattactaaataaatttaactatatattaattttaaaaatattaaatcattagattgtgatctaatggcaaataataaaagaaaatt

SEQ ID NO: 17218 - DNA, 3723 bp, Cannabis sativa
ctactaatcactttttgataagatatctctctgtggacacgaccgcccatactacactacaacaaccgctttgtgaagacaagtttgggcgtaatcaatgtgttatactattttcccattattttaatttttctataaaataacttttttttatataataaacaacacttatgcaaacttataccttaaaacctataaaataaaaattccccttgttaatttaatgtttttcacaaagttacaagtaataatattatatatttagaactatcaacttcctccattaactaatacaaaaataacattgtaatcatacgaaatttaaagctagtatcctggccatgcataaggtaattaaattggtagataaaaaattgtgaagattgtaaccaaataaatgacaaaaaggagaaccgagaagaacctcacaaagtcacaatattaaaaacttaggcttgaggagatgagcttcattcatatcatatgaataaataaataaaaaacaaataagtaagaaaataattttgtggtggaaaaatagagggtaatccattgatttttatttatttatttaaaaagctaacccataattcagttacaaggggtgatgtttttgtactaaaaacaaaccacaacttcatcatccatctccactcttccccagaaagtgggcccatttcatgaatacgtggcaacacatgacttgctttcggcccaatgggccaagcccaatcataatcccctgggatgatgttctatctctctgttttagactgaaaaacgtttcccgttgatccaaacgggtcccctctctcctcaattccaacttttgcagaaaacgactttgatttgtcttcaatcgtacggtatcatgggcctagaagcaccggagctggacaacggtcagccccacgtcaccttggatggattgaaagactgagaattgaggtttcaaaatttgtttcttctgtattatttggagggtattccaagtaaaagcaacacctcagaactcagaagcaacgtcctttaaatcccggagagagagagagagagagcgtttcagagagatagagagatgggaagagcgtttgtttatgtaattttaggaggaggggttgcagcgggctatgcagctcttgaattcacaaagagaggagtccctcatggcgagctctgcataatctccgaggaaccagtgagtacaactctctgttttcactttataaatctgaattatggtgttacctgacgtgggtaggcatttttgagaattgggttcttgtacagatttggtattttgtctagtttgtggagaaaagtggagaagtgtcattagttttttgtttttttgaaactgtgtttggtccgacatattaaattgaacatttcagtagttgttggtctctaagtagtattaacaggacattgctgtagtcttatggaaactttttcctttttttttttgtttgaagtgaggctgtacttaaacttcttggattcaaatttttttcactttgttagctagtttgacaaatcatcaaagccatttttgaaattatgaatacaattttatttgcatgcggacgtgcagatgaatataagtcttatgttactatactcaaaacaagaaagcaagagtattatttggtccttaaattggataattcataaatatagagcttaaatgaatatttgaaatggacatatagcttaagtagatactatatagatatatgtctctaaaggatccataatgtttcatctgattctaatcaatccctactcaggttccaccgtacgagagaccagcattgagcaaaggatttttacttccagaaggtaaaggtccttgtcatgatatgtgtttttttctaaacgcaattgccagtgtagattgatatgtggggagcataagacctgtataacagatgctttgaagtatgtaatggtcattttttggagtttgactcggttcttataagtttaagattcttgtgttcctctctttattttgtcttgttccgaaacttgtatgtggcttgacaaaattatttgtgggaatatacagagcctgcaagacttccatcctttcatacttgtgttggtgctaatgaggaaaggctcactccaaaatggtacaaggaacatggtaactattgattcacatctttttctttatcttgaattcacatttatcatatgcaatgtaatttagatcttgggctcattttctaataggaattgagttggttcttggaactcaagtgaagtcagctgacatcaggcgtaagacactaataacagcatctggagagactataagttacaagattctcatcattgctaccggtgctcgggtactaattcttaacttatattttatactatgtttatgtgtgttgtcggtcactcttgattttgcaaaatgcaactgaaaaactttggtcactctgtcattagagcatatagatttctataagtatttcatctgtgttacctttttctaccatttttaattaaaatgtattgaggaatatggtgctgtgcaccccgggaaacactaaaagagcttgtagttgttcttttttatatgatgtgaaacaaggtatacatacgatatgacatacttgttttccattaacttattatgattgtttttttttcctttccaaaaatgattttctggttgtaatgaattttgcaattgtttgaagtaggcagtgataaaaaaaaattaatgctgcaagaatgaatttcccgttgttataatgaattttgcatgtgttggaagtaggcactgaagctagaggagtttggagtgaaaggatcagatgctgaaaatgtgtgttatttacgaaatttgtcagatgcaacaacgcttgttggccttatgaaatcttgctctggtggaaatgctgttgttattggtggtggctacataggaatggagtgtgctgcatctttggttatcaataaaataagtgtaacaatggttttccctgaagcacattgcagtaagtactcctactctgacaactctttttctaacataactgttttggtgctgcagtgcattatctctcaagagcatcttagttaatggaacaacagaatattgatcgtataattttctttgaagtgctactaattaatttcatttctctttaattttttgtctctcttccctctcttttcagtggcccgtttgtttacaccgaaaatagcaaattactatgaagagtattacaagtccaaaggagtaaattttgtcaaaggaactgtcttgtcatcatttgaaattgacaccgatgggaaggtaaatcttctaaggcttgtaaagaggcctagtttttatatttgtgaatataaatacttggacacttggtgatttccaactctaattgaattatcgtacaataattttaagaggctttagaattgatatatacaggttagatttttaatatgtcgattgccatttacaggtcacagccgttattcttaaagatggaactcacctgcctgctgtatgcttctgctggatcctttagctcgaacatctcaggctctgctggtttcggtgggattagcctttcatcaggcgcatcagactcgagttgattcagttgcctccgtagttcactaagattagagctgatttctaaacgtagaacataacatcattatctttaataccgagcgtgaaatgctgccaagtga

SEQ ID NO: 17219 - DNA, 4100 bp, Cannabis sativa
gccctctgcaagatcagattaagaagcagaaccgaagatagattctaaacttgttaactaataatgcattcgaaaagaactcaagatattcaatttatgactggcaacaaataaatcagtgaagttgtggtaagatgatcaaccttgattcctgcaatctcaccaggcatttcatccacaacggtaatcttatagccacgacgttgagcccacaatttatacatctgcatcaccattgctgcccagtccatgctctcggtacccccagctcctgcttgaacctacaataagcaataaaagatacatcattggccaggtttgtatatgaccacaacattaatacaatgccccttacacattttagtatatttaatgaaaaataaaaataaagaaattgatcaattatttaaggtaaatgcaagttctagggaaacagttatgtatatgtcaaaataacctccatgtaacatgagcaaggatcctgttcccctgctaacaaagcttcaagctctttctcctttgagatccttctcatcttaagcaaagcttttaaagattcctgcaaaaggagagttcaaattgagaagaggagcaatgtgtttggttaccaggaatgaaattttgattggtacttgcaattcatatggaaacagtctaaaactatgacaattgaacaaaatttattcacctttctttatgaaaaataaaaaaaatagcaatgataaacacgtaaaggggctatctaaaaagataggtttgtcaacactaatttctcataaaactatatacatcaatacatgcatatgcatgtcaatattctttccagtcacagcaaatcaatattaaagttaaaggttatggattataaacaattacagatatacaaaatcgtattattataataggacagcaaaataaaatggcatagggataattaggaaacaaagcatcacgccattaaaaacattcagcatagaagaaaaaaccacaagagagcaagtacatgcctaagaaaaagatacaagagcgcaccgattccaactctgcatcattctcttcccgagcaagctttaacatgtctatatgctcaagcaattcctgttcaaatgccttgactcctttcattttacccataagcgagccatgttcacggctaaccttccccgcatggagaggatcattccaaagatctggcttattcagctctactgagagcaaattcagcctaacaagcaacttcttccactgccaccatcaatgtcaagtatatgtctatcataataggcttaaataactcataaaagatcaactaattataaatgaagaacttagatgacactttatcaaattctcatcagcagaatcctaacatgttatcaatggaaattatgaaaagcctataataataatacatacctgcaaacgtttcttaattagatgaatggattgggcaactgccgccgcatgactcttccaatcattctcgctctcgtccagaatggtccaatcattatttaagattctatcgacggttaggccatcagaggtcgagggttcaatggctgtctgagtactaaaccaatgaaagaagctcaaagggacaaaaccagagcttgaagaaaacccagaaactctcttctccaaaacactcgacctatgatgcgaaaaacgacacctttctgaaccataattatttgtctttgttgaagcaactgacccagatcctaaaacgttgtcttttgagactgaagttgaaaaatagcgggaaatagagtaatatgagaaagacccagatggaatttttgagatacctgcgagaaaactcgaagacccagaatcgaaaaccaattgattttgagctaaagttgaaaaatcatgattttcagatacaaaagaggttaaaagaaaaggaacacgttcccatacattgttccttcctaatcttttcctgcaaaccaaagaattcatttttcaatttctgaacaaaagaattgagttggggtttaacattttaagattctccagggtttaatggtggctggctggcgctatgtctaatttgattcagaccgacccaaagattgtcgttttaaagtttttcccctctaaacgacgtgtcgtattaatctcattctaacttagcgattggcgaaacgacaattcaattgcagcaaagtatgagatcaacttgtttgggtcgaaccttcttcttcttccctattccactcaatctcaccaccatcgtcccagttcgcaaaaccctaatcaaatacaactgctgctactcaaccatgtcagactcagatcacagtgacccatccaaactaacttcccaaaatgttcagaattacccaatgccactctccccaccactgcctttaatctcaaaggacctagagctgagtagagccatgtcagcctcatcaaaatccagtctttattccacgtctagaagggactttatatatgaagatgagtggcttattgccgtcaacaagcctcagggagtgtactgtgagagcgtgtttgagtcagttcggaaggttctctctgaatcgattgatccaggttcaacctcttgatctcaattttgttcttttacttaataattctgttacagcctaaagaacatagattgaatatgttctcttgaaccttcaaagggaagaaactaagttctgagactcttttcacaatagagttggtgaatcaaatcttgttcaagacttaaaattctctttaactatcttcataattctctcaaagtaaggctgagaaccaatgccaatgacaaagtagaatctgcccttaaaacaataacagaaattaactactttgagatgaaacatgtaagttagttgattcatttggcttcatgttataagaattgaattacaagtctacaatagaaatgaagagatgtgctgtatctgtttatattggcttgaatcattattcttgatagaagctagtgtgtgtatgaggagtgttttcatgtgacagtgataatggaatttatgtgattaattcaagtgtactattttttgtttggtgattaaagttcaatgctatgcagaatttttttgattgagattattcgaactgaaaactagttattagtttcacacatttaagagttgtcattttcttgagtattggctgaattttcaaaattcatttcagggattgaggcaagccctcttgagcttcatcttgcaaatcgccttgatcgtgacaccagtggactaatgcttataaccaagtctcacaaagtagctgccaagcttgttaaggcatttacaacacacacagttactaaaacttacattgcattgtgcattggttcagttccaaagtgggaaaagatcaccattagatcaggtcatggtcggtcgaagtttggtgcctggcgtgtctatgctgcatcggatgttggtaggaaacttccaggcggatcagtcgtgagagacatggaaacatcattcgaattgttatcagtaagtggacaaggaatctttaaggagccatccatattcgagcaagatgaaagtaaggtcatcatagttgaagagagagctttaatcaatacagagggaaaaagggatgaaattttggtaagagctagtccaaaaagtggaagatctcatcaaatccgcttgcactgccagtaccttggaatttccataagaggagatgtcaaatatgagggtttgcatgagtggagagggagaacttatgatggccatgaacttcatgcagagagtctttcatttgagcaccccattactggtcatccgcttgtgtttaaggcacctctgccttcatgggccaccgaggcgtggcaccagtaatgatcttcaaagcatggcaggtttcaatgaaatctttctatgcaagttgcaccatttcatgctgtttgctgatttccctggaaaagatgtgggagaaaaccaacaagcagagatccttgctcaacacattctccattttttttgcagcttattcagaaagtaagattccttgagttattatttcagaagctaacctattgagtaacatacttgtatgagaattatagggattaatagagagcagacaag

SEQ ID NO: 17220 - DNA, 3768 bp, Cannabis sativa
aaccaagaattgccgttagataggcacttttaatatataaagatattctcattttcacttgacccttattagcttcttcaaccaaattgatccgaaaaatgaacactaacaaggcaagcaataatcccagaacaaatatttgagcacagtcaattctagtaaattaggaggtcaagacagaaaaatttcaacagagccaacaattcatttgagcacaaaaagaaatgcccccccaaaaaaaaaatcattgttatatatgtgtactgtacaaataatatcttcgttcactttatttgtcccaaaattttaactactttctctagagacaaaaaaaattaccctatcctgaacaattccatctattataacctgaatctgaatcttattcttattccattcttttctataaaaattaatatgttccttcatcttgatttgtcccaaattttgaaattggaaagcaagaaagaaagatacatacatacaccaaaagaaaaaaaaaagtatctctagaattaaaaatgtttgaaaagatttacttaaaacttaattgagtttacaagttattttagctgataaagcttgtttgcatatatgcctatttttttacattcctatggctactctagaattatttctctggtctgcagctgcatcatcaaatgaaggcgctcgtacttgaccattgttaactgcctctgcagtttttatattctcattttcactactgttagccaggaattgagccttattagcttcttcatcccagttgatcctaaaaatgaaaaccaacaacaatactaagcaagaaataatccccactaagaaccccatcaacattccacctagagaaagctcaaccttgaaggccagaaccgcagccagtggcaaagcaatgaggtaaaacccaacaatattggaatacatggctaaccatggcctagctgttcccctaacgattcctccacaaactgctaatgggaaattcacaatttccagcaaagacattagcagcagcatcttctttactcctcttacaatcctcttattatggctgaacaaagcaccccaagttcctctgcctgcaaccataaccaagctacatatgcagcctgtgatcacactcacagtcagagatacataggccgagtagcgagcagcccctggcctgttggctccgagctcattcgaggcacgaattgaggcacatgttgctaaagaaagcatgacagcaaagagcaaatagtcgaaatttaggacaatggtgagaattccaactgcttctttggcattattaaggtgccctgtcattagaactaagatctcataaccccaccactcaaggcatgtggtgaggcaacatgttccagaaagcttaagcagcctaatccaatctccatagctttggtctaaccaacctccttccttccacctcccttcctttgtgctttccatcatgattacatatatggccaacagagttagaactatgagatcagaaatccaagctgccatggcaactccctcaagaccctttgctttggccaaaaagatgttgattggtacatgaagggcgagagccagaccatagctgaacatgataggaattgttatgccttgtgagctcaaatatgctttgagaggacaaactattgctgtgatcaccaagtcaggaaggagataaaaaaggtagctccttgcaactactgaaaggtcttcttgttggccaaaatggatgaagattttatcaacatggagccacaagaaagaaataggaaccgttactagcagtaacaaaaagattgtcatgagaagggtcttgtgaaggagtttggaattctttgctccataagcttggccacatattggttccatggcaccactgagaccagtcaagacagaaaagccagtaacattagcgaaagtgaggccgagcgcgccacctgctagttgaagctcaccaagacggcctagaaatgctgttgtgatggcaatctttatgaaccaagacaaattcatagccaccaatggaactgcaatcccttgctgtgttttcagctctgatacaacccttttggcaaagttggctggccatgatctgcttttgttttcttccaagtaagatacacatacactagacataacttttgagccaaatggcttggtgggtttctttaaaaattggattttggcccttcttttttgcagaaatataaagaaaaaaaggaattgaaaacttgtggcctattgagttggtaagagtgcacgggtctcgtgagcaaattatgtaactgacaattgaggaagagtgttaagtgatggtggatttatagtgcaaggagggccatattcatgtttttagtgcttacatatccccacgttggaatcttgcaagtgagattttggtgcttgaaaagatctgataagaattaagaagaaaatactcttttttaagtattataagatagaatattttgtaggttgaacaatttctaaagaacataaagttgtggatgtgagcatatagatagatgcattaagtagagccattatggttatttgttatagatttttctacattaacaatgttgttcacatttagaaaaagccattagtgaacaagttaacgtatcctcatccaaattaaccaatagtatcaaccaggaattttagtaagcatcttggaaagcttatatagatatttatttattattattattttttgtggaacgaatagggctcatttatttaatcaaatattcaacaactgaattaatgaatgaatactcaatcataaatatgatgaagaaatagataaaacaatacgctaaatatttaattaaagtataaacattgagcaatctgatcaaccaagtcgctttggccgagtggttaaggcgtgtgcctgctaagtacatggggtttccccgcgagagttcgaatctctcaggcgacgtttttgacaatttttaattaattttttttcttcaaatctgtcaaattatttaatacgttctaaaaatccataaataaacttacaaagatctcatcgaactaaacaattaaaagcggatgaagttaaaaaagcatatcctgcttaatatgtttttagtttcttgaaaaattctgaattttggtaggtgtatacattttttttttttttttatttagattacatattaaatctatttatattacaaaaataatgaagtcaagtatgtaagaaagatttctagaaggttttgttatttttgtatgaacggtcattttatactatgttttggtaggagggatggagaagataggtgggaggagataataaattttgttaaatttctttgtttgggaagaactatttatttatttatttatttttttgaacatgtttggtaagagctattgaaggagagaaatgagatgtaagagaaatgggaatctactcaaatttccaatttggaatccctccaaaaatagaagaattaaaatttcccctcttcaattatagtaaattataaaaatcaatattattaaaaaaataattataaacataaaatagtaattttataaattagtagttatttcttcttcaatattacaccatttttttacttaacaatataaaaagattattactttcttttctctcccttatattcttcatctgtcatactctttcactttcctaaacataacacaattagtgccagcctattattattattattattagggtaaatacaattttggaccctgtgttttacaaaagtt

SEQ ID NO: 17221 - DNA, 4081 bp, Cannabis sativa
tctcctctacacaacaaagacactgtttcttacaagatataaattaaatacaaagatatcaaagtgacacatgacctagctgctgtaaggtgtatttataattaatatacaccttattgacagatcatacacgacctgaaccagaccacaactcacttggaaactttcctaaaataattcttcaatcagcctagaaatttctcattctatacctatagaatcgtgagccgtaagtgtgacttcacttttatagaaaagcaaactcttgcttcactagaaatctgaacaaacaatttaaaaaactcatgaaggatcatatatacataactgaatagatagaaatttgttgagttgtcaaacttaccatatatgccttacttttcataaatagaaaagcttgtaatatttcttaccttatataatttaattaatataaaaacaaaattaaagaaacaaactaaacaactcatcccaaaataaataattaaattataaaatatttttctcaattaaaagatatcaaaaatagaatcaacaatatcctcctttggtacttttttgacaaaacatattataagaagaaaacatacatcaagtattaaaaataaaaataatagagtattgaatatactcccccttcatgaaagcatactaacacataaaacaaaacaatttcttcaacgaaaaagttcataaactacaaacacacaaacaactcctcttgagttcaacgcaaccacactctcggagtagcggaaaataaagctcataaacacttgtccccatttttgtctatcaaagaagccaaagacaaaagtaaagcgacttctcctcctttttgtcggtaccaggagcagaaggcatactggagcagcagacgaacgtggagctttggtctcagatggtgatggtgtaagtgacggtgatggagttacaaaaaaatgaataacgaattagtctctttgacgattgggacattctttaacttgccattagaggttggaaaccctaaaagatcactcacactgtaaaagaaaaaataaaacttggagaaaataaaaataaaaaaaaaatgagatagtgagatagtgtagaacgtgggtgaggatattattaaggaaatgaaaaagagataagggtagttagatatatagtaaatagaaatcaacattcaaaaaattagaataaaaaaaaaaagaaactaatttctttcttacccttgagcttcacgtgtgcctaaaacagaatacaattaagctcatcttaaatttgatcaaatgtttccattaaagaaaaaaattcaagaccaagaccccacaaaatttgaaaacaaaactaaaaaagtgaacttagccatggattcttgatgctactcattttcatcctgtgccaattggtcaaccgaatgcgggttggaactatgttgcagattaccttaccccagatggtctttgaacaaagacaagttgaaacaaatgtttagtgaggaggatgtcaaacttgttcaaaagatcatgtgcaacaacagagatggggatgataaatggatttggaaaccaaattgtaatggaaatttctccacaaaaaccacgtatctagttcaagttgataatgtgaatgatgtaggggtcacttcccctaggggtttataactagagaaatggaagaaactttagaaggctaaaattcatgagaggcatcgttttctgtaatggagcatcatttctgaggccattcctaccaaggatcgtattgccaaaattatttcaggtacgaatttgactttttccctatgtggtaatggccctgaaaccattgaacatgtgttcctctcttgtgagtttgctagagcaatttggtcctctaaccagtggggttttgttccctctgagtcgctttccccaacttgtgcagcttggttaagaaatatttggcaccttaaatcttttggttgatacataccatttcctattatctgcttccataatccatgatgtcatctggttatgtaagaatgatttggttcacaacaacaaaattccaaagagcaacatttctttcaaccaaatctacttatctttcctggaatataaaactgagatcatgcgtttggagagtgacccaagcaccaacaagaagtggattcctcttaatggctagatcaagattaatttagatgggacttgttcccccaatactaatgctcttagtgttgtggctcgtgatgagaagggaaaggtgttatggattacttccaagttaataggggttgtctcctccctagtggctgaagctagcattgctcttatggcatctgtattgcatttcaaaaaggccacaaataatatatttggcggagggggattctaatttgtccattactgtagtaaatggaggagatattccttaagagatcgacagaaagaccaaagaaatcaatagttcgaagatgttttttaatggttgtagtttcttattcacacctccgtcgtataattttgttgcccataatatggcaaagtgagataagggaatgtgtgttttgtaggatatcaattttgattcccttcctactgaactgttttgtaattaccagaaatcttccttttagtttatgatatccacgtaggagtataatggagcaaaacaccaaagttgtcaaccacaataagttatgacttgttaggctttgcttaatatgaagactataatattgtttacaaaagggaggagtaagtgtcataaaagcaagcatctgaagcaagcagggaaaattatccttgccttaatgaagcatatgctgtacaagaaaatcaaagcatacaaaatcaaaatatctaacatattaacaagggaagaacatgttaaacagattaaaccaagaaagaactacccgcaagcagtcaccagaatatagaggaagtatcaaccatgttccattttcatacatttcatataggcattccttttggcacaatcttatctttcatccacatgtaaattggaaccaacaaaataagttgctgcagttacaccgagaagtaatcgcagaagaaacgttattgaatttactggcttcttcacatcctctgcctttggaccaagcagcaaaaatgcttaaaccatcagataaagaatgtgtacagtaagtagatatattgactcttacataatacatagtgccacatgttaatgcatcttatttccaattattgtttttaactaacttgatgatgataatgtaaagaagaaacaatttacctgaagaggtgagtccccagaatagtgcttcacaccagtcacagagcaacccataatcaatccatgacgacgaacaccacggtaccattttggacaaattcttttcactttttactaaaaccagcttttttaaaccactcaatgtactcctcttcctttgggaagagcatccatacgtcttcaaaaaaacgagacagctagaaggttgtgtacacaggacctatgatacaagctctccctcctatctttaacaccctgtatgcttctttgatcccacattgtggatcaggccagtactcaatactaagtcaaacaaatgaaaaaacttgcattaataacagataaactttcattaattagaaagtttaacactagtcattgctaaaactaataataatgccagcaagtagtgtaaatggatgtactttagtcaccaaggagtttttgtagagccaaaagtctgaagtaagaactctaaaatattttgtcacaacactaagtagtgccaaaaaaacaacacaacacttttggtggatggattccaagcaccaaattggttttaaaagtaactttttccgacaaaaatattagtgacacagagtgcaatatttcagactacttacttttgctgctaaaaataactgtagcgacttgagtgtaatatttgaggctatttagtgactttcaccgcacattttcataaaaaataatcaaaatccagttctgatagctccttattttaaagcattaatctactaaaaggaatacaagtttgataaagccaaatttcttctatataaatggtatggtacccaaaaat

SEQ ID NO: 17222 - DNA, 6794 bp, Cannabis sativa
aataatctggattacattgaaataaagttttatttagggcataaaacccaacaggttctccttacaagggagccatggttgatgaagtacagggatagaaaaaccagaacccaccctccacctagctctcattttaacaaccgtttttgcctcaaagacactcttccaaacatagcttgggttagcagctccaagctcaggatcaaaaaatgaaccttgggaataatatctagtcttgaaaactcgagccactaaagacgtaggatttgtcaacaacctccacccttgcttgactaatatggataaattaaaatcacgaagatagcgaaaatccaatccacctttatgtttatggagataaagcttatcctagcttttccaatgaataccttaaccctctaaggacttagtatgccaccaaaactgcctcataagcctgtcaacatctttgcaaatatctaatgggatcataaaaatactcatggcataagaggacaaggattgaacaatcgacttcaataacaaataattaaagatattctacaataattataatattaaattatatagaatagtattgtaccaaaacctcctagcatagtattgtatgtttgggttgggttgggccaagtaagtcggttgggtagtgatgtttctcttttcaaagtacaattttaatcagcctttcagaaaccatctgtctccactactacgtacacttcttcctctgtactactggaacctccttccatatcaaataatataatattatattttaagtaattaattcaactatcgtctaccacttttaccaatttgtccctttgcacataaacctcaagctacttgggttgtttcctatctacccagcattctcatcatcatagatattcactttctctttctctttttctttattattaattatttttttcagtaaaaaaaaaataaaaacgtaaatatattttacagtaaatataatatacacacacatttatatcatgctagtaattagtgttttatagtttcgaattttagtattatttggtatattttttcttaatattgttaaagacaaacttaaatatttcaactcaaacttaggtatttatagagttaaaaattattaacaagctaggcatttaaagaaattattattctatttttaatgtatttgtttttatacattttatccttcctagttatgatccctttaccaaatatatacatgattggtcttcatatatcttcaaaatcctcattaattccatattaaataaatatattattaattatatcatgcataatatttcttaaatattagagggcacaaaacttagaattaatttaagactactaaatatgtgaaatacattgggattataatgttgtccaatgtgaacaaattaaaaaaaaggagaattttttttctttttcaaaactagaaaaagttaattgcattgcaatatagttttttattttattttatggaacactgcgcgcaacacatacatagttgaatatatatgctcgaatttataatatttgaactgtcgttttctagtttctacttcaagcttgtttacacatttgattagctcattttagtatcatatacatacagaaacttaacaattgaaaaggcaatttctatgttattttcaccgtgataatgctcatgacaacacttatttttttttccctttctttctaaaatttcacatatttgaaaacaatattaataatagaaacatttggtagtatcatttcagcgtgaaaagatttgaggtgaaagctagtcacttttgttaattactatttaatacataatacacactatatagcttgctatctcttgtagactagtctctacgtcaactaagttaatcgtcgaatggggaagccccgagttgacaatcccaaattccaacatatataataataatttttcaactatcaatgtctatttcactctctttttataacatcatttaattttcggtcaaaattacctcattttgattcttaccgtgatttcacgatattggtatcactccattcctaaaaccatttatcaacattgctttaatcatcttatatattctctctttcaccaaatagaactattgatagcgacgaaaatttatagtaagaacaaaacaaaacaaaaccaagaattaacactctaagaagatggtgacgtggcattaaaacctctcttgggtaatgggacccacgaatcacgacccgacccacaattattagattgttttgtttttattgttatagttggagtactttccaccactgtcaaagcaacatcaccagcagctgctttcaggcttcagcacaaccctgtctccagaactttataataataattatttgttttttcttgttctttttattacaaccaaaatcaaaaaaattaggggggtaatttcggtaaccctgaaaaatatcgttatacacttaataattttatttatatttatacaagaacgttcccaatagtgaaaaaaagaaggaagagaagagaaccagctcaaaatagcaagtgagaatggatcctgatactttcacggcgagctttttcaagtgggacccacgaggggtagcagtgtctccttcatcggtaggggtaccgcagttggtgccggcggcggcggcttacgcagcggcggcttctaggccggtaagggagcttggtggcttggaagaactgttccacgcgtacggaatcaggtactacacggtggctaaaatagcagagctagggttcacagttaggacactggctaatatgagggacgaggagctcgatgatatgatgaacagtgtccaacatatttttcgctgggagttactcgttggggaaaggtacggaatcaaagccgctgttagagccgagcgccgccgtctggaagaagactacgagttatctcgccgccgctcctccgctgatacccccaccaatgtcatcgatgctctctcccaagatggtatatatatatatataactaatttccctccgtatgtatcttttataaattattattacttgctgttacttcaatgaacagaagccatgtgcttaggctaggcgctcaattttataagaagaaattcactgttttatttaatatttttttgaattatttattaatatataaatttgagagtataatgatgaacagaatatttgagtaaagaagatgagctgctaactaactcataacagaaagagatagctaatgtaactaacttcaactaactaatatcatatatatcaggactgtcggaggagccagtacaacaagagaaagagatggtggggagtggcggaggaggaggagggggaaaatgggagaaccaggcagtgatttctcatgtagagaggaggaataataagaagcagagacggcggagctcaaagggagcacaaaggagagtgatggcggtggatagcaacattcacgagttcgtcaacgacataaacgacgctgcggatcaggaggaggatgacgacgaatacgacgaagatgacgacgacaataataataatgtcgtttttggaaaggagagcggtcgaagtaatagttgtagttccgatcagatcaggattacctgcgagagacagcgtgagcatccatttatcgtgacggagcctggggaggttgcacgtggcaagaagaacggtcttgattatctctttcatctctacgagcagtgtcgtgatttcttgtttcaagtccagagcatcgccaaggagcgcggtgataaatgccctaccaaggtaatttcttttttgcttatttaaaataataatattaaccattttttagtttgtattttccaaaaataattgattgaattgttggtttaatgattaaaatggattttatattttttaaaatagtataaatagtatttatgaacttagtcagttttgttataatattttttgatttaaaaaaattattgttattgagtattgctagtgtgagtatttacgatgttcgaatcatctaaaaattattttttaaaattaattatataatgtccgtgttaatcatcaataatatcttttaaccatttttttaaacaaatacaaaatttaatttgtcaatttataaaagttattgactccaattaataacttttattaaacagtcttatttaccctaaaattaattatattttttaaaatagatattatatatatatatgctgctgctttccgatgaaagtttcacctggatggagttcagtagggagatggaaattggggtcttctgtcattttggtgactgatgggttttgttagggacccatttctgagttgagcaggtgttccaaacagaacttgacaactcaacaagactagttgggttcaagtctaaccagataaataaatcaaagagtgtgaaaattataaacaaaaaaaaaaacataaaataaattgaattaattaattagcgaatataaatggtatgtgtttgtacgttccacttaatagttaatgttgctttctgcccatgctggtctgaattactgtattgggcagtggtctactttcgtgaagactacttcagtgtccttatctttctttctttcttttaaatcaaaagtatatatataactccacgtggaaacacccgcttttgacaactggcataaacacctaatcatacgacgaatctctatgattgacttgtcggtttttgacacattggattagtgttgtcacaaactcacaattctcaatgtgggtggtcataaggttttttctttttaactatatcacactcataacacgctatagtacattcgaaacatgtgctttgttttgtttggcaatattattacataaccgttctttcattaattctatcatatctcaataatttatactaggtaaaatactatttgcgattgtaatatataaataaataaataaataatatggattgaaatgtgcgtacgtacaggtgacaaacgaggtgtttaggtttgcaaaaaaggctggggcgagccacattaacaagccaaaaatgaggcattacgtgcattgttacgccctgcattgcctcgacgaagaggggtccaattcgctgaggcgggcgtacaaggagcgaggcgagaacgtcggggcgtggcgccaggcgtgctacaagccacttgtggccatcgccgctcgccaggctgcatgggacatcgattcaattttcaccacccatccgcgtctctcaatttggtacgtcccaaccaagctccgtcagctctgccacgccgagcgtaatgccgcggccgccactgctgcctcaactccttctgctccgtctactgccactgcatgctctgcctctgctgctcatctccttcttcccttctaatatcaatatatatatatttatatatgatgctgtaaactgtaatttaagtctattttctagtgtgttttacttgatatttcatcgatggtatgtggcatttgacttgattttgatcgatgcatatttatttgttctatcctaagtactattacgtactcctgtatgtatatactatatgtagacgtagtactgtgctatatttatgttcataatattacattctctcatagtcacattcgaaatcgtagctagagttcataattaattaagttcgctcaacaatctaattgtttaatcctcatttattaagaaagtaatgaaagaaagaaaagaaattaattatcttcgtatcttttgttagagaaacttttccactttcttggagaaacaattttactctaaataaatgaagtgtcattttaattcacaatttattgaagaaaaaaaactacatataaaaaattaatttaaacaactcctatcttattctctcattaccaaaattaactattttttttttcaactaggaattgaaatttttcatgaaattttttgtgtaccaactaaagttgccattaattaattgctgatcgatagtacatgtgtgtgattagagtgattttttttttttatattaattatcaatttaaaataagtaaaaaactttgatattaaattttttttttttttttgaatattaatgcatattatttttacccacaaattatgacatatttattattttaccttgcttataacaaaacctaataggactactttacagtactgtagatagtttgggaattatttttaactgacttaaaaatttaacaaaaatcctaaattgttttttcttttaaataattttcaataaataatgtgtaaattttttaatatcatttatctttagtttttcttttaataacgagatgtctcaaataaattaaaaaaattctatgtacacaattttgaccttttcagtatgaaactatattagttcatccattctgtgtaaccaaaaaaaggaaaatactaagaattatgcaaggccccaatgctatcaatggggcgcctttcattgggcctatttgctttccttaatggtggaaggagatattatttgtgctgggcctttttactttttcaatgaggaagtattatacagaaaaagccaataccaataataccagtaccattgatttgatagggaataaataaacatcaattacaattacaaagattagaaatgttcataccaaataaatttttatcagacgtaaaatgctaagtatagtgtctatgggttgtttggtacgcggtataaggattgtattgtattaaataataaataatattatacaatcaaattttttaatacaatgtatgttgtgttattta

SEQ ID NO: 17223 - DNA, 10622 bp, Cannabis sativa
gatgactgacaagaagttttatttttttttatctatgctagaacgataattgtttgtgatactgtcttttgtgaggtaaaattttaaaaagaagaaaaaaaaaggaaaaaagaaaaaaaaaaaaaagaaaaagataataatttataattttaaaataatttatttagttttctttttaattttaaattattttgaattaagattataatttggaccaattatttattgacacgtggcattttgaattagaaaacggatccgttagaaaaaaagaccaacagacttacaaatattgcgaccttaggactattaccgccaatttttgaggttggggactaacttgcatcaaccttaagtttttgaggacttttaccgcaattatcccttttaaataaattgttatccttttatgtttgagttagacgtggtaacatgaaaataatccaaacttccaaacctaaaccaaaaccagttttcatggtatcattgtaatatattgtatagggcaagacttaggtacatgtcttcaattatatatatcttctaaaattgaagaagggaaatgacaaaattttgcattggacatagacagtggacccttgggtaaaatgactgatgcttcttttcttaaattaatagactgtaataattatttattatcggttggtacgtttgtcatcgttgtttactttagatggtcaataattttctcagctactggattccaggtagaagccaggatggtggccgcctcaactcagtcaactgggaaaaaaataaaaaataaaatatatatatatttatactgaaattgagtgtatattaatttttttatatttcaagtagttacaattccaattttctttacattacgtaatggaaatgaagtcacgcgataaataacatcaaaagaattaaaatatcattagaggatctttggacatgattctggaccttatactgttcagtcaaggtcaactttttttaataaaaagtgtaaatagtgtgataaatattcaaatttttgggtttgtaagcgtcataaacttaatgattttttttaacgcataattactcaatgtttataaaactgtaattttcttttaattttatcagtaaaaactctattattatcttaaacacgacacaataaacgaagactgtactaaagaaaatagagaaaaattatgagcatgtttgatattgttttctgttttttgttttcaaaaaattatttttaaaaatgagaacaaaaaatagtttttgaagtttttaaaaataagtcatgtttggttagtgtttttaaaaaacaatattaactaaaagtgaattagtttttaaaacagaaaacaacatttgttgttttcaaaattcttattttttgtaactttgtttttgaaaactgttttcaaaaaacagggtcaaacaaaccaaattgttttcaaaaaataattttctatttttaaaagcaaaaaacaattttttagttatgatgacaaacatacactataattttataaacattaattacttataccacttaaaaaatcattaaatgtatgacaattacaaactcaaaactttaattacttatccgcctatttacgcaaataaaaaataccaatagttcaacagatgctgaatcggtccttatgaatatacagacacaataaactcaattagattcagttgataacatggcagaactaccgatccccgagtgggcgaaggagttatggggtgaatggaatctcagggcaggaattctactaagcctcatactccaacttttcttgatgttgtttgcttctcggcgccaacgatccagaagctcgttgctactgattttcatctggttatcttacttactcgccgattgggttgccaccgtctgcatcggactaatcatcaaaactcagagcaactcttgtaaggacaagggagatgaccacgttttggccttctgggcatcttttcttcttatccacctcggtggtccagataccattacttcatttgctctcgaggataatgagttctggctcagacacttgattgcactcgttttacaggttttggttgctgcttacagcttgtttctgactcttcccaaaaacaagttatggtttccaacactcttaatcttcgtggttggaactatcaagtttggagagaaaacttttgctctgtatttggctagttctgaccattttgcggagaccattttgccggagccgaatcctgggccagattacgaagaggctgcagccatttatactgaaaacaagactgcagtactggtgagaatccgtccagatcagacaccaaatgttgcaaattatcccaaggaagacagagtatttgaaaatgagaaagagtactctttagatgaaaagattaagctcgtggaggaagcacatgtttttttcaaaagcttcaaagggcttatcgttggcctacttctaagctccaaagaacgagaatcaagccggaaaggttttctcaaacgaaaaccaaaggaagcttttatgttgatagagtatgagctcagcttcatataccaagttctgcacaccaaagtggtcgttgtgcgtcaaaaaatcggctacttgctgagatttttcagtctgttatccatggccggggcctttatcttcttctttttcgtggagaaacacaagttcggtccgttagatgttgttatttcatattccttgctgattggagccattggtattgattgcatttctgtttttaaattcatattctctgagtggactcttattgctccagtcaataactggtggtggtggagaacaattgttgccaaaatagccctgagaggtgaaaggtggtctgggatggtttcccagtacaatatgattagctattgccaacatgaacgccaagtaatagtatcttgtgtctacaaactgggtggctatctttacataagggggattctagaccgggtcaaattctggttttattctaccacagaaactgtagatactgatttaaagacttttatttttgagcagctgagaacaaaatctagcgttgcacgggatttgaggcgtgccatggaagcgtgttcagaaagaggtgattgggctctcttggaaacttctaattacattaagcttaaatggagtgttggagagtttcaatatgcagaaagtcttcttttatggcatatagctacagaactctgttacaatgaaagtccaagtttaaagggagatcagagtagaaatatttgtaaactactttcagattacatgttttctcttttggtcgctcaagggtctttgttggctccagttttaggaaactggcacatagtgtttcaggatacttgcgcagaagccaagagttttttcagtaaacaccatttagtactccattcagaatgttgtaagaaaatcattggcacaaaaacggatttaaggcctgctgttgtgaaaggaaacataagcaaatctgtattgtttgatgcttctagacttgcgaaagatctgggcacaaaccaatggagcctaatgagtcgagtgtgggtggaattactgtcctacgctgccataaattgcagaccaactgtacatgctcagcagcctagtaaaggtggtgagcttctcacttttacttggttacttatgaatcatttgggtttgggaactcagttctatgagcaaaaagtgcaagatggaacgaaaatggtggcagcaaagtaagatttaaaattcaatgatcaagatgaatacccatttcacgttcacttgagaagaagaagaggatgattagaatttagaatcatagaaatgttttgatcttctcatgattgttcaccttttgtttttcacttttcttttaccacgtttttgttagcttgtaatttttctctttggctactaatgacaataaactctttagtctttactagatgtgactggtgtgagaaattttagcttatttaatttctttcttcgttagtgcacgaaaacaacatttgtgaggaaaatacatggaaaaaaaaagggaaagtgattattttgactagttaaatggcaaaaacaaacttttttagcctttctcatatggtgacctagaaggcagtaaaccatactttgatattttcaagtttaatcgacgaccaagacttttattctaccaactctactggaaaattaaacacatgggcccatagatattacaaattggaataatcattgagaaaagtagatgctgaacttggaatgcgacaagaataataaaattacaaaacgtaatgccccttgctgctagttctccagttgagttctattttatctaaccagtgaacaagaaaactcaatgcatttttggccttaatttagtcctttcttcagttaccgattaccatcctcgtcatgtcgaccacgtccaaaagaaccatctcttcatttgaaacttcttatgtttctttggatcttctttcctacttgaaatctgggcaagttacttgttttcgaacattcaacgaggttgtcattccagattttcttcgccacttatccaaagcagaacacaccatctctctccgaactataaaagaagaagacaccaaccaaaacggcgtcgtcccacacgtcgagaggaagactataaaccacgacgatcaaacttcaccatcatcttcttcttgtaatcatgaagaaaatgatctccttgcaatgtttgaagaaatcaaaaccgacgccgttcgcatccaaaagatctgtgcaaggctggagcactgggagactgagctcaacggcgccatgaaagacctcattctccagagtttggacgacgcttttaaagaaaggacgggtgaagtaaagaccgattttctccaggataagcttagtaggactcgagaaacagtttccaagttaaaggatcagatctattcaactttgaaagacgatttgaaaaactccaacttgagtttccgaaagcccactcctacatccagtaaggttacatggccggttaatttaccgacggttgatatcagtaaagaaattgcggtgaggtcgacatttgaagaaatcaaagccgtcttcgaaagcttggatccgattaagaaagtttgcttgctctgtttctctgtatttcccgaaaatgcggtgataaagaagaaggttctggttcattggtgggtcggagaagagttcatagactcgtcgcagtgcggagatgacaaatctgttgagaaaatcgcgagtggcttcttcaaagagttcattgccaaaggcctaatcgagcccgtttacaaaaagcgtaggcccagcgccgatagctgcaaaatggaaccgtccgtacgatttgccgtgattatgatcgcggaaagagctggattcatcaagttcgacgctgataaaaacccaatggcgaatttctccggctctcacagagcttgcttagtaaaatccgaagacggctcttgtgttcaggagctgacgtacggatttcgttctaagcaagagagcgtacggacagtgttcaatgtgagtgagcatcgtcttgagtttaaaccagcttggttttcgaagatgaagtacgttcgggttcttcagctggggaggtgggagagctcagccaagcatttgattgaggttgaggacagtgagttcttaaaagagttaaaaaagatgaaacatcttaggtacctttgtctcagaggagtctctaagattacagagcttcctaattcgatctccaaactcgagaatttgaggatattgaatcttaacggttgtcacgattttcagaaactccctgaaggaataggctcgcttaagaagctgactcacctagacatgtacgagtgttacttgattagccatatgccaaagggactagcttccctatccgaactcagagtcctgaaaggctttgttattggtatgcaaagatctggtgatcagtactgtaagctggaggatttgaccaagttggaacatttggagaagttgagtatccatgtggataaaaattcagacacggtcaagagagagctcaactctctgaaaaactttgaaaagctcaagtctttatcaatatcatggtcaagaatctacaatgcgccaatcccttcaacttcaaggggtttgcttagaaggcttagcactcacaagaatacgcaaggcagcttgagaaaatcatcccctgctgaagcttcgactatccccacaaaagtggggaagttggatctccattacttccccgattctaagatatctgagtggttttcacttggggaacagaaggacttgaggaaactttatatcaggggaggagaagtttctaatttgaaggacccaaaattttgctgcgacactgttagatatttgcgcctcaaatttttgtctaaactggagatggattggcgagaaatgaaacaagtgtttccgaatttgacttacgtggagaaaagcgagtgtcctcaactcagtttgttcccttgcgatgagaatggaatctggaaaaatgaatcagctcaagtacgtaattaatcattatcaattcattttttcaagttttggtctaagtctctgtttgtcgtaatgtattcgtgatttatgtgttcaaaattttcttttatggtgtaactttaattatccatgtaatgttttagaatcagctttgtaactttaatttatgcatctaatccgccctatactttttatagccataataccgttaaccaaatgcagtgttcaaatgatattattatataatgtaatatttaaattaaataattatgttacgaacaataattaattgtgacaaattattaattttgtcaaattataacatgtattgtggagttacaaatgtgttgataataattataaaaagaagagttgcaaattaagaatgatgatcataaattgtgtaactctcctcttaatattatcactcttaaattagtaaaaaatgttactaattatttatgaatgtgaatgaatgatagttatttaaaatataactattggggacatgatttattcatttatgaggtgtataaatggttcaaaattatgtgggagtggtttggaacattcaaagaagaattaaccacagctgaaaaaaagtgataactagtaacaagttactgttctcttcagcatacaattgcatgcgtttttgaatgtttgggagtcttttaacatctcaaaacttcttcaaatcacccaattaatactataaacgcctaaattattattgctaacatccaaaaattttatgatggtcatttatgtttatatgagagtgaaaactctataaataaatgtcatattcatatgacacatgtagttgaaattacttattggttaaaattttatgtggatatatttattcttagacactaaactaagtaggctggcttgataaacctttaagagatattattctcttctttgtactcgtatgtattataattgcaatagttgtaatctcttcttctactcatatgtaatccttatatattttgtgaatttagttgtaatgctcctatttccttcaagtataatcacaaaatttccaacatcaaatccatgactcatgaaatggtgaagtaagataatataggcaattgtcttttattacactttcaagttttctgtagtaactctattttgatagtactttattatatacacttcaatttacatttcattggcatgcatgtaaactgggaattgaattggagcaccaaagacagtgtgacgaaagaatctcacttggattaagcaacgttggaaccgggttatcacaattgcaagagtattcctgtgattaggttctattaaaaggcatttttaatgcggctgctggtggtgaaacggacactatatgaggatggtcagtgaagtttcttattttaaagaggaagctaaactgaacttgctgcaattgtgaaaattggtatgaactgaacttgctgcagtgtggtattacttttcttcaagttaagttgtgtaagcagagctccttcctatttaaatgttttgcagtcattcagtcaggttatcactggtgcagggaagctagaaaatgaaataaggtgaagcgaatatgattacaataattaaaaaatggagtataaagttttattgataaaaaaatttatgaagtatatgtccaaatttttacaagagattattttgattttttttatttcaaattaattatgaatacacattattttgaattttatattttgaaaaagttagagcaatccattttgtctctcaagtatgttacttattccttcatattggtcactgccttaatgttttctttgagccccctgatgttagtattttgaaatttaaatgttttctttatcccgcaatactctttgctttattgctaagtggtataagaactgagatcactacttatcttcatgtcaggaactgctccgttgctccgtttatggtaaaaaatttgtttcaaaatatgtttaactatggcataaatgaaatatatatttcttattttcaaaaataagatgtatttggtaatgtttatgttagtatttttcttttttcggttaataaaagagaggaagtaaagtgaaggggcttgtttggcataactttggaagagcttttgaagtctcaaagctactttcagatatgtttggatgaaatatgagaagagcttttttgatttaaaaggactttttagggaagcaatgactcaccagcttctttaggaaggacttctaaaaataacacaagaagctattttttagtttaatgaatcttttataatacctaatttaccattttttttcgagaaaaaaataattaaattacattttttttctttattgttacgttagagtctttttttttttttttttgaaaaatattaaaatctcattgtctgttaattaatgtaacaaacatagattctcttgcaaaaataatggtgatggcatcattaacttggagttaatccatgaagactcaccaaaatctccattctattcttcttcacaaatccattggcaggcttatatatttttattttattttttaagattaatttttttaaacaagaaaaagaattatattattattaacaaatttgatatatattatttgtaagagtttttatattttactaccaaactcttataaaagctcttcaaatggagaagaagttcttttaaaaatataagttatgccaaacaagcccaaaatgtgaggcgagaggaaatgaagagacagaaactagttgataaaaataataaaagataaaataaaatggatattaataaattataatacaaaataagactgtaatattatttaaataaattctaaaataatttgtttttatttttaggagaagtttggttcctaaggtcgaagttgcagtcagagtctaaaatattaattctaaaaaaaattgtttaaaaaaatgttgaaagtgattttttttttagaaatttttaaaattgttatcctcaattaaaaaattgaaagtgaaaacagttttataaaacatgtttttttaaaaaaaaaaattcacttttctaattaaaccaaccctgtcgagatgataaggggaaggtgatttggattgtaactaaattagtaggggtagtttctcctttagtgactaaagcaactgctgctcttttgggaatcatgattgctgccaaaaaaggccacaagtatatcttcgtagagggagacttggaattgttaattaatgctgtaaatgggagagatatacagagattgacagaatcaccaaagaaattaatagtatgatgaagactttagacagttgtagcttcattttcatttctccttagtttaattttgttacccataacataactaaatggacaaaacctgtgtgttttagaagatatcaagtttgaatatcttccttctgctttattttgtaatgaccagcaatggtccttttgatttaatgaattcccacgtttcaaaaaaaaaaaaaaaaaaaaaaactcttaacaaaatatttttagtccaattaagattttgtagtttgaaatgttattggagaagactaagtttaattcaaaaaaaaaaaaaaattatacaatagaccaaaaatttgaaaaaaaaaatacaaaaatacatcaatacagaaaaattttacttttaccctttgaactattttcttaacaacaatacctctttagtaaaagcaatacatcattttttttagttgttttatagtttatttatagttgtattatagtttacttttctaattatttttggttctgttatagttgatttaagttgtcttgaggttgatttctctttattttttagttgtttttttactttttgatgagcaatttttttttttttttttttttgtaatttgaaaactttacaaacatatttttgtaaataaaaatattaggccataaaattataaataaaatataaaaaaatagtcattttaaaagttctcctttaatttatgggctatttacaaaaatatgggaaaataaagatgtgttttgatatatatggcataaaaacttaattaccctaaatatgacattttttaaaaaaaacttataaata

SEQ ID NO: 17224 - DNA, 4948 bp, Cannabis sativa
ttacactaatgaaatccagaaatccaacattacattctaccacaaaagacgctgatctattttagtgcttggcaagattataatcagtgttgttttattcatcgtagtgactaatcttgccaagcactaaaatccaagtaaaatctagaagcttagtgggaatatgagccttcaaaaagaaaaaggacacataaacaaaaaaccacaaaagtctgccaagtaggtacaagcagaaataggcacacattagtacaattaaatataaaagaaatagatgcatatatatgtacacacacatatgtacatacatgaagagagagggcgagagggagagatgattacaataaagtgaacagatctagaaaacagactttgtggcactttattgatgctaaaaaattaagaaacagataagctcatcttgttgcactaagttgagcataagtttacaactttagttgtctacaatcatttaaatgctaaccttaaggataatctcattttccaagcaaactcgataatcatcttcaccaaatgcaggagcacaatggactatgccagtaccactatcatcagtaacataattgtctgcaacaactctaaatgctacatcagagaactccataaagtaattgaatagtggttcgtacctgcagatcacatattgacaatcaatcaaaaacagaaaattaaaagatatatttcaaagcaccacaaaatgatagtagctccatagaatgagtgagagaatgctcacttcattcccaccaatgaagcacccttcattttctccaaaacctcgtaagagtcttcaacattttccttcttcccagctgatgttcccttggctttaacatttgatttctttgcattatcaacagacccattaatgatatttggttttggcttctcaccaggaagtgcagacaatcgagattcagcaactacatatacttttccagaattcttgttgcgaacctgattattagttcacctcaaattagaatctcaagggtgattttcaaatgaaaatacaattaatttgaaaatatagcaaacagaccaagaaaaagatagccataatcctatataaagtgaaaatctatatagaaataatgcaaggcaatactttcctattatagtcataatccactataaatgatagtaaacaagttaaacagcaaaattcccttgcaacaatgaagagaaaaatacaggcatgtggaaaaaccataagtatcacaaaaatagctatacacaacaaaaaataacaacaaatcatcattacaatataatactccattctctaagtaaatcaaagaataaaatttctttaaaccccttttcattatgcagccaaagagcacccaaattctaatctaatcccatggactatcaacatcactaggctgtccttcaacaattatcttgttctgttcaagcatagcctcccaaagaatagtcgatacatcatccaaaagtttatttcctagcttcctctgatatgaaacatcagaatctcaacagtttaaaccagatacctcaatgaaaactaaactatttgagcaattttaccacaattttatagaaaaatcaccatggataaataaatggctgctggtctcattattctttttaaacatcccacaccagctaggagatagggcaaaaagggtttgttcttttgcagaaccccatgcacgtttttaaaaaaaaaaaaaaactttccccacatctataaccatgaaaaaattctgactttagatggaactgagactttccaatatcagcccaattacggtcagcatgtctcaaaacaaaagactaagaaataactagaagctcaaacaattacaggcctgccaaggtatggatgtatcaaacatttaatgacttagaaaaccacactggcaaatggaacgaaaacaaagtgcaagtcacattcagttctgtactagtctcaagcttacttgaactctcatttaaccctgaagtcagaactgaaccccaaacctcatgggagcaaagcaaaccatgggcctgacccttgacccaaccctcattagattggaatctcaagcttacaagctcaaaaagttccaactatgaaaaaaacaaataaaacctcatgtcttgcctgtaggtgtgagagattgatggaaccatgtcaccttgctcgtacatatttcaccatgatctagtctagtcgcacatttaatcattacaaacataatagcaagggttccagtaatggagaaaataatcagcagtaaaaagagaagaaaaacagcagacaccaatacaaaaatagttgacaaagcacaaggcacttttataaaacacattttttatgaataaaaatacacaaaatattagcaccaattaacttaggctagccaaccttcacataaacaaaattcgcattaacacaaagagcaagattactaggaagcgtccatggggttgttgtccaagcaacaaaaactgcttcttgtggatcaccaataattgggaaagccaccattatttcaggatcaggaacatcctgcattacaaccaaaatcagatacagtcacaggtttcagaaagcaaaattaaagattcagtgagaataaaccagcagaattaagaaaataaaataaaaaaaggtggtcaaggcacaacaaagaccagtaccaagttacttgatatggttcaccaaccgagatgcaaattcattgaccaccaataatagataatttcaatgtaaaattaaccaataaaaatggccaagattaaacagaacttgtgaaatataaaagatagagagaagttcaaaagtacaaaccctatattcttgaccagcctcaaaattagacagtggtgtcttgcaaccagtgctgtatggcatgacctatagacaagatagtcaacatagaaacattatatacaagaaaataatttcctagtaaaccatatgtggaagaaatgaaaaattcaaagctgagagcaatggaactctttaaacaagtgcaatgttgaagtcacgagcagatccaggctttttcaaagtaaaaaaccactgtcaataaagcttatttaaaatgcatttttcacctcagagatctgacttatattccacaaagtcagtctcttgtctagcaaccaatgtactgtccctttttaaaaaaccgaaatataaatgttcacagaaaaaagaaacaaacacaaacataagggggacatggttttacgttgaagtcgctgacaataaggaagacattgttatcggcatatttattcattgtattttacgtcatcaaacatcagagtggaccgaaattgctttactcagtaatatgtcatcctacctacctaagtacatgaataattgagtaatgatgaggcacactcaaaaaacatgagtagattcataaaaatgccctttaagaaaaatagtaaccataaaaatgcactattagtgactactaaaagaagcacatctcctcttaagatactatcataattcactccttccttattactcccaacccctaaatataggagatgatctcaaagaaaactgataactaaactattactttggctcagttctttaccaatcatttaataggaaccagacacaaagataaggtccatgtaataataagtagatatttgactaagctgacattttccctactcaataaaaacctgtaaattttttttattaaagttcagagttcccaataccagaatcacctaatcaatgacttttctcagtaaaccatgcagcattacagcgctaattccaaataactaattaacaaggtttgaatatatgctatattttatacctcacctgcagcagtatcgagtaagtcgcgcatataaatcaaatttaacttggttaaaattgtatatacaaagcttataaggcagtgtgaagaaacttaacctaagtcattactaaaatgaaaaaaaaaacgacttataagaagttgtacacaatttgaataatataagacatagggattgagctcagaaactaaatccaccaaattcacattaacaactattttctctctaatttttttccctgaattcaattcttttctcttggattcatataaccacaatttcctaagaactagatacacttacccgccactaagttagaatatatacatacaccatattcccgtaactccaacatcaacccgaccttattcaaaccaataatatcttggaaagtaccggagaatagaatacagctaaccttaaaacctttatatacaaggttcttctgataaagctggctaaacacccaccatacagtctccatgaaattcaagtccattgtcttgtagccattgttgaagtcaatccaacgccccgtacgagtcacaatcttctcccactcctcaacatagcgagtgacaatgctcctacactcctcattatacttaccaatccccattttgagcacatcgtcccttcgtttaatcccaagcttcttatcgatctcgttctcgacggggaggccatggcagtcccagccgaagcgacgcgtgacgtggtggccggtcatggcttggaaccttgtgacgatatctttgatggttccggccaagatgtgaccgtagtgaggaagaccggtagcgaagggtggaccatcgtagaagatgtactcgggcatgttttgggtgcgagccagctgggtctcgaaggccttgatctcggaccagagcttgaggatcttctcctcatacttggggaaagagaagtccttgccctcgcagacctcttccatggcggaagagagagaaagtgagaagctactggtttaagggttttgcagaaatgagacactgagtggcggtcttcagaaacgaaagcagtgaagatatgaaccgatgagggtttatagttattttttgtaataaaattaaatgaaaatataactcaa

SEQ ID NO: 17225 - DNA, 4296 bp, Cannabis sativa
aagccaataaaacaccagtaatagatattaaaagagaaataaaatcatttccagtgtgactcaccctcaacagcttcaggcgggcatattagatccttgtcccccgcaagtgccaagacagggactttacatttgcgcagatgatctttatagaagaatgtaccttttcggtcacgtaacccaccttctttgaatgctgttgtaagctgtagaagaagctttgccggtatagtgcctaccatagtaacggaccagtgtctgtcagtgactagcattaaaattaattggaaatgcaagacatgcaccaagtgtaaatcgcaaaggcataacgtctcaaacaatctttaaccttttcattttattacaaaatatttcttattcttacctgaaactaaacgtgcaaccatctacatgtctttaactatttgaataatgtatacaaagcctcttgcaagattaaattgaaggcaaaaaataagttcttttcaactataatgaagggaacctattttttctgctgcaatactttttaaataagaatcagctaatccttagtctcagctagatttcgatccctattcccccataaacagtgcatcttttcataccctttccagaagctaagtaaacttagtacttaactatgtcaatattgtataaaatcatccgaaagttttattaactaaatgagccaaagtatctattaagaagccccatacaagaatagcatattcaccccaaagtattttcacaacgttacactaagatataccaatgtctatatttactgtgtcaatgataatcgatcaaagagtttagcagcagaaattaaatttccatattatatcagcagagacacttacaaaaattgttcaagacaagcttctctaatagctctgggtgcatcatatcttctgctgaaatcaaattattaagccaagacaagacataaggaggacgagacgaaagaggataagcagcagccaaaattgcccctaaaggaacaacaggtacattaagagcctgtgcaggatctgcctgtaagacatgctctttgcagttaatttcttagcataagggttgaataaaaaatgacaagacgagacaagacaagtatcttcaaccacttacaaggggtaagagcagtttgagtgttgaatttgaagaggtgtagtcaagagatgctgccaatgtaactacagctgccaatttaggatctcttctttcaaaacctaacaaacccaatagatacatcagtccatacttctccctaggcaatacattgatagcaagagaaaccaaaagaacaaatttataatttttcatcgcttacatatagtgaccacaagctatcagaaaataagatagctctagcatgtagaatatggcctttacatagtacaaggcaaagccagtaagcaatcattccattattgagggaagaaaagataagtaatacattgaataagataaatcttaccatatcgtgataacatagcataaagcaagatcccacccatggagtgtccaattgcaagcaatttaccatcatttggcttatttacagaccttatatattccatctgtattaacaacaccagagaactgttaacacaccaatcatcattcaaatttcaaaacattacaaagcatgtttagaacattaaataacaatgacaggcaagtgtttaatgtctaggtaaggaaaacaacagtcatattgtgcaattacacgacagccttctagaaagataaaatgtcacctcaccgcagcaggaacatcctcttccaggtagtgatcaaaatcccaatcatacttcaccatcaagtcaagttgattctgaaaatcttctatggttgaagcaaaacgctcttgtaagtcaaacagttgaggtgagacagatcgctgaccctcttcaacaatagttacaaccttctcactcaaatccttaatttgtccagcaacacccgaattctgtcttgtctcgaacaggtttagcaaactatcccttatctcattaaatcgctcagataattgagagtctagaagcagttttgaaatttgatcaagtagcttagcggacataagcttggattgaccttcactgagaaagccagaaagtctttctgacaatcgaataaaagtgtctgtcaactttgtcaccaattttgattcatcccacattgttgccatgtttttcatgtcatcagacattgacatatcagacttttctcctctaacaatagagctatcagaagtcaaggtattaagaacattgcttgacttctgttcggaagataaagctccattagttacactctcagcagcagcttccatttgctcagattttgcttgggctgacttctcaatttctttggtatttgatccacacagactcaacccagcacctctaacttcaagaatccatgtgtcaaatccttgtcgagacatgtaacgagcaaatgaagactgaaaagaagcaaaatcatttaagcaacattagatctgttggccgaaaggtcaagactgtcactatatattctgtgtcttcttttctactacttctgagcttcagtaaattatatgaaagtggaagttagctcctattctactattgattaactgcttatagagaaagcaggctcaaacaataaacagaactgaaatattttactgttttattattattaatagaagaacatcctctgatattgcaggaggggcaagatgaaatatacatggacaaattcagcaatcacacagtattggagctggtttatacaaacaaagatgttctaagtgaataatgctcaaaagtgcttacaagtttaaacataatctacatactaaaatatctcaataaacacagtgggcaaactgtttgcttcgctaccagtggaaatatttacataccaacaactgtgactttgaacactaattacccaaagagaaatgctaaggggaaccttatggtgccaagtacaagaggtggcatactgctattggtgcaaaataagatcggatcccatacattttaatttaataaataatataagaaagtactaagtactaaccacttgtaacgtgccacatcagtatgttgttcgacaccataaggttatggtgcctaatggcaatgctcttacccaaaatgagaaattgatatttacaaaaaaagtaatcaacttaactcatatgttactctatttaccctattgataaatgtgactcaaagcacattccaaattcattttcataatgatgcgtgttatgctagtcaaacaagtaatattaatataaaaacataataaaaattcatcgattactaagaagaaaaaactaaactttagcataattaagcaaatcaaatcaagcaagagaaccttgggagaaagatcgtatccaacggcatttgtccccactcctgacaacaacaacagcggatgattcctctgaacagcctataaaaaaaatcaccaaagttaatcaaaaacgaagaaatgagttcaaacattgtaaacgaaacaaaactaatgaaaaaacgaactttagggcaaggtcggtaacgccagagagcgagtctccaatcacaattgggaacggaaacataatgaagttcatcagcagtacaaatcgacggtttatcatcgatcttaacggcggaagtatcagaggtgacgtcactagatgagaaagccctcaaacgaaacgaagccgtggaataagaggaggtcaaggtccggcgaagtacggcggcgcgagattggacgaaattggagttgagaaatcgaatggtggaggaagaaggagaagggaagggtggggaggatgataggtggagaaaaaggcatcgaagatcggattgaatggtagccattttggttgagaagaatggggtggcttgtgctttggtttacatggattcacttgtgtcctttttcattccacgttttcttttaccacatttccacacgttttttttaatagaaaattgctaaaagatactattggtgtctatcatcttcttcctcgttgtcttatcgattggagcattgttattgggtaccgcccaatactttttatgagtggcactccaaaattagttaatgatattactttaaagttatttttttaaaattatataagacatgttacttaactataataataatgttatgatactgatgagagtattagacatcaataatactttttagcaattttggatcgaatctcatataacttaaaaaaaaattaaactttatttttgagtaccataaattatcacataaaac

SEQ ID NO: 17226 - DNA, 6744 bp, Cannabis sativa
gagcatagtttagtacataaaaattcactgaaaagtaaaattgaatgaaattagataaaaatccttaaatctaaccatctcaatagttggggaaatttttaatgccaaaaaaagttcaagagatataatttggtatatgtctaaattcaaagggaaaaattgttaattaaccatttttataaataatttttttaaataaaagcaaaaatcctaattaacttaaacaatgttgcagaaaatcaagctcatttggtcatggggtgtttacgattttaagagaaaagggcaatttcgtcaattacgaaaataacagccaaaacctctcaactttctctctgacttaattttcttcttccccaagcactccttccctctctctccctctaaatattttctcacgctttccttgttctccttctcaatctttccttctctacaatctcacaatccaattctcgctccttattaaataatttcaatttttcattcccatttccatctttccatcaattattttagggatgttcgtttctagggttttagctcgcgtctccaggaccatccccaggagctccttgctcctttcttctccacaaaatcaccactttccgaatctctccaatcagtttcattcccttgtcaatgaatcctccatcaaggtacgtaaaaagctacttaagtttactattttttttttttctgtagggttttgctagggttttaggttgatagtggatttttcaatcagaatgaaatgtttattttctttttcgatactcaattttaattaaataaatacggttgtatgttgcttcaagaaaaacaatggttcacttcgcataaatcagagccctgtgtcaataacagattttgatgagaacacttggttggatttctgagtttcttattacattatatttaaacgtgcaggcttcttcactactacagcgtctgaagtatagagttctatttgctaatgtatatatatatgtgtgtgtgtgtgtgtgaaatatggatttatggttttgtttgcaactttagcttatacgactaaggttcttatcaactttaatcttactttatgtatctaacttatgtgcttgctgaagtttaacggcttgtgttttcaaaagttaaatttaattccattttttacctctaactcgttttttttttcctattctttagatggctcatggccaggtgtctctattccatctgagttcttctccctttcaaagatttggttttgcttcttctgcgtcccctgagacttctgaaaaagagcaggggaataattcagagaataatggagatgctaaagtctccagtgaagctgcctctgggcagagtgatgtcgatgatcagacaaaagattcaggttctatatctgattctcagtcttctatgtctaataatgtcaaaacaaggagaagaactaaacgaacagcattttctgattcagattccgacgaggatttgagcatagatgatctggtgaaacttgtggctgagaaggaagagcttttgaagcaaaagcataaagagattgagaaaatgcaagacaaagtcctgagaagctatgccgaaatggagaatgtcatggacaggactcggcgtgaagcagagaactcaaagaaatttgccattcaggtttggtaccaaatcctttttgcatttacatattgttttcacattatagtttccttgttaaaaataatagtttggttcacctgttttaagtctgcctgacaaattgcttaaaatcttgttgcagaattttgcaaagagtctacttgatgttgcagacaatttggaacgagcttcttcagttgtcaaagaaagtttttcaaagattgacacatctaaggattcatctggggctactccacttttaaaaacacttctagagggtgttgaaatgacagaaaaacaacttctagaggtaactgatatcatcttaagcacaatacatctccctttatcaaattatttattgaagaagtctcttgtttttttatttttaagttcaggggacctagtgttaaatgttagaatatgttgtgttttcattaaatgaaaatgaaaatttgggaccttacactctgaaaatgaaaatggtaattgacatcacatttcttatagttatcaagtccatattgttggtatgtacacaagttccgtgaattaaactcatcttcaagtaaagtgcctgaatgctaaacttagttatatcattgatggttgcaggataactaacaagttccttttgctttcaggtatttaggaagtatggactagaaaaatatgaccctactaatgagccatttgatccacatagacataatgcggtcttccaacttcaagatgcttctaagcctccaggaactgtagctgtggttctgaaggtaatatctccatttcaaattgttatgggctattagtactgttactactgttatttctaattttcgggatgacggggtttgtattaaattctgtcagatagttaaaagtgggatttgtaagtgacgatttggttgaatgtttttgtattgcagtcgggttacatgctttatgatagagttattcggccagctgaagttggtgtaactcaagaagcagagaatgaatgattatgcaaagatagagctttgccgaagaggattctcatctcaagcttcacttggcttacgggtgtcaacaagaaaattttgcaatgtttcgagaattgtatcaagtacaataaacaataaatttttctagttagaatttctatcacagtatagaaccatttatttcttccctggctgccctgttatttattgtttcgttgtaaaaacagtgagacactttttattttcactaacacaccttcgagggttgtaaacacctaaaacaatgaagcgctgtttgttgcttaaaaatgtatatttgatgggattggttatatatgccaagttgggtaagtaagattgtatttaattggaaggaatgaaaatataagaacagaaattgaatgaaataaaatttaaaatgaaaaagaaacagaaaattctgttgttttatgcttaaaattagccaaaattaaaaaataattcaaagttggttatcctatcaaattaatgtttgtcttttatctttcgctaggtactcataatacttttgtcatttaaatagtctctcctcttatctctctctcttcttgttttctcgagtagtagtcaccgagagaaacccaatcgctgaagacccattgattgactttccatcacagttccacgccctcctacctcactcaccaccacactgttgttgctgtttcccctcgccaccatacgaaacccacgacaagactcaaacgaaacccacacatttgcataatcttagttaagaattgttttctattgtggaatgtaggtttatattagttttagtgaaaaaattattcaaaatccaatttagtgaatattggttatcatcattaaacatggaattttagattttttttttagtacacgatataggtttgatagttgctcgatagttcattggttagaaacttgcctaagtttgaagatgatagtttgataagggttcgatggttatgtttttttccgttattttatattatgctcgatctggttccatagttgctcaattgtttgcaaggaacaaatattgtattgttttattgatattgctcgattaaagtaatgtaaaactatcgagcatataccaagtatgtatcgagtagcattgaaacttcatccttaaccttaagacactacttttattgagcacatatcgagcgttcatgaagaaataacaaaaaactcaaaaaaattcaaatctcaccagaacttgatttatacaaaaaaaaatcaacaaaaaatcaaagatcaaccaactaaacaccaacctacaccatcaaaacgaataataacaacaaataaccaagatgctctaaaaatcttgtacagtggcaattttgatgagaaacaaagagaaaattgatggcgaggagagaaagagaaaagtaaaagggatcatggatgtgaagatgaaaatttgttatgtgagaagtattttggttacctaatgaaagatgatacaatttgagaggataaccaattttaggttatttttaatttttgctccatttaaagcataaaaaatcaaattcccaaaagaattgataagaaaatattcatcttgcatttagaacggtatttccttttatttcaaaataaaataattattcagccaatatagataaatcattctattagaataacatgctaaattgccaatattttaaaatacaattaaataaagaaatgaaataaaattattgattcttttccttttcatttcattttattacttctaactaaatgcaacctaagtgtatctgatactagaaagaatcggattgaggaaaattcaagtaaattatacattcgaaacaagagtttaataaaggaaatcttaacagttgagcagaggaaagtagttgccatttatttttgtcagatacagttttgatgatcattccttcacactgctagtgtcgagtctagaaactagaacttagactgcgttgaagataaacataaacaggatttactgtactacttccgaaattacaggagttaaacagactccaaggtatttacagagaattgagtttttaattattaagtgcctttcattatgtactactaactaacatcaatgtacaatgaaaagctagaagctacgcctacagcttaatcacaatacgaggattatcacactagatttatgatatgcagttggcttgagtgagattaaggccaacttcctattaccaaatgaagcaacttcagtgaaagagatgctctacgctgcctcatccattgacagaagcgtgctagagctcgttttctcaatctgagactccttggtctcaatgtcatccaagttgtcattggggctgttcaagcccaatcccaaatccaaaatgctcaggtctgaatcctgcactccattcatctctgttacctgtgtacaatacataaaacgaatacattaccacacattcataaatttaataaaaaaatccctgataagaaagggaaaaatagacattaacactaacgtttagcaccaaccacatcttgctgctattaagaaaacaatgtgtacagcaatgtgaagtgatgttgcagtgtacgacttaaaagaaagtatgacataaacagccagagccataaaagttgttgagtacaacataacaagaatacctacacagattaaagggagtgattttatgctattttacttctaattactgattcaattgtatacttaaggccgtgtttgaaaagacacagtaattatgtaattaaaagtaattgagatctataagtggaagatccgaaaatgtttcccccatgagaattgggtgtaaactgtgtaaatacaaaatcatactatttttaggcaattaatgttatttttctatataaattacttaactgccaaacaaaaataagaattcatatctaattactacttgacatccaaacacatattttaattactatgtgtaataactagggaagagatattttaattttgaaaaaaaaagtctaagggaagaaacttcaaacttgatagagatatgcatgagagctccaaaacaagagattaattaagagttttaagttcagagttatcacattgttttcttccttcaaaacatcatcaatgtttggcttttcatgcttctcgtcactcatggttgttggcccagttgtcaattggtccaccatctcatttgttttctcttcatcttccacctttttctcagcaatcctcttctgttcctccagcacagcaatctgcaacaaagaatttgattaattattttttctttagaagtcaaaataagatatcaaatttcatttgctctacaaataaaggtgacccaaaatccatctttctctttcctaagaaaacaccgtttattccataaatttcataaatcaggttctctgttgagcgaagaatctagcaatagggcactctaatgatctcttcagtataaacaaacaacaaaattatttccgaaatacctatttcgaggaaagtcaaaatatgaattatgaaattatagcaaacaaatacagcagtaacattaccgaatcacccaacttttaatttatatgcgaataatccaacaccaagaagaaacgcacttaattgtaagtaatagtctcacacattattcatgcttaaaatggaagggaaaaaactcatatcttggattattgaactttattttatttaattttattttgtaaagataagtattggaacttggaagtcaactttccctatgcacacccaattgtcctaaactgaaaattaaggtctcagtcgaacatgcaaagcataagattttacagcaacagagtaccgttacttattctttataaagaaaagaaaacaaatccatatttcatattcatatgcataatctaaccaaacacagacacgccaacaaacccatatatgtaacagcagaaccaataatacccataaaccctaaagcataatcaagtgattttcacttacaggagtataccggaacttcctcctcggtggctcttccaactgcgttccgccggagccgtcggaagcggcggctgaagtagcggtggcgggagtccatcggcagaggaggaggcggggggt

SEQ ID NO: 17227 - DNA, 5203 bp, Cannabis sativa
caaaaaaaaaaaaaataactaaacgttaacaattaaaatggattgtaatttgcaaaacgacatacctaacatcatcaaatctatcaagtgaagaatcatttgttcctagcaaagtggctacgaatatcttttatttggatacggtgacgtgatttgagtattggcattccaagcaagacgggtcacaatcacaacaatttttattattcccagttagtttcatttattcaaacttctgctacttcacagttataactagcaagtttactactttattatttacatttgaatacactttcgtttcctttgttgatgtgcctagaactagatttcaaggatcaaatcaatgtatgcttcacagataattctgtggattaacttggaaaagccttttccaaatgacattaaaaattggaggcatagaagcaactaactgctttcaaatatcaatcctctattcctccaaatccagttgtgcacagtattcaccttcattctctatttcactaatatttcttactcaagggtagtaatcatttcataacgcaaaaccttactttgcatcgtttagaaatctctattgtaatcaagaggaatccagagaattttttccttaatacagaaactaccatatgatgtaatggtctgtggcatatgagctattctagggatgagagaaccattgcgcaacaatttcatataaaaatggcaacataagaaaattgaagtgagacagtgagagagctccaataaacagctgggagtaatagaagaactaaaagtataaatgcccaagtcccaatacgctgcagacatttaacatttttgcactccaatggtatatgagaaacaagcttttgcctttagtcctcgaacagttcttagtcagcttgctaaacatctccatagatcccaccttatgcataataattcaagctcgccttcttctttgcctgaacttgaatgataccttcattaaagtcctcgtgattcacctgccatggaattacagttatttttatgccacaactcaaacaatcctattaacaggaggcccttgaataaatttatttaaacaactaaaagtgaaatccagagttatcgagtagaaagaattggtacctcggttgcatcacggcgaagagctaacatgcctgcctccacacaaacagcttttagttgtgcaccattgaagtcatcggtggatcgagctagttcttcaaaattgacatctgggtgaacattcatcttcctagaatggatctgcagatttgtagtagaaagatccagttatactgttacaaaaccaaaaacaaatgaactgagaagttaataaaaaaaaaggctatatacctggaggattctggcccttgcctcttcagtaggatgtggaaactcaattttacgatccaaacggccagaacgcataagagcaggatctagaatgtcagcacgattcgttgctgctataacctatattaaaatgataaaaagaaaatggtattggatagttagttagaacttagtataatatcttctattagcagactgcatctatatttctgaatgcacaaaaaaataaccatccaatatgttaccttgatacggtcatcactgctgaaaccatctagctgattcaacaattctaacatagtacgttgtacttctcggtctccgcttacttcactgtagtaaaatagattaaagaacttattatgtattgcatttggcaattccaagcagaaaatatatattttgttattttacttattatctattaacaattataaatgaaggtgcatttggctcaataaatgaaggtgcacaatttatttattatttgtcatttataaagaattgcaaatagtgagtattaatataaataaaaattatatagaattgtccataatcataaaaaaatagtattataataataatatttatttaataaagaaataattgacgaaaagtaaaagacacctggtacatatttagaagctaatgaaaaaacttaataacatctaataacaaaaaatcaagagttagaatagtacaaaagtcattcacattccacacttctatatattagtatagatattgttatatagattatagattaatattatatttattacaataataaatatttatatagtaattaaaaataaacattataatattggtgcagaagaatagattttttctctaaaaaggttatttttactactaatttgtggaagaaaaaaaaaataaaataaagatcatttgtatttgcattatgtgcacgccaaaaaaaaagttaacaataatcacttttgcaagtgttcaacaaaaaaataataatatatttggtaggggtggagaaataaggaaaataggtaattaggagagaggattcttattgccgctctaagctggtaaaaaggaagtttatatatagatatttgaaaaggacaaaactaaacaaaaacaaaaacaaaaatgtcatccaccagcttgagacttattcatgcttatatattagaacatatatcctatcaaaatgcactgacaaaaaaaattgtagagcattaattacctatcaaatcgctttgtcccaattgcatcgatttcatctataaaaataatgcatggagatttttcttttgcaagctgaaaagcatcacgaacaagttttgctccatctccaatgaacatcttcaaggttacaatataaaaaatttaacataaaacttacaaaagaacggaatatgagtatgtattcacaaaagaaaaagatagtaatctatcctatacaatacctggaccaactgtggacctgcaagtttcaaaaatgtagcatttgtctgtgcagcacaagcacgagccatcaaagttttcccagtaccaggaggtccatataatagcactcccttagggggtcggacccccaatttctgaaaccgttccttgtgtgtcataggcagaacaatggcctctactagctcttggatctgtgaaataataaccaaattgagtacaaaagtaagcacgtggtgcttgagaacataaaatttgaagtgccacaaaggacatgcatcagccttttacttacctgcttttctagtcctccaatgtcattgtaatcttcagtaggtttttcgtcaacctccatagcctttactcgagaatcgtattcagatggcaacgtgtccaagatcaagtaactatctttgttcactccaacaagatcaccaggctttaatttgtcagggtcaacaagtccgacaacaggtagaaaaattgtctgcattcaatagttaacacagaaattagcaatcagatatgagcaaacatagaataataatttacaacaactcttctagatcttccatttgaaagataaatgtttcctcatttgtatcagaaacacgtgcacaatatacatcatcgtagaaacatagctactctattctaataataaccaaaatatccaaatgtagcatgatcaaaataatattagaaactcttttgcacagcaagactcttctagctcttccatttgaaagataaatttttcctcatttgtatcagcaacacgtgcacaatacacatcatcatagaaacatagctactctttcctaataataaccaaaatatgtagcatgatcaataatatgagaaactcttttgcaaataaatttggcacagctcaactgactgattaagtaggctctataactctagcagtttaacacaagaacaaaggacttgcatactaagttacctggcgggtagatgttttcaaaacaacacacttccccttcctctgtgaatcaaggtcgatgtttgcaccatcttcctcggcctcgtcttcaggattcatttctaaaatctgaatacaaaaggaattagtaaatatggtttaatactagcacgtgacgttgtccataataaacatcaaaaggcatagatgacccggttaactcaaaatttatatatctatcaaaataatcatgatttccttaatctaaatccagtgaatggatagtagttagtatgataatcctatgagttctgacttccaaaacataaatgtaaaggaacaaaacctcggaacttcaagaacataactttgggatatgactacctccagtaaattttaagatgaaacctttctcaaatgaaataagagcaagtttttctactcttcatttcgtggtgtgtaaacaagaaacatacctaccacaatttgacatagcaggcgggttatttgtttttatatggtgtgtttactggtacatataattagtacataaccacgcccgccagtagcactagcagagaccctcattcataataacatcaatacctcacagacccatttacttggtaaccctttattcttcctttaaattcatatatcaaacatacaaacacaacacagctcaaaccaaacttgtaagcaacttgggaaactaacttatcactaacataagaaaagcattgaaaccatgttcaagggaatcataatattacctcaacgatgttgcccaccaagtaaggtaactgcttgttgagcttaatcttctcctgattttcttttatcttctccttgtacgaatccaattctagattggttctttgcaattcttcctttaaacaataataataaaaatcataagcaaggataaacaaataatcacagtacaaatatcccgtatttacaaaagaaatcgggtagagatctaaaaagtgacagaaaaaaagaatggtcgccatagaaaaccctaaaagcgcagactgaaaccgaagatatagatatgaattattaaacagtcagaaagaaaaacttagctacatctagcgcgataagaagtaaaagggtataccttatggattcggatttcgttatcgagaagtctagaggccctaacaatatcgtcagtggacatagaagccaattgatcatcttcaaaactcgtatcttctaacatggcggccgccattgtttgaaaatgaaagatcaagctgaaatttgttcaaatttcagagaagagagaagaacctaactctgcttgttcccaaagaaaccctttccttttcttcttgcttcacttcagatgatagttttatatcctatggaacaaaaatgaagtccaactctattttatatttattaaaaaaaaaaaaaaaaaaaaaaatttttttccctttttttttt

SEQ ID NO: 17228 - DNA, 3458 bp, Cannabis sativa
tattgaaagatgctaatgctttgatatctgcttagcagcagagtgcaatgcaggaagttcagcttggctcgcatactttaagatcccatggagtcagtgttgctaagacacatatgcatgattggttaatactcatgctacttgtcctgctagagatctgcttgtacattatccatccattttatcgctttgttgggaaagatatgatgactgatctaaaatatcccttgaaaagtaacacggtgcctatttgggctgttcctgtgagttttgctctcatcacaatttttttaatgttttccctcctacattaaaaaattaggtcaactgatgagaactattgtatttcccttctttctcatagatctatgcaattctgttgccaatagcaatttttcttcttgtgtattaccgtaggagagatgtctacgatcttcatcatgccatattaggtgatgaaatttatggctccataaggatttatggctttttttttaacgtcatattactaatttcgcatatcttgtcaatgcaggtctctttttctctgttctggtaactggggttctcacagattccataaaaaatgctgttggacgacctcgtcctgactttttctggcggtgtttccctgatggaaaggatgtatggtcttcctgatttacagttctttctagcacagctttttttttttgtcctttctttttcaaaaaaataaaaaacattttattgtataatctcatgaattttcgttgactaaactattaaaactttgatgcttcatagttttatgataaatggggagatgttgtatgccatggtgatatcaatgttataaaggaagggcataagagttttccaagtgggcatgcttcttgtaagcagcacttgatattctcttctgtattaccactgaacgtgtttgtgcagaccagatgatgaaaattattttcttacacttgttatatgtgcagggtcctttgctggattgggttttctatctctatacttgtccggaaaagtaaaagtctttgatcgcaaaggacacattgccaaattatgcattgtttttcttcctttacttgttgcatcacttgtgggcatttctagagtggatgactactggcaccattggcaagatgtgtttgctggaggtctcctaggtttgtgttaaaagagaattttcattttgtttagtaacttttcaaaagcatttgttgttcgagttcacaatggggtaaacatttgtgcagggcttacagttgctacattttgctacttgcagttcttcccacccccgtatcacgaggaaggtaaagtgccaggccattttgtttaccagtttgattttcaacagtagttcctaaaattgctttcaccagagttgttatttgtttttatttcaaaagcaatttgatttttagaatgatcaaaatcaatattttgaggctggtaaatttcactctcttccaaaatgatggaagtatctatcacttctttcctcgtatagtttttcttgaaattctacttgtgcacctccagcatttgcacatgctcaaagtgttctcaatttcagttatgtcaaatcttttctatgccatcatttttagaagtttcttcatgtcaaagtgccttgtaggtgttagaaagtgacagattgcattatgtattagtcaaaattttaactgtttctagatcggtggagaagatatggcatcatcatattgttttccctaccctttcttgcacccgtttctccaaatttataacctcattgaattactcaaacctaagcttctttatgaaccggaaattttctgtctatggttcaggcctgtctggtaggtatttgtggggggtaatcccaaaattttctaaactttcttcttttcaaatattatttcgaaaacaaagttgttagctgtgtagtgattcaatttcataacttcagttactcattcattgagagttacaactatacatgagttggaggttaaactgtatgattttgtgtaggttgggggccatatgcatatttccgggtgttggaggagtcacgttcaagtgctcaagcagcgaatatggtagatatgcgcaatgggcgggcagcacaggctgatgttggtaaccaagaagaggaaggaagcagccatggtttcatgggtctacatttagcagatgatcaatctgctttgaccttggaagaattggaaactgggaggagatagctatgtggatttgttgcttttagttccaacactttatttatctgtttaatcatttaagataattttggacccctggcgaaatatgtataatgaacattagaggacaaccgcttgagtttggactgctacaagcttaccacgtctttaatgaatttaaggaagagtttaatacaattttgttggattgattagtatatagtattctttattagtagtttgtatatgtagttttatgttcgatagactctttctcgcaaagacattgagtgtgacggaggcgttgagttagatcaaagaacaacggtggactcaagtaacaattgaaacaaattgtttgggtgttgttctattgttatgatttctttatttggtacaagattgtaaagctttatttacttagttttgaaatatttctattgtctttgtgaaacaatctattttatatcttagtcatcataattttgccgaagttagaaagaaagtaaggaatattcaattatatattaaaaatcactagctatcataattttgctaaaattcactattcaattattttatttggtaacagaaattattggttaataaagatgattttcccgattaacctatatttatggtagggattaattttgataactttcatagaatgaccattggacttattttgtagattaattcatataaggacctagttattaattatataagtttattatatatttatgtgagtttatggatcacaatttaataatagtaatagtttgagtgtaaaaatcctaacccttaattatgcaaaaggtgttgtttaagcatttgtaatttcatttcaaaaaagaaaaaaagaaaaacatttgtaatccaatatttttattttaacaaatttgtatttttaatattcttataaattttttagttattttttaaaattctctcttttttttttagcttcaaataaaataaaactgagaaaaatacttcaactacaatttctacaatattttattttatttaagtaaaataaacattttttttattaacaaataaatatcgaattaaaataaaaccctaggaataccaaaggctgtctttgtcttcatctctattgtttctttttataattacttctccagttgccttcagcgacgccaccaccacttcctctgctagagtaacgggaaccaccaccatctccatagccaccaccttcacgtcggcctccgtatccaccac

SEQ ID NO: 17229 - DNA, 3019 bp, Cannabis sativa
ttgattaactcaaatatagtttgcttaataaatagtttaagcatgtgaacttaaaaatgatccaacccaatttaattaaaattgaaacacgtttataaatatattccaagtcatgttaatattatacctgacctattttgccactcctgaaaaagtattcataggataggagtttaaatctagagtagttaagttttgttgtaaattaaaaaatattttgacaaaactataattaaaagttaatgaggagacttttttttttcaataattaaagaatactaagatatagatttatagttttttctttattgtagaaggggcaactacattataaaaaaagttctttcaatttgtttttttctttaaaaaaaatataaatagtttagtgtaataaaaaaaaaagggaataataatatgtctgacccgccactacagtgacttgaatttacaatatattacacacaaaggtctacaactttgcaactaagttcttttgaaaaataacatatttacaggacctctcactattcaaggtcgggcgtaataattgattcaaattaaaggaatttcttagaagaataacacacacatatatatagggcatatatttgtgacgaggtaaaaaaaaaaaaaagagtaggtgtcaaaagaagtggggtgtgattatttattttctcttcttctcttgaatataaaatggagaagtttcaggaaggaacataaactatttctttgtggcctaaaactcaatacaaaattgaccgtttagattttatcctcaacaataattaacgtacaaatcaattttgatagatttgaaatataaaatgtataggaaaaagaaatttgatcatgttacttgtttttttttatcatgttactttcgcaaaagaaaatattaattttttgaattcattagaagtttcattattttctatttatgcttttcattcctttatttgtaagtaaaaaaaatgggcaatttattttattttatttaatttaatttaataattgaattggttttgatttgacaaatgagaatgctaataaagtctgataaagaaggcacgtaagatccttgtaggagtaagatttcattcattttattatgataactttgaattgtttccaaaattagcaagcaacaacaataagcaaataaaggccattaattgaataataaaaaacgattcgattccaactaagcatgaaaatttggattaattttttattagttaaaaagaaaaaagaaaatccaactttgttgtgctttacaaacatttctatccattagttacaactgtaaattactaaaatacccttatgatatgagttgtcaagctctgattggtttcaggtggaagaggtcttcaacaactatttagtatttataagttgtaagggaatggaatgaagaacggacagaccacacactttgttttgtgctcttccatgtctttcatatatctcttctcttttcattttgttcttttacaagcagtgtcctttctccaaaggtacattctttttctcttttctcctttttcattttccattaattttgctgctaatttgttcttgagttgtgtgtatgtttgtatgtatgtatgtatgcatttgtgcaatgtaccatggatttcttaaatttgtgttttttttgtttatgtagtggacaagcttcatcaaagcataggaatgcagagaagagatgtgttcaatgcttgtattacattcaccaaaacctttgacatagtgttcatatctgggctgtctttacaaactttggctgagtttcaagaggagaaacatatgcaaatgggggtgatcattgaaggagcttcttttaagttgaagctcgatcttggtgaagacggttgagcttagttacaggagattatatataatcaggtacatatttataggattggaagtttttgggtgtgatggagataaataaagtgaatgttttgatgcagaaatatgatgttgggaaattgttgggtcaaggaaattttggcaaggtttaccatgggaggaaccttgagactgggcagagtgttgccattaaggtgattgacaaggaaaagattatgaaagttggtatgattgagcagaccaagagagagatttctgttatgagattggttaaacaccctaatgtggtggagttttatgaggtaatggctaccaaaactaagatttactttgtcatggaatatgtgaaaggtggtgagctctttaacaagatttccaaagggaaacttcaggaagacatggccaggaagtactttcaacagttgatcagtgctgttgattattgccatagtagaggtgtttatcaccgcgatttgaagctggagaatttgctgttggatgagaatggagtgctgaaggtaacagattttgggttaagtgcacttgttgagtctaggccagaagaacatgttgttatgctaaaaacagcttgtggaactcctgcttatgcagctcctgaagttttgtgtagaagagggtatgatggggctaaagctgatatatggtcttgtggggtgatcttgtttgtccttttagctggttatttgcctttccatgatacaaatctcatggaattgtataagaagataggcaaggcaaactataaatgtcctaattggttttcactagaagtgagaaaattgcaggctagaattctaaatcctaacccgaataagaggatttcgatttccaaaattatggaaaatccatggttcacaaaagggttcaattgtgaagccataataataagtaagacagaaataactccatttgattctgatgcagcatttggccattgtgaacacaatgataccatctcagaggcaaaacatgagttagccaaacctatcaatttgaatgcttttgatatcatttctctctcaactggattcgatctttctggtttgtttacagaaaaggatgacaagagagtgacacaatttacatccacatgccccgcctcttcaatcatgtcgaaatt

SEQ ID NO: 17230 - DNA, 7336 bp, Cannabis sativa
ttattattctcacaggaaacccttgtatgtcatcccatagctctcccctaccacaatcctggcttgcattgcagttagctggatgatatcgttcaaattccgaactttggctacaaccgtgttaaaacgacttagaaatgtctttagtaattcattatgttgttgcttgatgtttgtcacggaagaagcttcgggcctcctatctcttgcgaatgagaattttttttaaagttctgcaataatcattcccaagaagtaaaggagttttgggagaatctatcgaaccaactgctctccgcctccttaaaggggttgggaacaaaatgcaccgtaaattattccctacattgctggcttgcattatagtattaaaattgttgaagtgtgccactagatcagtagtcccatcatacggcaggacatgaggattcataaatctcttagagaaatgggaatttaatatgtctggatgaaaaagttcgagttcctcgttagagtcatatccaggaaaatttccatgttccctgtcctagtaccttctgaactcatcttctaattgaatgaccctttgatgtattaaatcagcatctatttgattgacttgttcacacgctcgtggagcattttagtttagtctttcttagagatctagagcattcctgtttaattgttcgcacaatttaaggtgtcttcgattcaatttccttcaaaggccaagtctatcgcacgcactgtggggtttctcttgcccttttttaattataattactcactgaccgacttagtgaaatattttcttattgataactttgaaagttgctgacgctttattatttatcgcgatattcaagacaaggagttctttctcctggcggtggattttccatgtgagtaatttggaggattgactttgcccttggctcctccttgacccacttttgtccttgtttgattgagactcacgaggttcatctcgagttgttctttgtctttcaaatacattggaaacttgatccttgcttagatatgtatacatattatatcttccattcctccttgtcccctttttgtttgcgacccacatggtcttcctcgcagtcgtctaataggatgtttctcctaaatagacggtgcctcatttggaatggttagcaactacccattgtaattcctcatttcttttgtttggctatgcgacccttcgccaaagctggtaattttctaactccacaattgtgacatatcttgtggggtcatatgcatctgaactccttctgtgtagaatctcttcctcattaacatcccttttggaatcctcttcagtagggtcccttctttaatttggtctgtcatgggtttgagctccttaggttccttccctaggcgatgagccatgtcttcttgcttgatattcttatcttgctgggtgttttccattaggaaaaagcttttgtttttcttaggagatgctctttttctagatttttttcaccaaattattaacttagaatttcgttatcaataaatgaggcatttttgtaacttaaaagaaaaacttcagtaattactactaagtgttaatagataataataagtagagtggcacaagatatttatgtagttttgtagttaaatctatatagttttggagtcattattattttctgggttttttctgtgttacagagtacaaaattaaaggaatgtaagtaatacaatctcaatttttcccgggtgatcctagataattttggttgttccttttgtcgtatgtttaatctgatccgatccaattcaattactaattggattggatcggtctttcaattggatatctaattacgcacttgataatttcaatatttttttttttgattaatcagaaatttcattactccaaaaacaatcaaatacatcttaagagcacctaaaaggtctcaacgtatcctgctatacaatatgctgctgtgtatttctaaaattacacaaaacatctttttacaaattttctatccaactcttatcctttgctgtagctttttttggacaatatctacacaatctattctttaccaattttttgatctgttgtatcaatgccgagtttgactgcttgtttccattccatataagttcatttcgggtaaaccatatggaatacaccagcgctgctactgctgcactcaacacctgctttctggttttggagtgcctccccttctctattttctttgaaagttccagcagagatgttgcattgatgttccaggagagccaatccttcatctgagctaacagatcctgtgaaatggaacacgaaaagaacaaatgttcagctgtgtcatcagcttgcaaacagagtatacaagttgcatttcctatgacattgtgcctgtacatccgttccttggtctttagtctgtcctgaattgctaaccacatgatgaaactgtgtttagggatatttgttctgcaccacacaaacttactccacttcttcttctctgaaaccggttgcaacatgttgtaaccccctgcaatagagtatttctcagctgtgaaatctctttcgctcatgatgcttttcactctttcctttgcttctacgattttcctccaataccagctgctagttggtggagctttgtactcccaccaatctccttgtttgatgtaaacactatgtacccattttatctataggttatctttttttgtagcaattgaccatacatgtttgataagggctgcttcattccatgtggcagtgtttttgaaacgcaatccacctagtgatttggacttacataaggactcccaagctacattgtcagctctatccgccattccttggttccatacgaagttcctgcaaattttttcaatttcggctatgactcttttgggaagaatgagtagttgacaccaatatgtgtgaattgtgagcaacacatgattgatgacaactgctctccccgcaaaagaaatatttctggaactccatactttaattcttgctaccattttctacactaggcacatacattcttctgctgagattctcttggcacaaatgggtactccaaggtatctaaaaggtacactctgtctgctgaacccagacatgtttatcaccctgcaaatttcttcttcctgcataccagaacaatacaccgccgttttctgtatgttaggaaatagccctgaagtaagcgagaatgcctttaggccttgcatcatgagatatatactcttgacatcaccattgcagaacattaagacatcatccgcaaaactgaggtcatttagtttaatgtctttgcacctatcatgatagccaaactcctctctttcccccaccttttgcatgatcatgctaaaatactccattcccaagacaaataatagaggggacatcgggtctccttgcctaagcccccttttaggttcaaagaatccatgaagggatccattaaagagtaaagagaacctaggtgtggttacacaattcattacaagtttaatgaatttggcaggaaaattcagggccaccaacatttcctctagaaacccccactccattgtgtcctaagccttttgtaagtctagtttaatcatgcaacaaggtttagggctttttcttccataatgcctgattaagtcttggcatatcattatattatgggagatatatcggcctttaataaatcccccttgattgtatgagacaatctcggggagaatacctttcaatcttgtacatatcatcttagtcgcaatcttataaataacattgcaacaagctatgggtcgataatcacttacagtgttagggcatttcacttttggtatgagtgtgagcacagtagaattgatctccttcagtattgctccagagtgtaggaaagacaaaactgcttcagctatatcgtcacctatcagctcccaattctcctgataaaaagcactaccataaccatccggtccaggggccttgatactcggaatactaaacactgctgccttgacttcctcttttgtatattctttttcgagtagttgaatgtgggccgtagtaagcataggaccttgttgcacaacctgctgtttcacccgcttcttgttctccattttagaccccaacaattgttcatagaatgagatgaatgctttggttacatcctcaggattatctactctttcaccctctttgttcacaatggagaagacacggttttggcttctcctttgcttcaaagattgatgaaaaagtctagcgtttgagtctccttcatttagccaaaacactttggctttttgctacaagaatgagcagtaggccttattcacctctgagaatttccttctcgcttccaattcaatagcctgtagctcagagttaagagggtcttggtgtagtttggtttgactatcatctagctgttgtcgagctacatgattagcactttggatatctgagaaaccatctttgttaatctccttgaaaacattcttgaaacgcttcaattttgtcaccacttgatacattcgtgtgccttccacctgctgtctccatgtactatccaccattatttggtactttggatgtgattttcacatgttaaagtacttaaatggcttctttccagtcacaaggttcgggtatacacttagaacggctggagaatgatgaaaggatccttcatttaagaatattacttccgcattgagaaaagtatccaaccatgattcattagccattactctgtctatcttcgaacaaattcgatcagacccttgttgtttattactccaagtgtaaaagcaaccgctgtatttaacatcttgaatctggcagttggtgacacactgttggaagtctgaacctctgaacttcgctctctcccctattctttcttccttctcaagtatatcattaaaatcccctaaaaccagccatggttcttgggtctttaactgctacatatctgcccataaatccttccttccttcttctttattctgcccatacacaaaggtcacgtaaaagctacttttattaccaactgctgtaacacacaggtgaatgagttgagaagagcacttaatgatgttaacaacaaaactaagtggattccacgcaactaatattcttccacctgaatgccaagcagaatttgatgtgaaacaccatccctcaaacatgtttatatacaaagcacccaacttgggagcttttactctcgtctcgagcaaacctaccaaaccagccttttgggaagcaataaaatgcttaactgtgttttgtttctgttggttgttaagtcctcggacgttccaacttattattctatccattagaaagaggaggatctcccctcctccctgtgtttcaccatttcctactccacctctctgctgcccaagttcaggacccaaaaaagggtctgtaacgtcactatccagcaccataaagccattcgagatcttggttgcagctggtttttcagtattcttgggtttccatcctttcccaactagttggaattcctgcagggtagccttcttttccacttgtttaataattatcattcttaaccacccattcttgtttttgaccctccttcttcctacaaacctcagccgtgtgccccatccctttgcaatgagcacaagtgataggcttccattcataattgactattactgaaacattcaacccatgttcattttcaaactcaattaaacccgggaattcttgaagcattgacacttctatgagaacccgaggataactcagcttattcctctctttagtgaattcatccaccattagaggcttcccaatctgccctactatcttgaataaagtcgactgtccccaatatttgagttctaaatcttctaattgaatccaaatcggaacatttctaatatcctctttcttaaaattcacattaggatcccatgctttcatgattacaggcctcttattaaagaaagtatatcctccattaagaatgtgatttctatcttcaatgctatagaatcgaataaggaaaataccataggaaatcatacctactttgtccactttttccttccacaatctccgcacaaaaccttcaattataggtagtggtgggttggctccaagcacataacagacaattgatgagctctagaaatcaacttcctcctgtatatcttcttcagtaatcttcactctgttcttgactgtaaacgatggctccagattcctaacaatgcttccagaccgaagaactggaggaatagatttggatccttgagcaatctctgttgaacatttctgatttgcctccaagaacattgcaaaatcctccttaatctcctcttgttgctgaatagatctgagcgaagattttggtgataatggcgccctgaatacatccgtgagtttcggatcttcatcttcttcgtccgtgaactccagaggttccactccaagaatttcatccatagacttagttttctttactacatctgtcgacgtaggccctcgcttcttcttcttcttgcctgaaggcatgatcttaggttgagattttgcccttgttttggccatggccaccagctcgagagagagctgcaacaacgaaaaaatctctaacaaatactactttgataatttcaatattaacttaaaaacacgaaaaaaaaaatacatataaactaaatatcacccttcgttttactctactattctataaagatattatccttacaagtttaagggtaaataccattttggacgctttattttataaaaattgccaattggatattttattttgttaaatgacaaaatagatcctgtatcttctaaaattgtaaaaataagactctgagcttaatttttgacaacttttttttaatataaccaacttgaagacaattcctaacacaaacatatacagaaaatgtaaacagttaagtcataacacctttagatcagattcttattaaattttattttgatgaaaaatcagttcagagtcctatttgtaccatttttgaaaatacagggtccatttcgtcgtttaacaaaacaaatggtccaattggtaacttttgcaaaacacatggtccaaaatggtatttaccccaagtttaatgaaactaaagaatacagatattatccttacaagtttaatgaaactaaagatttaaaataagtagtaaaataaaacaaagtatcatgaaaacaaatacacaaataaccaagtattacatatttgacacaataataaacaacaactataaatataattaatatatgggtgactattcaatg

SEQ ID NO: 17231 - DNA, 10171 bp, Cannabis sativa
tattatttttttctcttagattagatatcgatatacatactcgatctaaaatattagatgtatctaattcgatccaaaaaatactacatctaaaatattcgatatacccaaaataaataaataaatatatatatgaaatatatctaattagtaaaactaatccaatctaatatttaataaatgttagatcaattagatgattaaaattaattaaatcatatcaaataataaaatttaacattaagtcgaatttaactagacctaaaaatgttaaatgtgtggtccaataaaataattacttggtccactgaaatattctccggaaatatttaattgatgaaattgtcaatttcgggtaaccaattaaaagatgtattatcctttccaataatagaaaatacaaaataaataaaaagatgtgcctttagcttataacttgtagttataagcctgccggcaattttttgtacttgccaaccaatataattacagtttcctgcttaattaattggtcagataaagccaataatgctaataaggatacgtatgttaattttaaattgtatacttttacctcttcttaagctcaagcagctgtcttttatcattcaatatttaggacttggtaatcagttatataaataaggcggtatgatgataaggtcagctgtgtgtgaagttgagcaattgctattacattatagaatgttattagtttaccacaatttttattatttacttattaatttcaattaacttaccgtataaacaacgattggcagaatattaatttatgaatagaagaatataatattaacaaacataactaaactttgctatgtttggagtgaatataaaaaaaatatatatttatatatataattgtgtttgtctacattactcagttgtttatattacacttagtagctaccaaatcacccggttatttgacagcttataataattttagatggcgttaattaaattttgttctgctagggttttcgtaatttctctagtttgctcgacattctgctggtgccatggcaggtggatcgaagaagaaatgggagagacctaagaagcggcctatgtatactgataaaccaagaaaggtgaagctgttggatgagattcttggtgtagagggggcagtgttttctgatgatgtgattgttcactacaagaaatgagacttttgccagcgcatttttatgctggcaaaagttaggtattatgctggcaaaacagaatttacattctccagcatatttttgcgttggcaaaagagggttggcaaatccttgttggtattggaacttttgccagcgcaaaacaaaaaacgctggcaaaaatgacttttcccaacgcataaatacgctggtaaaagatagacatttcccagcgcaaatgtgtgctaggaaaagtcttacttttaccagcgcattaacacgttgggaaaaatctaacttttgccagcaaaaatgtgagctgggaaaagtctcacttttaccagtgcattaacatgctgagaaaattctacctttcgccagcaaaaatttgcactggaaaagtctcacttttgccagtgcattaatacgctgggaaaagtgtaacttttgccaacaaaaatatatacgttgggaatagtcttactaaaattttgtaatttaatttaatttttaattaatattatttaatttaaaaaatttatcaattatttatgaaaataaattaaaaaaaataaaacatgaaaattaaaacataattttaaattattttaattatatatgattatagttataattgtctgaaagttagtaaacaaacatatctttaaaatactaacataagcataattttctcacctaaaataaagtgaatactactacatatcggttgcatcatcatcaatatcatcgttgccttcaccatcattatctcccacctctgcccgactagatcccacatcatcaaactgtcatggagggaggtctaactaaaatcctggaatactcacactcaatttctgcaccaatgcccgcatcatttggtcttgattgacttgattttgctcaagagcctaatttttcttcttaatggcttgatttacctgcaaaatagcctccacattgatcgattgggaccctgacatggaagatgaagatgtcgatgatcgctttccttctattgccttaagcctaggcaacgacccaaatcctttcacataacgtgaatgtggtggaccaagaacttttgcaactatatccatatcgagtgggtactggctcgaatccccggtaatacacgaagcagcagatgatgcatttgtaaatgtagaaccaaatgcagacatagcttgagatgatttttttttgtgtcatctcttcctacaaagaagaaattaaatcatcaataatgtaaacaaatataactttaaaatttcgttaatttaagtatcaaaataataaacttttaatgtaattcaatatttttcttttgcagcgtcactcaaccattggctcttgtcattctttttcttgtggagttgttcaaatgtgtctatagcacttggataggctccagttgttgggttaatctacaaaaaaaattgaataaaaaaaatgcatattaaaggtaagatgatttatgaaacttttcttacttcatcatggagatgtcccacaatggtcttcgaaccgtgcgcccctaatatatgcattttggaccgtgccactttgtttctctcaaaaatcgccttcaaaagtaaaaaaagaattcatattatcttgaatagaaaaaaattcaagaaaaattaagtaaaaagtatcaagaattttgtagaccttttgctgatctgtattccaataatcacatagtacccatgattcaagattaatatttttataaggatatttctttgccttttcattgtctgtctctcctccactcttaacccaatgagctttcatgctgcatcaccattcacccacatacccttacatattcacatccatgttattgagaacaattggatcttccattggataaataaatttattctacaatcaaaatttcaaaaataaattataatgtcaaatatttaaattttaattaacattttttctcaagaaattaaaattaccgctgactttcgacgaatgactaagatatcatgcttgcttacatcattccaactaagagtagttggaggtatgttatctcgcacaaggtatgatgtatagttgttagacatctttcaatttttttcaactacactactgctagtttcatgaaacttcactagaagtggagatagtttctttgatgccaactctatttccagattacccccgtaatagtacccacgacccctcttcttttcacccgaacactctcagttctttcttgttccattctgtatattggtttagaacatttgatataagattaaaatataatacatgttagtttaacaataataaatatagtaaatttttttaaataaaaaaaacaaacaaacattaaagtattcttcataaaacaaaaatcattgtttaaaattttgttttccaattacaacacatcatcatcatcattgactacaaaattatcaccactatcgctatcactgtcgaccacaatattttcttcatcatcatcgtactcggctaaaatgtcgtcaggaatttcatcattgtcatcatcaacaacaaaacgattagaacttttgctgagtaattcatcaacattggatacttcagttggataaacatctgtacgatcatattaaatagtatcaaacatcggaagttcaacccataactggaatccaaaagaatttacttcttgaagtattggtacatcactagtggtgtcagtattatcgatatttgtatctgagaaatcacccacatttctcgaaatataaacatggacgactctccaatcaacctcatttttgacatatgaaagataatataccaatttagcttgggatgcaagtataaagggatcatccttgtaacattcatccttgacaaatacacttgtaaaattgccatctttcttagttttactagtgttgaaccatttacacatgagtagtacaacactataacccatcaaatacttgaattcaataatttcttccagttctccataataattttcttcttcctcacttggaaccattacaccactattttgagtcttcaacttttcatcacattcatggaggataaatttgaccccattaacaatcatccctggatagtaaaatacagtagaactaggtttgttggcaagagcatacaattcgtcagatgttgctattggagaagactcacgcaaatgattgatctaacaatgtcaatatacttaatttagattaagtgcgagtacaaatgatgtgttatgtaattaaatttacgtgttttatggaatcatactcgagttttaaaccattgagggaattcagcttcttgtctatgttgaagatttgaactatcactttgtcttttcaactcatccatgtgctcactatgattaaaaggacaaatcaattaaaaataaaaacatgaatgttaaataaaagttgaaggtaggaaattaatattaaacacatacgtaaggtagttggatattttagcacagttgttcaaaatgtaccactctgctctttgcttcaattgtgaaggtaaaagattagttgtttttttcccaagtagacgaccaacgaccttgaacactaaaaactcccgactaggttcaactcaatcattattcctttcacgtcgatagaactgggtttcaacaccctgaaagtacattgagcaaaatgttaatgcctcattcaccacgtaagcttcagcaatcgaaccttcaggataagaaaaatttctaacatattgtttgtacaccgccatacaacgttcaataggatatatccatctaaagtgcattggaccaccaagtattgcattgttcggaagatggataaccaaatgcaccataataacaaaaaatgcacgaggaaaaatcatttccaacttccacaaaattgatgtctttttgcatcttcttaagatctttcacatttaaagttcgggagcaaagttgcttgaaaaagaaacatagctcagtaagtgtctttcgaacatctttcccaaaaactgatcaaatatttgccaacatattttaatactggtaaaacttttaataataaaaatatatatttttgataaattcatttttaaagtttccactaaaatataaatcataatatttattttaataaatcttaataaatatacttcaaaactattttattttgttaatattatgagaaaaattagaatgtatttatactaataattataaaatattacaaaatttaaaaaaacctaaaaaaaattatgatatttttaccagcacagttcgtaaatatgttgataaaagtaacttttgccagcgcattacactattacgctagcaaaagtaatttttacaaacgtaattttgtgctggtaaaaaatattaaagggaagggttttatacagcttgttatgccaccacaaatataagttgcgctagtaaaaatatgtttttccagcgtaaatgtgtgcatgtaaaactgtgacttttttaccagcacaattcatgagatgtgttggtaaatgtaacttttgccagcacattagtgaattgtgctggcaaaagagagacagagatttatcacatcttgattctctgttagaattgtaaagggtggatccaattcgttttgaattttctcatttgttggaaaaaaaagctcttgaagaggtattgcttctagtcactcaatatctagggtaccatacattaatactgatcctatgccaaaaaatttgaatagtatatttgaagtatcaggttcgggatcgagaaccattaaagatcatattaaaattgattttgaagatatcgaggaggaggttgaattttggaactcttcaaagatatgtgttgggttctaatcctccattatctgtcatggatggcttctgtaggagaatatggaaagatatgaggtacgtaaggttgggattatctctcatgggctcttcattataagattcttgagggataatgttcttaaaaagggtgtggtgttttttgataaaaaaaacctcttattttgaaaccatggaatgctttagatgactttaggaaagaaaatgaaaaacagatcctacttgggtgcaagttctaatcttaagttaaagtattggagggagaggtctctttttaagattataggccaagtagggaagccaattaggcttgatccggtaacaaagaatagagaaagttgaattttgcgagaattatgattgaagtgtctattgatcaagactttcctaatgtcatcaccttcgtcaatgagaaggatcaagaggtggatttaatgattcattataagtggaaaccaactacatgttttgtttgtaaagggataggacatgcagctgtcacttgtaagaatcagctggggaaacaagtttgggttccaaaatcaaaagttaatttggaaaaaaaaaaaaagaggagaagaaactacaggttaatagtgaaggctttcaagttgtttctaataagggtcataaactttctaatcctgttattcatgtgatgccacctgagaagttgaggaatggttttaatgatggaggtaggagggttcatgttatcattgtaggagggggagctactccttcagttaatggataaggtgctttcttggaatgtgagggggcttaacaagacgaataagcaagtagaggttaaaagaattattttttctaagcaagttggtcttgtgggtctccttgaaacaaggattaaagctaaaaaaatgggagctttattcctaaacatgttttagaattggtgctttacgagtaatagtgcttggcattcgaatggtagaattgtgttagcttagaatcctaatgtctttcatgtagatatccgttattgttctagccaactaatttattgtttggtggaaacttaacatggaaatgggaagttcttttgtacttttgtctatgcctttaatgaggaccatagaagcactgacttgtggaaggatttgtgtatgttgaaatcagtggaggcttggttattgttaggggattttaatgcagtcattaataatgataaaagaattggagatcgagtaaggcaactccattttgaagctttttgaagctgtctacatgattgtgaggtggatggacataaagtggttgctttttatacttggaataataagcaggatcctccgcattgcatttatgccaagttggatagggtacttcttggtaattctaagtggcttgatatgtttgagtttgatgaggcttggtttcttcatgaaaatttatttgatcattaaccgattatggtatctcttacaaataaaaaattttcaagcaagaagccattttgttatttcaaaatgttgtagatttttcatggctacactaaaaatagtggaggatgcttgaaagagctcggccaagggttcccctatgtttgttgttgtgaccaaggttaagaaagtgaaggctcatctcaagcagctgaacagagatagagtgggtgatattgggtttgcttattccaatctagagacccaattacaaaaaattatgcagtgtgttaatggagacccttccaacttgtaacttgtcaacgaagaagcgattgttcgaggggattttatttattaagttacagcatgcttacttggatttccttaagcaaaaagctaaggtgggttgggttaagcatggagatgcaaacacttgtgtttttcatagcagtcttcgagctcaaagaatccaaaacactatgtgtaggattacagatgagaatgggatttctagagaaactcctgagggagtgagtgcagctttccttggttactatcaaaatattttggggacttgcctttgtgattgaaaataggttaaagcctgtgttatgagggagaggcctatcctttcagttgaagctattcttctactccaaaggccttttgataaataatatgtgaaaaatacagtttttcacattcctggggagaaggcgtttgggcctaatggctttagtagttatttcttttagcatcattgggatttaatcggtgatgagatcacactggcaattctctcttttcttgaaaatggtcgcatgctaaaagagatcaacacaacaacaattactcttattcctaaggtgaattttcctgaaaatgctagtgatttctgccctatctcttgttataatgttatatacaagatagttgcaaaacttttatgttggcgattaagatgtgtgcttccagacttaattttctgaaagtcaatgtggtttcatccaaggtcgctccattgctcatcacatcatggtatgtcaaaatttggttcatcattatattagaagtggagctcgaccaaactgcatgattaaaatggatatttgaaaggcctatgacacaattgaatgggatttccttgaggaaatgttaactgcctttgttttcccaatcattttaagagcttactcgtgatgtgtgtgctgacacataagttctctctgatgatcaatggctcactgcatggtttcttctcatcaaaaaggggtcttagacaaggtgaccctatgtctccaatcttgtttgtgcttggtatgaaatatctatttagaataatcctcaaaaaaccgctcaaaagacagaattcaaatatcatgggaggtgtgcggaccttggcctcacacatttgtgctttacttatgatgtaattctttttctcatggtgattttaaatctgtttatgccttactaaggggtttttaaattttctctcacacttcctagcttcaagcaaataaggctaaatctgaaatcatttgtagtgactggcttccacagaggtgatacaccatggataacgaatagaagaagattgtcgagctttccaaaaaaaattcaactgcgaagaagtgtgccaccgatgcagagaaccaggtgtctgacttagaagaggctattagtatctagtcttcaaggagtggctaacaatgcaaaagctccagagaatagcttgaagaaagatctagctattgctcggaaaaagacttctaaggttgaaactctttttgccagtcacttgatgagaagactctaagcattactcagttagaggaccaagttcaacacctcgggagctaggtgattgagtgttgctactgatgttgccttatatgatgacttatgttttgatgccatttatcgtgcatggccgtccaatggaagtgcacaatcattcaacaggacgaccttctcttaggataaagtcccattctttatagagctttctgagcaacattttaatgttaacacttttcaaaggactaattttgacctgaatggtgttgaaccagtggtcgaagaagctgcaagggttgaaggctacaaccctgagcattctgacattcctcctgctgctgatgtgccgccaatagagaatgatgaacatattaaagctatatatttaggacatagataactttttggctttgaaggacatcttttcttttttagctttagtgtgttagttggtcgtcctgagcgaccttttagtgtggataagccttagtaaaatattatcagattggttttaattaaattaaaaaatattctaacataacaaaaactttattcagatgtttttttttttttactttatccattaccgcttgaccttttaaaacatgcaccatattctatgtcttaagaaatttggtcactgggagtaacgtcaatgtttcttaatgttttctttatcatgaaagtacttacacatgagtgaatttttttttgtttttttatgctcaggtaacatatggctctcatataccataacataacctatgtgcccccaattgatcaaagaagtgccttcattggtcactttccataccgaatctcgttggcctttcttgatcctgactattagggaactgttacatgtgtgagcactcatctgcttatctagagactcgtcggttggtagtgttgaactcactaaagaaacaaccgaagttattgttggaa

SEQ ID NO: 17232 - DNA, 8384 bp, Cannabis sativa
tggtaaaataatttccaatagagagatgcaaagaaagagagttgaaacattgattgagtttatgtcaaaggcccaaggcattattaaccttgaggacgcttatatacaagccttcgagtcctttcagctctagttccttccacgatttcccctagctttacacctcaagttttggctctaacttcggctcttcccagaacttaattttctccaactgtttacggacccactgcctcttgtctctgttggcgaacacatcgcaaccaacaacacgtggttctttagtctggccgacttggcatacaacctctctaagtctagccaattaaaagtcttcttccaagcccacatgaggctcaccaattgctggttcgtcaattcctgaccctatttcccccaaataataccagggaacaaagtcagttgtggtgagtgggggttgctccacattgacaaaaccttcttttgaggtgccaatgttggatataccctgggcggcaggggtgggatcagttgggttagctgggttgactggacgagttgtgttggtcgagtttgttgggcctgccaggttggtaggattggctaaatctgtagggttcgtggaagtttcagtggtagctggaacacgaacattaaaattagtagtcatggggtcttgaggaagacccaatgaagcagaagttgtagctaaagttctccttgctacaaccatggtgattgaccgaattgataaataatgctctcaatgaaagcaccaaaatgttgacctcaaatctggtcaactgatagcggagccttatttacgatatgaatcaccatatgtaaataattaaagcaagcatataaaatagacataacaattttatagaagttcggcccctttggttaacgggtaacaacctactccctttttagttgtattgatatgagagataataccactaagaatacaagttttgtgagttttgtagtggctctctatgaattacaatagtgagaatgtaaggcaaattccaagtaagtgagatgagaaagacttagtctcccatacactataagtggcgtgtaggagatagagagagctagggtttcaagagctagaactcaagagcttaggaatgagaacttctcccttttggtttaggctagtgctctttatataggagagagcttatagaagatctaacccaaagtaatatcccttaaaatgaggagatatcacctatttttcacagactaaatatatagaaaacaactcgttaattattcctaagaatagataaatatttgaagttgagccactacaattttgtgggttgttagagtgaattcgtagctaatagtgaaccattatttgtccagggtgaaagctatagagacgccaactgtgtcagccagaaaggaagctggctgacttaccatttactggagactggccgacccatgcttcactatggccggtcaggggtggtctagccagaccctcttggttgaccattttgtctctttgccatgcttgattatttggactcttcgtcaattggtactttatgcatgatgacttggtcctcttactgacagactgtacttcacgtggcatcaatcttgcttatgtgaacatgccacatcacatgggtaaaaattgaaataacatcgtaattattacaatcgtgtctatgattacaaatataattcatgtgaaattatgttgtttttttaattaccaagtaaaattaacaaataatttaattaatatagaattattgtaaaattgtttgaacaaaattgaaatatattatactaaaattgaatctaatagattcgaataatagtgtagaaattaaaatgacataagatattttatatgtagtattagctacccttgtagattgttactatttatttttgtaagatacgcacggtcacaccacaagataaaaatattaaatattattatatatataaaaatttataaacaagtatcaagatattatatgaatggataattagtatttttttccctaaactttttacactactaaattgtgtcatctatagtatacaactcgttaataatgctcctcaaaatataaattttacagtaacgtagtctttctatcatattctattcaattttatttgaatgaatgacatgataaatgttaattaataatgaatgcaaattaaatatctttcattatctctactttaactttaatgattaaaaaattaaaaaatataaatataaagtattatataaataaaaagtcttttattctactatttattaacatataataattaaaaggatgaatagtatttaatttgcattcatttatcagctattatccaccacttcacgcatatcatgatagaattgaattaaatgtgataaaagaactacgttactgtaaaaatttatttcgaggggtattattaataagtcttatactatagggggcataacttaatggtgtaaaagttcaaagaacaaaaatattaattatataatataaatatataaataaatgaatatatatgcgattaatacacaatatattcttacctaaacattttcactttagaccaacaaaatctatttcgaaaatattacttcatattaattttatcatctttactaaatatatcaactaagtattttataataatatgtttctaaaaaaaacataattaaagaaaaatatttaatattaaaatacttcaaatcttttgtaattcttttctctttataaaatgaaaaatattatatttaaaataattaattacaaatatattatacataatttttgtaaatgttaattgcaatgtgaaatacctcaaagttcattttttacgagttcttgacttccattaaacaagtttagttttttcaaaggaattttttaaaactaggggaaggaatgcaaagaaacttacttactaagtattgcccattgaaataaaattcgagatcttattttacaatgtttttcatttggttctaaataatatattgttcttattgtgataattctccttgagaataagatattatttatagtcaaatattgaatctactagacaatgtagcttacattaggttaggtggcgtattttaagaattaggcaaaagaaaaaaagactacaaatatttaaattgaatttaatccatacataataaattagtcaaaaataggatgtcgtataataaaagaaattaatagtatagtatttttataagatatcttaccatatgcacgtgatacatctcataggttatagcagcaacacgtttattgacatttgacaaggatggaatggatatgtctattttcttttttaaatgaaaaaaaaaagtataaaaaacaataaaatgtagcttgtatagaaagaaagaaataagaacaacatcaaatgaatggaccctttcactagaaaataaataaatgaatgaatggacaggagctaaaggaaataaaaaagaaagaagccactcaaaaacatcttactttatgcgtcactctcacttacactcaacaaaaatatcaattccatggctatcttttcttttgcttcccaaaccaaccacccatcatcattccctttctaaatgtttggcatcactatatatatataaatatatatatatatattttcttcttttcaaaaataaatgaataaataaataaaactacattctcttgtgatttttttttttttctagaaattagctcattatattacaacaaactataatgtacatcctaacatgttggggtatattggaggcttagttagttaccgttatattagttagtctgttactaacggtattaggcaagttattaagataccgttatactccgttttccttttcttgatttctataacattaccatgtataaataccctgttttgggtctcataataatacagttcatttttctctattatggtatcagtcgcttaaacactctcacgatcgctgccatgcctagaactcgagcaattggttccaggaactccggccaagctccattgccgaacaattcatcctccatactagatgctcctccaaatcctccgatcattcctctagcctctgctatcaccggagacattgttcctccttcgcccaatgcgacaacacgacctgtccatgaaggtagttcgagtccatatttcttgaattctagtgataatccaggactcaccttagtcactcctctcctatctgacaagaacttccaatcatggcgtcgcgatttcgaactctccgttggtgcgcgaaacaaggccgtcttcctcaaaggaactttacctcaacctcctatcgatcatccactgcatcaccattggtttcgttgtaatcagatggtgatgtcctggatccttcattctgtctcgcctgatactaaaagcagcattatgttcttggatacagctgctgagatgtggcaggagctcaattcacggtatgatcagggaaacggtcctcgcatttttgaactcagagaatcgctcatcactctgcatcaaggcgatgactctgtaagttcctacttttccaaacttaagtgcatgtgggatgaaatccaagaactctgtcctcagattccttgcacatgtgctgcttccattgataaccttgctttcttgaatcaagaacgtgttcttcaatttttaacaggcttaaatgaatctttttaccctgttagagctcaaattttgcatagatccctttccttccctgtctaaagttttctccattgttatccatgaagaaagacagcaaaaactcaaaaccccccagattccctctcttgttgcctctactcaaggttcttttactaatccagctattgcacaaaatccctctgcatctgctgctgatgcaaatcaaaatcacaacaagcgaatgagaccttactgtacaaactgtcacaaacctggtcatttgaaagaaaaatgtttctttctcatcggcttcccaccaggttatggtgacaagaaaaaagaaacacaggcagttgctaatcaagcatctacttctactgatcctatatcttttttagccaatctgactaaaccaaaagacatttaaaacctcatttctcttctgactcagaagctgcagccaactacttccacttcagaagctcaaccttttgcttcacacatttctggtaatatcaaacacaactcaaactctctctggattgttgaaagtggtgctactcaccatatttgttgtgacatttctttattttcccaattacatgacattcccattgccgcatccattaaattaccaaatggcttaagcattaaaattcacaaatcaggcaatataaaattttctaatcaactatacctatccaatgttctttatgtacctgattttcaatttaatctgtttagtgttcctactttcctccaaactctatctaacagcatatttttcacaaaatcttgctgcattttacaagattcccagaacaagaggattgggattgctaagcgtattggccatctctattttctggtgcatgattcacatactgtccacaataacactgtttgtaacatttcttgtaataattctcattcatggcatgccagatttgggcacccatctatgtacactacaaatctaatcaataaaatattacattctaaagatcctaatgtttcttctccttgctcaatttgtcatcttacaaagcaaaagaaattgccttttctttcgaacaataactttgctacatctaactttgacctcatacatatggacatttggggccctttccatgtccaaagtattgaaagttttcgttattttctcaccattgtagatgaccacagtcgcttctgttgggtatatatgttaaaaacaaaagctgaggcataactctatatccctcagttttacactctaatatacacacaatatgctacaaatatcaaagctatccattgtgataatgtaaaagaactaaatatgacatctttctatgctcaaaagggtatccaaatcaacaactcttgtgttgaaacacctcaacaaaactctgtagttgagtgaaaacaccaacatatcttgactgttgctcgagctttggctttccaatcctcccttcccctagcatactagccttactttataaacactattgtttctctcatcaataggagccctacccccttattaaaatatctaacaccacatcaaatcttgcacaataagcagcctacctgcagtcacttgagggcttttggctgccttgcgtatccatcctctttacctagtaagagacataaattctctccccgtactcatgctttcatcttcattggttatcccaatggcatgaaagtatacaccctccttgatttagccaacaatgctatttttcattctcgagatgttattttttatgaaaccatcgtccctttaaaaagttcgttaaaatctgatctcaacaatttctttgccaaacctgctgcacctatccctgctgcaacatttcaccctacttctatcccttcacaacatattaacacaaattctcatgctaatcctcctaaggacccccctcctgttgcatctaatgatacaacaaagacaactaaaactggtagaattacttcaaaacctatccacttaaaagatttcatatgcacatcttctactgcatatccacttgacaactatatcaagtatgaaaggctccacaaatcatttcgaaatgccatactctaagcaaatctcgaactcgaggcaacttcatacagtcaagcctcaaaattttctcaatggctcaaggccatggataatgaatttttttccctcaaacaaaacaatacatcgtccattgtctcccttccaccaggctgccatgttattggaaacaaatgggtatataaaattaaatacaattctgaaggtgaagttgtatgatacaaggctagactcattacaaaaggttacaatcaacaacatggtattgactatgttgacacttttgcactagttgtaaaattcaatacacttaaactttttcttgcccttgctgccctcaacaactggtctcttcaccaaatggacataaacaatggctttttacatggtgaccttgatgaacaagtctacatgaaaatacctaaaggctatatacatgagggggagctccctcctaatgttgtctgcaaattaaacaagaatttatatggtttaaaacagtcctctaggcaatggtttgccaaattcagttcaactctacttagcaatggtttcactcaatctctaaatgaccattccttatttataaggtcatccaataactcttttcttgcccttcttgtctatgtcgatgacatagttattgcaagtaacaatgacttggatgtctctatttttaaaaaatttctaaactcaaaatttcaactcaaggatcttggtccacttcgtttcttccttggattagaaatagctcgatccaaagtaggtattgctatctctcgaagaccttttaccttgcaaattctcactgaaactggatcccttagaatcaaaatagtctccgctccgatggaggccaacctatctctcaacaaagacattagccccccctgtttctaaccccacttcctacagaagtctcattggaaaactactatacttaatgctaacacggcctgacatcacatatgttgtcaactgcctcagccaatttctcagtgactctctacaacctcacatgaaagctgccacaagaatcttacaatatttaaaaggtgctcctagacaaggtctctttttcagctcctttgcatcaacaccaaatccattccaacttcacgccttctctgatgctgattggggaacatgtccaaacacaagaagatctatcaccggtttctgcatttttcttggctcctctctaatattctgaaagtctaaaaagcaaactactgtctccaaatcttctgcagaagctgaatataggtccatggctaacaccacatgtgaactcctttggttgatcaacatcctcaaagattgtggcataacacactcaactcccgtaacactttattgtgataaccaagctgctctacacatttatgaaaaatgccatgttacatgaacgtactaaacacatcgacattgattgccacattgttcgtgatcaagtcaaccagaaatgtatcaaactaatccatgtaccgtcaaaacacaacacggcagacataatgactaaagctcttttcctagctcagtttagtttccttttgtccaagatgagtgttattaatctctacacctcatcttgagggggagtattagaggctttgttagttaccgttatattagttag
